United States Patent Application Publication US 2023/0026259 A1 - sequence listing, part 59

SEQ ID NO: 155672 - DNA, 16119 bp, Homo sapiens
  Payload ID: 10597
  Gene Symbol: MUC4
  Gene Name: mucin 4, cell surface associated
  ENST ID: ENST00000610962
  CDS Start-End: 1-16001
gaaccacagaggacacattaataactggaagtaaaactgctgccccagtcacctcaacaggctcaacaacagcgacactagagggacaatcaactgcagcttcttcaaggacctctaatcaggacatatcagcttcatctcagaaccaccagactaagagcacggagaccaccagcaaagctcaaaccgacaccctcacgcagatgatgacatcaactcttttttcttccccaagtgtacacaatgtgatggagacagctcctccagatgaaatgaccacatcatttccctccagtgtcaccaacacactcatgatgacatcaaagactataacaatgacaacctccacagactccactcttggaaacacagaagagacatcaacagcaggaactgaaagttctaccccagtgacctcagcagtctcaataacagctggacaggaaggacaatcacgaacaacttcctggaggacctctatccaagacacatcagcttcttctcagaaccactggactcggagcacgcagaccaccagggaatctcaaaccagcaccctaacacacagaaccacttcaactccttctttctctccaagtgtacacaatgtgacagggactgtttctcagaagacatctccttcaggtgaaacagctacctcatccctctgtagtgtcacaaacacatccatgatgacatcagagaagataacagtgacaacctccacaggctccactcttggaaacccaggggagacatcatcagtacctgttactggaagtcttatgccagtcacctcagcagccttagtaacatttgatccagaaggacaatcaccagcaactttctcaaggacttctactcaggacacaacagctttttctaagaaccaccagactcagagcgtggagaccaccagagtatctcaaatcaacaccctcaacaccctcacaccggttacaacatcaactgttttatcctcaccaagtggattcaacccaagtggaacagtttctcaggagacattcccttctggtgaaacaaccacctcatccccttccagtgtcagcaatacattcctggtaacatcaaaggtgttcagaatgccaacctccagagactctactcttggaaacacagaggagacatcactatctgtaagtggaaccatttctgcaatcacttccaaagtttcaaccatatggtggtcagacactctgtcaacagcactctcccccagttctctacctccaaaaatatccacagctttccacacccagcagagtgaaggtgcagagaccacaggacggcctcatgagaggagctcattctctccaggtgtgtctcaagaaatatttactctacatgaaacaacaacatggccttcctcattctccagcaaaggccacacaacttggtcacaaacagaactgccctcaacatcaacaggtgctgccactaggcttgtcacaggaaatccatctacagggacagctggcactattccaagggtcccctctaaggtctcagcaataggggaaccaggagagcccaccacatactcctcccacagcacaactctcccaaaaacaacaggggcaggcgcccagacacaatggacacaagaaacggggaccactggagaggctcttctcagcagcccaagctacagtgtgactcagatgataaaaacggccacatccccatcttcttcacctatgctggatagacacacatcccaacaaattacaacggcaccatcaacaaatcattcaacaatacattccacaagcacctctcctcaggaatcaccagctgtttcccaaaggggtcacactcaagccccgcagaccacacaagaatcacaaaccacgaggtccgtctcccccatgactgacaccaagacagtcaccaccccaggttcttccttcacagccagtgggcactcgccctcagaaattgttcctcaggacgcacccaccataagtgcagcaacaacctttgccccagctcccaccggggatggtcacacaacccaggccccgaccacagcactgcaggcagcacccagcagccatgatgccaccctggggccctcaggaggcacgtcactttccaaaacaggtgcccttactctggccaactctgtagtgtcaacaccagggggcccagaaggacaatggacatcagcctctgccagcacctcacctgacacagcagcagccatgacccatacccaccaggctgagagcacagaggcctctggacaaacacagaccagcgaaccggcctcctcagggtcacgaaccacctcagcgggcacagctaccccttcctcatccggggcgagtggcacaacaccttcaggaagcgaaggaatatccacctcaggagagacgacaaggttttcatcaaacccctccagggacagtcacacaacccagtcaacaaccgaattgctgtccgcctcagccagtcatggtgccatcccagtaagcacaggaatggcgtcttcgatcgtccccggcacctttcatcccaccctctctgaggcctccactgcagggagaccgacaggacagtcaagcccaacttctcccagtgcctctcctcaggagacagccgccatttcccggatggcccagactcagaggacaagaaccagcagagggtctgacactatcagcctggcgtcccaggcaaccgacaccttctcaacagtcccacccacacctccatcgatcacatccactgggcttacatctccacaaaccgagacccacactctgtcaccttcagggtctggtaaaaccttcaccacggccctcatcagcaacgccacccctcttcctgtcacctacgcttcctcggcatccacaggtcacaccacccctcttcatgtcaccgatgcttcctcagtatccacaggtcacgccacccctcttcctgtcaccagcccttcctcagtatccacaggtcacaccacccctcttcctgtcaccgacacttcctcagaatccacaggtcacgtcacccctcttcctgtcaccagcttttcctcagcatccacaggtgacagcacccctcttcctgtcactgacacttcctcagcatccacaggtcacgtcacccctcttcctgtcaccagcctttcctcagcatccacaggtgacaccacccctcttcctgtcactgacacttcctcagcatccacaggtcacgccacctctcttcctgtcaccgacacttcctcagtatccacaggtcacaccacccctcttcctgtcaccgacacttcctcagcatccacaggtcacgccacctctcttcctgtcaccgacacttcctcagtatccacaggtcacaccacccctcttcatgtcactgatgcttcctcagcatccacaggtcaggccacccctcttcctgtcaccagcctttcctcagtatccacaggtgacaccacgcctcttcctgtcactagcccttcctcagcatccacaggtcacgccacccctcttcttgtcaccgacacttcctcagcatccacaggacacgccacccctcttcctgtcaccgacgcttcctcagtgtccacagatcacgccacctctcttcctgtaaccatcccttccgcagcatccacaggtcacaccacccctcttcctgtcaccgacacttcctcagcatccacaggtcaggccacctctcttcttgtcaccgacacttcctcagtatccacaggtgacaccacgcctcttcctgtcactagcacttcctcagcatccacaggtcacgtcactcctcttcatgtcaccagcccttcctcagcatccacaggtcacgccacccctcttcctgtcaccagcctttcctcagcatccacaggtgacaccatgcctcttcctgtcactagcccttcctcagcatccacaggtgacaccacccctcttcctgtcaccgacgcttcctcagtatccacaggtcacaccacccctcttcatgtcactgatgcttcctcagcatccacaggtcaggccacccctcttcctgtcaccagcctttcctcagtatccacaggtgacaccacgcctcttcctgtcactagcccttcctcagcatccacaggtcacgccacccctcttcttgtcaccgacacttcctcagcatccacaggacacgccacccctcttcctgtcaccgacgcttcctcagtgtccacagatcacgccacctctcttcctgtaaccatcccttccgcagcatccacaggtcacaccacccctcttcctgtcaccgacacttcctcagcatccacaggtcaggccacctctcttcttgtcaccgacacttcctcagtatccacaggtgacaccacgcctcttcctgtcactagcacttcctcagcatccacaggtcacgtcactcctcttcatgtcaccagcccttcctcagcatccacaggtcacgccacccctcttcctgtcaccagcctttcctcagcatccacaggtgacaccatgcctcttcctgtcactagcccttcctcagcatccacaggtgacaccacccctcttcctgtcaccgacgcttcctcagtatccacaggtcacaccacccctcttcctgtcaccagcccttcctcagcatctacaggtcacaccacccctcttcctgtcaccgacacttcctcagcatccaaaggtgacaccacccctcttcctgtcaccagcccttcctcagcatctacaggtcacaccacccctcttcctgtcaccgacacttcctcagcatccacaggtgacaccacccctcttcctgtcaccaatgcttcctcattatccacaggtcacgccacccctcttcatgtcaccagcccttcctcagcatccacaggtcacgccacccctcttcctgtcaccagcacttcctcagcatccaccggtcacgccacccctcttcctgtcaccggcctttcctcagctaccacagatgacaccacccgtcttcctgtcaccgacgtttcctcggcatccacaggtcaggccacccctcttcctgtcaccagcctttcctcagtatccacaggtgacaccacgcctcttcctgtcactagcccttcctcagcatccacaggtcacgccagccctcttcttgtcactgacgcttcctcagcatccacaggtcaggccacccctcttcctgtcaccgacacttcctcagtatccacagctcacgccaccccacttcctgtcaccggcctttcttcagcttccacagatgacaccacccgtcttcctgtcaccgacgtttcctcggcatccacaggtcaggccatccctcttcctgtcaccagcccttcctcagcatccacaggtgacaccacccctcttcctgtcaccgacgcttcctcagcatccacaggtgacaccacctctcttcctgtcaccatcccttcctcagcatcttcaggtcacaccacctctcttcctgtcaccgacgcttcctcagtgtccacaggtcacgccacctctcttcttgtcaccgacgcttcctcagtatccacaggtgacaccacccctcttcctgtcaccgacactaactcagcatccacaggtgacaccacccctcttcatgtcaccgacgcttcctcagtatccacaggtcacgccacctctcttcctgtcaccagcctttcctcagcatccacaggtgacaccacgcctcttcctgtcactagcccttcctcagcatcctcaggtcacaccacccctcttcctgtcaccgacgcttcctcagtacccacaggtcacgccacctctcttcctgtcaccgacgcttcctcagtgtccacaggtcacgccacccctcttcctgtcaccgacgcttcctcagtgtccacaggtcatgccacccctcttccggtcaccgacacttcctcagtatctacaggacaggccacccctcttcctgtcaccagcctttcctcagcatccactggtgacaccacgccgcttcctgtcaccgatacttcctcagcatccacaggtcaggacacccctcttcctgtcaccagcctttcctcagtatccacaggtgacaccacgcctcttcctgtcactaacccttcctcagcatccacaggtcacgccacccctcttcttgtcaccgacgcttcctcaatatccacaggtcacgccacctctcttcttgtcaccgacgcttcctcagtatccacaggtcacgccaccgctcttcatgacaccgatgcttcctcattatccacaggggacaccacccctcttcctgtcaccagcccttcctcaacatccacaggtgacaccacccctcttcctgtcaccgaaacttcctcagtatccacaggtcacgccacctctcttcctgtcaccgacacttcctcagcatccacaggtcacgccacctctcttcctgtcaccgacacttcctcagcatccacaggtcacgccacccctcttcctgtcaccgacacttcctcagcatccacaggtcaggccacccctcttcctgtcaccagcccttcctcagcatccacaggtcacgccatccctcttcttgtcaccgacacttcctcagcatccacaggacaggccacccctcttcctgtcaccagcctttcctcagcatccacaggtgacaccacccctcttcctgtcaccgacgcttcctcagtgtccacaggtcacgccacctctcttcctgtcaccagcctttcctcagtatccacaggtgacaccactcctcttcctgtcactagcccttcctcagcatccacaggtcacgccacccctcttcatgtcaccgacgcttcctcagcatccacaggtcacgccacccctcttcctgtcaccagcctttcctcagcatccacaggtgacaccacgcctcttcctgtcactagcccttcctcagcatccacaggtcacgccacccctcttcatgtcaccgacgcttcctcagtatccacaggtgacaccacccctcttcctgtcaccagctcttcctcagcatcctcaggtcacaccacccctcttcctgtcaccgacgcttcctcagcatccacaggtgacaccacccctcttcctgtcaccgacacttcctcagcatccacaggtcacgccacccatcttcctgtcaccggcctttcctcagcttccacaggtgacaccacccgtcttcctgtcaccaacgtttcctcggcatccacaggtcatgccacccctcttcctgtcaccagcacttcctcagcatccacaggtgacaccacccctcttcctggcaccgacacttcctcagtatccacaggtcacaccacccctcttcttgtcaccgacgcttcgtcagtatccacaggtgacaccacccgtcttcctgtcaccagcccttcctcagcatctacaggtcacaccacccctctacctgtcaccgacactccctcagcatccacaggtgacaccacccctcttcctgtcaccaatgcttcctcattatccacacgtcacgccacctctcttcatgtcaccagcccttcctcagcatccacaggtcacgccacctctcttcctgtcaccgacacttccgcagcatccacaggtcacgccacccctcttcctgtcaccagcacttcctcagcatccacaggtgacaccacccctcttcctgtcaccgacacttactcagcatccacaggtcaggccacccctcttcctgtcaccagcctttcctcagtatccacaggtgacaccacgcctcttcctgtcactagcccttcctcagcatccacaggtcacgccactcctcttcttgtcaccgacgcttcctcagcatccacaggtcaggccacccctcttcctgtcaccagcctttcctcagtatccacaggtgacaccacgcctcttcctgtcactagcccttcctcagcatccaccggtcatgccacctctcttcctgtcaccgacacttcctcagcatccacaggtgacaccacctctcttcctgtcaccgacacttcctcagcatacacaggtgacaccacctctcttcctgtcaccgacacttcctcatcatccacaggtgacaccacccctcttcttgtcaccgagacttcctcagtatccacaggtgacaccacccctcttcctgtcaccgacacttcctcagcatccacaggtcacgccacccctcttcctgtcaccaacacttcctcagtatccacaggtcacgccacccctcttcatgtcaccagcccttcctcagcatccacaggtcacaccacccctcttcctgtcaccgacgcttcgtcagtgtccacaggtcacgccacctctcttcctgtcaccgacgcttcctcagtgttcacaggtcatgccacctctcttcctgtcaccatcccttcctcagcatcctcaggtcacaccacccctcttcctgtcaccgacgcttcctcagtgtccacaggtcacgccacctctcttcctgtcaccgacgcttcctcagtgtccacaggtcatgccacccctcttcctgtcaccgacgcttcctcagtgtccacaggtcacgctacccctcttcctctcaccagcctttcctcagtatccacaggtgacaccacgcctcttcctgtcaccgacacttcctcagcatccacaggtcaggccacccctcttcctgtcaccagcctttcctcagtatccacaggtgacaccacccctcttcctgtcaccgacacttcctcagcatccacaggtcacgccacctctcttcctgtcaccgacacttcctcagcatccacaggtcacgccacccctcttcctgacaccgacacttcctcagcatccacaggtcacgccacccttcttcctgtcaccgacacttcctcagcatccataggtcacgccacctctcttcctgtcaccgacacttcctcaatatccacaggtcacgccacccctcttcatgtcaccagcccttcctcagcatccaccggtcacgccaccccgcttcctgtcaccgacacttcctcagcatccacaggtcacgccaaccctcttcatgtcaccagcccttcctcagcatccaccggtcacgccaccccgcttcctgtcaccgacacttcctcagcatccacaggtcacgccacccctcttcctgtcaccagcctttcctcagtatccacaggtgacaccacgcctcttcctgtcactagcccttcctcagcatccacaggtcacaccacccctcttcctgtcaccgacacttcctcagcatccacaggtcaggccaccgctcttcctgtcaccagcacttcctcagcatccacaggtgacaccacccctcttcctgtcaccgacacttcctcagcatccacaggtcaggccacccctcttcctgtcaccagcctttcctcagtatccacaggtgacaccacgcctcttcctgtcactagcccttcctcagcatccacaggtcacgccactcctcttcttgtcaccgacgcttcctcagcatccacaggtcaggccacccctcttcctgtcaccagcctttcctcagtatccacaggtgacaccacgcctcttcctgtcactagcccttcctcagcatccaccggtcatgccacctctcttcctgtcaccgacacttcctcagcatccacaggtgacaccacctctcttcctgtcaccgacacttcctcagcatacacaggtgacaccacctctcttcctgtcaccgacacttcctcatcatccacaggtgacaccacccctcttcttgtcaccgagacttcctcagtatccacaggtcacgccactcctcttcttgtcaccgacgcttcctcagcatccacaggtcacgccacccctcttcatgtcaccagcccttcctcagcatccacaggtgacaccacccctgtgcctgtcaccgacacttcctcagtatccacaggtcacgccacccctcttcctgtcaccggcctttcctcagcttccacaggtgacaccacccgtcttcctgtcaccgacatttcctcggcatccacaggtcaggccacccctcttcctgtcaccaacacttcctcagtatccacaggtgacaccatgcctcttcctgtcactagcccttcctcagcatccacaggtcacgccacccctcttcctgtcaccagcacttcctcagcatccaccggtcacgccacccctgttcctgtcaccagcacttcctcagcatctacaggtcacaccacccctcttcctgtcaccgacacttcctcagcatccacaggtgacaccacccctcttcctgtcaccagcccttcctcagcatctacaggtcacaccacccctcttcatgtcaccatcccttcctcagcatccacaggtgacaccagcactcttcctgtcaccggcgcttcctcagcatccaccggtcacgccacccctcttcctgtcaccgacacttcctcagtatccaccggtcacgccacgcctcttcctgtcaccagcctttcctcagtatccacaggtgacaccacccctcttcctgtcaccgacgcttcctcggcatccacaggtcaggccacccctcttcctgtcaccagcctttcctcagtatccacaggtgacaccacccctcttcttgtcaccgacgcttcctcagtatccacaggtcacgccacccctcttcctgtcaccgacacttcctcagcatccacaggtgacaccacccgtcttcctgtcacggacacttcctcagcatccacaggtcaggccacccctcttcctgtcaccagcctttcctcagtatccacaggtgacaccacccctcttcttgtcaccgacgcttcctcagtatccacaggtcacgccacccctcttcctgtcaccgacacttcctcagcatccacaggtgacaccacccgtcttcctgtcacggacacttcctcagcatccacaggtcaggccacccctcttcctgtcaccatcccttcctcatcatcctcaggtcacaccacccctcttcctgtcaccagcacttcctcagtatctacaggtcacgtcacccctcttcatgtcaccagcccttcctcagcatccacaggtcacgtcacccctcttcctgtcaccagcacttcctcagcatccacaggtcacgccacccctcttcttgtcaccgacgcttcctcagtgtccacaggtcacgccacgcctcttcctgtcaccgacgcttcctcagcatccacaggtgacaccacccctcttcctgtcaccgacacttcctcagcatccacaggtcaggccacccctcttcctgtcaccagcctttcctcagtatccacaggtgacaccacccctcttcctgtcaccgacgcttcctcagcatccacaggtcacgccacccctcttcctgtcaccatcccttcctcagtatccacaggtgacaccatgcctcttcctgtcactagcccttcctcagcatccacaggtcacgccacccctcttcctgttaccggcctttcctcagcttccacaggtgacaccacccctcttcctgtcaccgacacttcctcagcatccacacgtcacgccacccctcttcctgtcaccgacacttcctcagcttccacagatgacaccacccgtcttcctgtcaccgacgtttcctcggcatccacaggacatgccacccctcttcctgtcaccagcacttcctcagcatccacaggtgacaccacccctcttcctgtcaccgacacttcctcagtatccacaggtcacgccacctctcttcctgtcaccagccgttcctcagcatccacaggtcacgccaccccccttcctgtcaccgacacttcctcagtatccacaggtcacgccacccctcttcctgtcaccagcacttcctcagtatctacaggtcacgccacccctcttcctgtcaccagcccttcctcagcatccacaggtcacgccacccctgttcctgtcaccagcacttcctcagcatccacaggtgacaccacccctcttcctgtcaccaatgcttcctcattatccacaggtcacgccacccctcttcatgtcaccagcccttcctcagcatccagaggtgacaccagcactcttcctgtcaccgatgcttcctcagcatccaccggtcacgccacccctcttcctctcaccagcctttcctcagtatccacaggtgacaccacgcctcttcctgtcaccgacacttcctctgcatccacaggtcaggccacccctcttcctgtcaccagcctttcctcagtatccacaggtgacaccacgcctcttcctgtcaccatcccttcctcagcatcctcaggtcacaccacctctcttcctgtcaccgacgcttcctcagtgtccacaggtcacggcacccctcttcctgtcaccagcacttcctcagcatccacaggtgacaccacccctcttcctgtcaccgacacttcctcagcatccacaggtcacgccacccctcttcctgtcaccgacacttcctcagcatccacaggtcacgccacccctcttcctgtcaccagcctttcctcagtatccacaggtcacgccacccctcttgctgtcagcagtgctacctcagcttccacagtatcctcggactcccctctgaagatggaaacaccaggaatgacaacaccgtcactgaagacagacggtgggagacgcacagccacatcaccaccccccacaacctcccagaccatcatttccaccattcccagcactgccatgcacacccgctccacagctgcccccatccccatcctgcctgagagaggagtttccctcttcccctatggggcaggcgccggggacctggagttcgtcaggaggaccgtggacttcacctccccactcttcaagccggcgactggcttcccccttggctcctctctccgtgattccctctacttcacagacaatggccagatcatcttcccagagtcagactaccagattttctcctaccccaacccactcccaacaggcttcacaggccgggaccctgtggccctggtggctccgttctgggacgatgctgacttctccactggtcgggggaccacattttatcagagcaacacctaccaagccatcctctccacggacgggagcaggtcctatgccctgtttctctaccagagcggtgggatgcagtgggacgtggcccagcgctcaggcaacccggtgctcatgggcttctctagtggagatggctatttcgaaaacagcccactgatgtcccagccagtgtgggagaggtatcgccctgatagattcctgaattccaactcaggcctccaagggctgcagttctacaggctacaccgggaagaaaggcccaactaccgtctcgagtgcctgcagtggctgaagagccagcctcggtggcccagctggggctggaaccaggtctcctgcccttgttcctggcagcagggacgacgggacttacgattccaacccgtcagcataggtcgctggggcctcggcagtaggcagctgtgcagcttcacctcttggcgaggaggcgtgtgctgcagctacgggccctggggagagtttcgtgaaggctggcacgtgcagcgtccttggcagttggcccaggaactggagccacagagctggtgctgccgctggaatgacaagccctacctctgtgccctgtaccagcagaggcggccccacgtgggctgtgctacatacaggcccccacagcccgcctggatgttcggggacccccacatcaccaccttggatggtgtcagttacaccttcaatgggctgggggacttcctgctggtcggggcccaagacgggaactcctccttcctgcttcagggccgcaccgcccagactggctcagcccaggccaccaacttcatcgcctttgcggctcagtaccgctccagcagcctgggccccgtcacggtccaatggctccttgagcctcacgacgcaatccgtgtcctgctggataaccagactgtgacatttcagcctgaccatgaagacggcggaggccaggagacgttcaacgccaccggagtcctcctgagccgcaacggctctgaggtctcggccagcttcgacggctgggccaccgtctcggtgatcgcgctctccaacatcctccacgcctccgccagcctcccgcccgagtaccagaaccgcacggaggggctcctgggggtctggaataacaatccagaggacgacttcaggatgcccaatggctccaccattcccccagggagccctgaggagatgcttttccactttggaatgacctggcagatcaacgggacaggcctccttggcaagaggaatgaccagctgccttccaacttcacccctgttttctactcacaactgcaaaaaaacagctcctgggctgaacatttgatctccaactgtgacggagatagctcatgcatctatgacaccctggccctgcgcaacgcaagcatcggacttcacacgagggaagtcagtaaaaactacgagcaggcgaacgccaccctcaatcagtacccgccctccatcaatggtggtcgtgtgattgaagcctacaaggggcagaccacgctgattcagtacaccagcaatgctgaggatgccaacttcacgctcagagacagctgcaccgacttggagctctttgagaatgggacgttgctgtggacacccaagtcgctggagccattcactctggagattctagcaagaagtgccaagattggcttggcatctgcactccagcccaggactgtggtctgccattgcaatgcagagagccagtgtttgtacaatcagaccagcagggtgggcaactcctccctggaggtggctggctgcaagtgtgacgggggcaccttcggccgctactgcgagggctccgaggatgcctgtgaggagccgtgcttcccgagtgtccactgcgttcctgggaagggctgcgaggcctgccctccaaacctgactggggatgggcggcactgtgcggctctggggagctctttcctgtgtcagaaccagtcctgccctgtgaattactgctacaatcaaggccactgctacatctcccagactctgggctgtcagcccatgtgcacctgccccccagccttcactgacagccgctgcttcctggctgggaacaacttcagtccaactgtcaacctagaacttcccttaagagtcatccagctcttgctcagtgaagaggaaaatgcctccatggcagaagtcaacgcctcggtggcatacagactggggaccctggacatgcgggcctttctccgcaacagccaagtggaacgaatcgattctgcagcaccggcctcgggaagccccatccaacactggatggtcatctcggagttccagtaccgccctcggggcccggtcattgacttcctgaacaaccagctgctggccgcggtggtggaggcgttcttataccacgttccacggaggagtgaggagcccaggaacgacgtggtcttccagcccatctccggggaagacgtgcgcgatgtgacagccctgaacgtgagcacgctgaaggcttacttcagatgcgatggctacaagggctacgacctggtctacagcccccagagcggcttcacctgcgtgtccccgtgcagtaggggctactgtgaccatggaggccagtgccagcacctgcccagtgggccccgctgcagctgtgtgtccttctccatctacacggcctggggcgagcactgtgagcacctgagcatgaaactcgacgcgttcttcggcatcttctttggggccctgggcggcctcttgctgctgggggtcgggacgttcgtggtcctgcgcttctggggttgctccggggccaggttctcctatttcctgaactcagctgaggccttgccttgaaggggcagctgtggcctaggctacctcaagactcacctcatccttaccgcacatttaaggcgccattgcttttgggagactggaaaagggaaggtgactgaaggctgtcaggattctt

SEQ ID NO: 155673 - DNA, 6420 bp, Homo sapiens
  Payload ID: 10597
  Gene Symbol: MUC4
  Gene Name: mucin 4, cell surface associated
  ENST ID: ENST00000612020
  CDS Start-End: 1-6417
ccaggaaccacagaggacacattaataactggaagtaaaactgctgccccagtcacctcaacaggctcaacaacagcgacactagagggacaatcaactgcagcttcttcaaggacctctaatcaggacatatcagcttcatctcagaaccaccagactaagagcacggagaccaccagcaaagctcaaaccgacaccctcacgcagatgatgacatcaactcttttttcttccccaagtgtacacaatgtgatggagacagctcctccagatgaaatgaccacatcatttccctccagtgtcaccaacacactcatgatgacatcaaagactataacaatgacaacctccacagactccactcttggaaacacagaagagacatcaacagcaggaactgaaagttctaccccagtgacctcagcagtctcaataacagctggacaggaaggacaatcacgaacaacttcctggaggacctctatccaagacacatcagcttcttctcagaaccactggactcggagcacgcagaccaccagggaatctcaaaccagcaccctaacacacagaaccacttcaactccttctttctctccaagtgtacacaatgtgacagggactgtttctcagaagacatctccttcaggtgaaacagctacctcatccctctgtagtgtcacaaacacatccatgatgacatcagagaagataacagtgacaacctccacaggctccactcttggaaacccaggggagacatcatcagtacctgttactggaagtcttatgccagtcacctcagcagccttagtaacatttgatccagaaggacaatcaccagcaactttctcaaggacttctactcaggacacaacagctttttctaagaaccaccagactcagagcgtggagaccaccagagtatctcaaatcaacaccctcaacaccctcacaccggttacaacatcaactgttttatcctcaccaagtggattcaacccaagtggaacagtttctcaggagacattcccttctggtgaaacaaccacctcatccccttccagtgtcagcaatacattcctggtaacatcaaaggtgttcagaatgccaacctccagagactctactcttggaaacacagaggagacatcactatctgtaagtggaaccatttctgcaatcacttccaaagtttcaaccatatggtggtcagacactctgtcaacagcactctcccccagttctctacctccaaaaatatccacagctttccacacccagcagagtgaaggtgcagagaccacaggacggcctcatgagaggagctcattctctccaggtgtgtctcaagaaatatttactctacatgaaacaacaacatggccttcctcattctccagcaaaggccacacaacttggtcacaaacagaactgccctcaacatcaacaggtgctgccactaggcttgtcacaggaaatccatctacagggacagctggcactattccaagggtcccctctaaggtctcagcaataggggaaccaggagagcccaccacatactcctcccacagcacaactctcccaaaaacaacaggggcaggcgcccagacacaatggacacaagaaacggggaccactggagaggctcttctcagcagcccaagctacagtgtgactcagatgataaaaacggccacatccccatcttcttcacctatgctggatagacacacatcccaacaaattacaacggcaccatcaacaaatcattcaacaatacattccacaagcacctctcctcaggaatcaccagctgtttcccaaaggggtcacactcaagccccgcagaccacacaagaatcacaaaccacgaggtccgtctcccccatgactgacaccaagacagtcaccaccccaggttcttccttcacagccagtgggcactcgccctcagaaattgttcctcaggacgcacccaccataagtgcagcaacaacctttgccccagctcccaccggggatggtcacacaacccaggccccgaccacagcactgcaggcagcacccagcagccatgatgccaccctggggccctcaggaggcacgtcactttccaaaacaggtgcccttactctggccaactctgtagtgtcaacaccagggggcccagaaggacaatggacatcagcctctgccagcacctcacctgacacagcagcagccatgacccatacccaccaggctgagagcacagaggcctctggacaaacacagaccagcgaaccggcctcctcagggtcacgaaccacctcagcgggcacagctaccccttcctcatccggggcgagtggcacaacaccttcaggaagcgaaggaatatccacctcaggagagacgacaaggttttcatcaaacccctccagggacagtcacacaacccagtcaacaaccgaattgctgtccgcctcagccagtcatggtgccatcccagtaagcacaggaatggcgtcttcgatcgtccccggcacctttcatcccaccctctctgaggcctccactgcagggagaccgacaggacagtcaagcccaacttctcccagtgcctctcctcaggagacagccgccatttcccggatggcccagactcagaggacaagaaccagcagagggtctgacactatcagcctggcgtcccaggcaaccgacaccttctcaacagtcccacccacacctccatcgatcacatccactgggcttacatctccacaaaccgagacccacactctgtcaccttcagggtctggtaaaaccttcaccacggccctcatcagcaacgccacccctcttcctgtcacctacgcttcctcggcatccacaggtcacgccacccctcttgctgtcagcagtgctacctcagcttccacagtatcctcggactcccctctgaagatggaaacaccaggaatgacaacaccgtcactgaagacagacggtgggagacgcacagccacatcaccaccccccacaacctcccagaccatcatttccaccattcccagcactgccatgcacacccgctccacagctgcccccatccccatcctgcctgagagaggagtttccctcttcccctatggggcaggcgccggggacctggagttcgtcaggaggaccgtggacttcacctccccactcttcaagccggcgactggcttcccccttggctcctctctccgtgattccctctacttcacagacaatggccagatcatcttcccagagtcagactaccagattttctcctaccccaacccactcccaacaggcttcacaggccgggaccctgtggccctggtggctccgttctgggacgatgctgacttctccactggtcgggggaccacattttatcaggaatacgagacgttctatggtgaacacagcctgctagtccagcaggccgagtcttggattagaaagatgacaaacaacgggggctacaaggccaggtgggccctaaaggtcacgtgggtcaatgcccacgcctatcctgcccagtggaccctcgggagcaacacctaccaagccatcctctccacggacgggagcaggtcctatgccctgtttctctaccagagcggtgggatgcagtgggacgtggcccagcgctcaggcaacccggtgctcatgggcttctctagtggagatggctatttcgaaaacagcccactgatgtcccagccagtgtgggagaggtatcgccctgatagattcctgaattccaactcaggcctccaagggctgcagttctacaggctacaccgggaagaaaggcccaactaccgtctcgagtgcctgcagtggctgaagagccagcctcggtggcccagctggggctggaaccaggtctcctgcccttgttcctggcagcagggacgacgggacttacgattccaacccgtcagcataggtcgctggggcctcggcagtaggcagctgtgcagcttcacctcttggcgaggaggcgtgtgctgcagctacgggccctggggagagtttcgtgaaggctggcacgtgcagcgtccttggcagttggcccaggaactggagccacagagctggtgctgccgctggaatgacaagccctacctctgtgccctgtaccagcagaggcggccccacgtgggctgtgctacatacaggcccccacagcccgcctggatgttcggggacccccacatcaccaccttggatggtgtcagttacaccttcaatgggctgggggacttcctgctggtcggggcccaagacgggaactcctccttcctgcttcagggccgcaccgcccagactggctcagcccaggccaccaacttcatcgcctttgcggctcagtaccgctccagcagcctgggccccgtcacggtccaatggctccttgagcctcacgacgcaatccgtgtcctgctggataaccagactgtgacatttcagcctgaccatgaagacggcggaggccaggagacgttcaacgccaccggagtcctcctgagccgcaacggctctgaggtctcggccagcttcgacggctgggccaccgtctcggtgatcgcgctctccaacatcctccacgcctccgccagcctcccgcccgagtaccagaaccgcacggaggggctcctgggggtctggaataacaatccagaggacgacttcaggatgcccaatggctccaccattcccccagggagccctgaggagatgcttttccactttggaatgacctggcagatcaacgggacaggcctccttggcaagaggaatgaccagctgccttccaacttcacccctgttttctactcacaactgcaaaaaaacagctcctgggctgaacatttgatctccaactgtgacggagatagctcatgcatctatgacaccctggccctgcgcaacgcaagcatcggacttcacacgagggaagtcagtaaaaactacgagcaggcgaacgccaccctcaatcagtacccgccctccatcaatggtggtcgtgtgattgaagcctacaaggggcagaccacgctgattcagtacaccagcaatgctgaggatgccaacttcacgctcagagacagctgcaccgacttggagctctttgagaatgggacgttgctgtggacacccaagtcgctggagccattcactctggagattctagcaagaagtgccaagattggcttggcatctgcactccagcccaggactgtggtctgccattgcaatgcagagagccagtgtttgtacaatcagaccagcagggtgggcaactcctccctggaggtggctggctgcaagtgtgacgggggcaccttcggccgctactgcgagggctccgaggatgcctgtgaggagccgtgcttcccgagtgtccactgcgttcctgggaagggctgcgaggcctgccctccaaacctgactggggatgggcggcactgtgcggctctggggagctctttcctgtgtcagaaccagtcctgccctgtgaattactgctacaatcaaggccactgctacatctcccagactctgggctgtcagcccatgtgcacctgccccccagccttcactgacagccgctgcttcctggctgggaacaacttcagtccaactgtcaacctagaacttcccttaagagtcatccagctcttgctcagtgaagaggaaaatgcctccatggcagaagtcaacgcctcggtggcatacagactggggaccctggacatgcgggcctttctccgcaacagccaagtggaacgaatcgattctgcagcaccggcctcgggaagccccatccaacactggatggtcatctcggagttccagtaccgccctcggggcccggtcattgacttcctgaacaaccagctgctggccgcggtggtggaggcgttcttataccacgttccacggaggagtgaggagcccaggaacgacgtggtcttccagcccatctccggggaagacgtgcgcgatgtgacagccctgaacgtgagcacgctgaaggcttacttcagatgcgatggctacaagggctacgacctggtctacagcccccagagcggcttcacctgcgtgtccccgtgcagtaggggctactgtgaccatggaggccagtgccagcacctgcccagtgggccccgctgcagctgtgtgtccttctccatctacacggcctggggcgagcactgtgagcacctgagcatgaaactcgacgcgttcttcggcatcttctttggggccctgggcggcctcttgctgctgggggtcgggacgttcgtggtcctgcgcttctggggttgctccggggccaggttctcctatttcctgaactcagctgaggccttgccttgaagg

SEQ ID NO: 155674 - DNA, 3785 bp, Homo sapiens
  Payload ID: 10597
  Gene Symbol: MUC4
  Gene Name: mucin 4, cell surface associated
  ENST ID: ENST00000613841
  CDS Start-End: 1-503
gaatgacaacaccgtcactgaagacagacggtgggagacgcacagccacatcaccaccccccacaacctcccagaccatcatttccaccattcccagcactgccatgcacacccgctccacagctgcccccatccccatcctgcctgagagaggtgaggccatacaggagtttccctcttcccctatggggcagacgccggggacctggagttcgtcaggaggaccgtggacttcacctccccactcttcaagccggcgactggcttcccccttggctcctctctccgtgattccctctacttcacagacaatggccagatcatcttcccagagtcagactaccagattttctcctaccccaacccactcccaacaggcttcacaggccgggaccctgtggccctggtggctccgttctgggacgatgctgacttctccactggtcgggggaccacattttatcaggaatacgagacgttctatggtgaacacagcctgctagtccagcaggccgagtcttggattagaaagatgacaaacaacgggggctacaaggccaggtgggccctaaaggtcacgtgggtcaatgcccacgcctatcctgcccagtggaccctcgggagcaacacctaccaagccatcctctccacggacgggagcaggtcctatgccctgtttctctaccagagcggtgggatgcagtgggacgtggcccagcgctcaggcaacccggtgctcatgggcttctctaggcctccaagggctgcagttctacaggctacaccgggaagaaaggcccaactaccgtctcgagtgcctgcagtggctgaagagccagcctcggtggcccagctggggctggaaccaggtctcctgcccttgttcctggcagcagggacgacgggacttacgattccaacccgtcagcataggtcgctggggcctcggcagtaggcagctgtgcagcttcacctcttggcgaggaggcgtgtgctgcagctacgggccctggggagagtttcgtgaaggctggcacgtgcagcgtccttggcagttggcccaggaactggagccacagagctggtgctgccgctggaatgacaagccctacctctgtgccctgtaccagcagaggcggccccacgtgggctgtgctacatacaggcccccacagcccgcctggatgttcggggacccccacatcaccaccttggatggtgtcagttacaccttcaatgggctgggggacttcctgctggtcggggcccaagacgggaactcctccttcctgcttcagggccgcaccgcccagactggctcagcccaggccaccaacttcatcgcctttgcggctcagtaccgctccagcagcctgggccccgtcacggtccaatggctccttgagcctcacgacgcaatccgtgtcctgctggataaccagactgtgacatttcagcctgaccatgaagacggcggaggccaggagacgttcaacgccaccggagtcctcctgagccgcaacggctctgaggtctcggccagcttcgacggctgggccaccgtctcggtgatcgcgctctccaacatcctccacgcctccgccagcctcccgcccgagtaccagaaccgcacggaggggctcctgggggtctggaataacaatccagaggacgacttcaggatgcccaatggctccaccattcccccagggagccctgaggagatgcttttccactttggaatgacctggcagatcaacgggacaggcctccttggcaagaggaatgaccagctgccttccaacttcacccctgttttctactcacaactgcaaaaaaacagctcctgggctgaacatttgatctccaactgtgacggagatagctcatgcatctatgacaccctggccctgcgcaacgcaagcatcggacttcacacgagggaagtcagtaaaaactacgagcaggcgaacgccaccctcaatcagtacccgccctccatcaatggtggtcgtgtgattgaagcctacaaggggcagaccacgctgattcagtacaccagcaatgctgaggatgccaacttcacgctcagagacagctgcaccgacttggagctctttgagaatgggacgttgctgtggacacccaagtcgctggagccattcactctggagattctagcaagaagtgccaagattggcttggcatctgcactccagcccaggactgtggtctgccattgcaatgcagagagccagtgtttgtacaatcagaccagcagggtgggcaactcctccctggaggtggctggctgcaagtgtgacgggggcaccttcggccgctactgcgagggctccgaggatgcctgtgaggagccgtgcttcccgagtgtccactgcgttcctgggaagggctgcgaggcctgccctccaaacctgactggggatgggcggcactgtgcggctctggggagctctttcctgtgtcagaaccagtcctgccctgtgaattactgctacaatcaaggccactgctacatctcccagactctgggctgtcagcccatgtgcacctgccccccagccttcactgacagccgctgcttcctggctgggaacaacttcagtccaactgtcaacctagaacttcccttaagagtcatccagctcttgctcagtgaagaggaaaatgcctccatggcagaagtcaacgcctcggtggcatacagactggggaccctggacatgcgggcctttctccgcaacagccaagtggaacgaatcgattctgcagcaccggcctcgggaagccccatccaacactggatggtcatctcggagttccagtaccgccctcggggcccggtcattgacttcctgaacaaccagctgctggccgcggtggtggaggcgttcttataccacgttccacggaggagtgaggagcccaggaacgacgtggtcttccagcccatctccggggaagacgtgcgcgatgtgacagccctgaacgtgagcacgctgaaggcttacttcagatgcgatggctacaagggctacgacctggtctacagcccccagagcggcttcacctgcgtgtccccgtgcagtaggggctactgtgaccatggaggccagtgccagcacctgcccagtgggccccgctgcagctgtgtgtccttctccatctacacggcctggggcgagcactgtgagcacctgagcatgaaactcgacgcgttcttcggcatcttctttggggccctgggcggcctcttgctgctgggggtcgggacgttcgtggtcctgcgcttctggggttgctccggggccaggttctcctatttcctgaactcagctgaggccttgccttgaaggggcagctgtggcctaggctacctcaagactcacctcatccttaccgcacatttaaggcgccattgcttttgggagactggaaaagggaaggtgactgaaggctgtcaggattcttcaaggagaatgaatactgggaatcaagacaagactataccttatccataggcgcaggtgcacagggggaggccataaagatcaaacatgcatggatgggtcctcacgcagacacacccacagaaggacactagcctgtgcacgcgcgcgtgcacacacacacacacacacacgagttcataatgtggtgatggccctaagttaagcaaaatgcttctgcacacaaaactctctggtttacttcaaattaactctatttaaataaagtctctctgactttttgtgtctccaaaa

SEQ ID NO: 155675 - DNA, 6420 bp, Homo sapiens; identical to SEQ ID NO: 155673
  Payload ID: 10597
  Gene Symbol: MUC4
  Gene Name: mucin 4, cell surface associated
  ENST ID: ENST00000619402
  CDS Start-End: 1-6417

SEQ ID NO: 155676 - DNA, 1812 bp, Homo sapiens; identical to SEQ ID NO: 155660
  Payload ID: 10597
  Gene Symbol: MUC4
  Gene Name: mucin 4, cell surface associated
  ENST ID: ENST00000620934
  CDS Start-End: 1-1812

SEQ ID NO: 155677 - DNA, 16566 bp, Homo sapiens
  Payload ID: 10597
  Gene Symbol: MUC4
  Gene Name: mucin 4, cell surface associated
  ENST ID: ENST00000631334
  CDS Start-End: 1-16157
gaaccacagaggacacattaataactggaagtaaaactgctgccccagtcacctcaacaggctcaacaacagcgacactagagggacaatcaactgcagcttcttcaaggacctctaatcaggacatatcagcttcatctcagaaccaccagactaagagcacggagaccaccagcaaagctcaaaccgacaccctcacgcagatgatgacatcaactcttttttcttccccaagtgtacacaatgtgatggagacagctcctccagatgaaatgaccacatcatttccctccagtgtcaccaacacactcatgatgacatcaaagactataacaatgacaacctccacagactccactcttggaaacacagaagagacatcaacagcaggaactgaaagttctaccccagtgacctcagcagtctcaataacagctggacaggaaggacaatcacgaacaacttcctggaggacctctatccaagacacatcagcttcttctcagaaccactggactcggagcacgcagaccaccagggaatctcaaaccagcaccctaacacacagaaccacttcaactccttctttctctccaagtgtacacaatgtgacagggactgtttctcagaagacatctccttcaggtgaaacagctacctcatccctctgtagtgtcacaaacacatccatgatgacatcagagaagataacagtgacaacctccacaggctccactcttggaaacccaggggagacatcatcagtacctgttactggaagtcttatgccagtcacctcagcagccttagtaacatttgatccagaaggacaatcaccagcaactttctcaaggacttctactcaggacacaacagctttttctaagaaccaccagactcagagcgtggagaccaccagagtatctcaaatcaacaccctcaacaccctcacaccggttacaacatcaactgttttatcctcaccaagtggattcaacccaagtggaacagtttctcaggagacattcccttctggtgaaacaaccacctcatccccttccagtgtcagcaatacattcctggtaacatcaaaggtgttcagaatgccaacctccagagactctactcttggaaacacagaggagacatcactatctgtaagtggaaccatttctgcaatcacttccaaagtttcaaccatatggtggtcagacactctgtcaacagcactctcccccagttctctacctccaaaaatatccacagctttccacacccagcagagtgaaggtgcagagaccacaggacggcctcatgagaggagctcattctctccaggtgtgtctcaagaaatatttactctacatgaaacaacaacatggccttcctcattctccagcaaaggccacacaacttggtcacaaacagaactgccctcaacatcaacaggtgctgccactaggcttgtcacaggaaatccatctacagggacagctggcactattccaagggtcccctctaaggtctcagcaataggggaaccaggagagcccaccacatactcctcccacagcacaactctcccaaaaacaacaggggcaggcgcccagacacaatggacacaagaaacggggaccactggagaggctcttctcagcagcccaagctacagtgtgactcagatgataaaaacggccacatccccatcttcttcacctatgctggatagacacacatcccaacaaattacaacggcaccatcaacaaatcattcaacaatacattccacaagcacctctcctcaggaatcaccagctgtttcccaaaggggtcacactcaagccccgcagaccacacaagaatcacaaaccacgaggtccgtctcccccatgactgacaccaagacagtcaccaccccaggttcttccttcacagccagtgggcactcgccctcagaaattgttcctcaggacgcacccaccataagtgcagcaacaacctttgccccagctcccaccggggatggtcacacaacccaggccccgaccacagcactgcaggcagcacccagcagccatgatgccaccctggggccctcaggaggcacgtcactttccaaaacaggtgcccttactctggccaactctgtagtgtcaacaccagggggcccagaaggacaatggacatcagcctctgccagcacctcacctgacacagcagcagccatgacccatacccaccaggctgagagcacagaggcctctggacaaacacagaccagcgaaccggcctcctcagggtcacgaaccacctcagcgggcacagctaccccttcctcatccggggcgagtggcacaacaccttcaggaagcgaaggaatatccacctcaggagagacgacaaggttttcatcaaacccctccagggacagtcacacaacccagtcaacaaccgaattgctgtccgcctcagccagtcatggtgccatcccagtaagcacaggaatggcgtcttcgatcgtccccggcacctttcatcccaccctctctgaggcctccactgcagggagaccgacaggacagtcaagcccaacttctcccagtgcctctcctcaggagacagccgccatttcccggatggcccagactcagaggacaagaaccagcagagggtctgacactatcagcctggcgtcccaggcaaccgacaccttctcaacagtcccacccacacctccatcgatcacatccactgggcttacatctccacaaaccgagacccacactctgtcaccttcagggtctggtaaaaccttcaccacggccctcatcagcaacgccacccctcttcctgtcacctacgcttcctcggcatccacaggtcacaccacccctcttcatgtcaccgatgcttcctcagtatccacaggtcacgccacccctcttcctgtcaccagcccttcctcagtatccacaggtcacaccacccctcttcctgtcaccgacacttcctcagaatccacaggtcacgtcacccctcttcctgtcaccagcttttcctcagcatccacaggtgacagcacccctcttcctgtcactgacacttcctcagcatccacaggtcacgtcacccctcttcctgtcaccagcctttcctcagcatccacaggtgacaccacccctcttcctgtcactgacacttcctcagcatccacaggtcacgccacctctcttcctgtcaccgacacttcctcagtatccacaggtcacaccacccctcttcctgtcaccgacacttcctcagcatccacaggtcacgccacctctcttcctgtcaccgacacttcctcagtatccacaggtcacaccacccctcttcatgtcactgatgcttcctcagcatccacaggtcaggccacccctcttcctgtcaccagcctttcctcagtatccacaggtgacaccacgcctcttcctgtcactagcccttcctcagcatccacaggtcacgccacccctcttcttgtcaccgacacttcctcagcatccacaggacacgccacccctcttcctgtcaccgacgcttcctcagtgtccacagatcacgccacctctcttcctgtaaccatcccttccgcagcatccacaggtcacaccacccctcttcctgtcaccgacacttcctcagcatccacaggtcaggccacctctcttcttgtcaccgacacttcctcagtatccacaggtgacaccacgcctcttcctgtcactagcacttcctcagcatccacaggtcacgtcactcctcttcatgtcaccagcccttcctcagcatccacaggtcacgccacccctcttcctgtcaccagcctttcctcagcatccacaggtgacaccatgcctcttcctgtcactagcccttcctcagcatccacaggtgacaccacccctcttcctgtcaccgacgcttcctcagtatccacaggtcacaccacccctcttcatgtcactgatgcttcctcagcatccacaggtcaggccacccctcttcctgtcaccagcctttcctcagtatccacaggtgacaccacgcctcttcctgtcactagcccttcctcagcatccacaggtcacgccacccctcttcttgtcaccgacacttcctcagcatccacaggacacgccacccctcttcctgtcaccgacgcttcctcagtgtccacagatcacgccacctctcttcctgtaaccatcccttccgcagcatccacaggtcacaccacccctcttcctgtcaccgacacttcctcagcatccacaggtcaggccacctctcttcttgtcaccgacacttcctcagtatccacaggtgacaccacgcctcttcctgtcactagcacttcctcagcatccacaggtcacgtcactcctcttcatgtcaccagcccttcctcagcatccacaggtcacgccacccctcttcctgtcaccagcctttcctcagcatccacaggtgacaccatgcctcttcctgtcactagcccttcctcagcatccacaggtgacaccacccctcttcctgtcaccgacgcttcctcagtatccacaggtcacaccacccctcttcctgtcaccagcccttcctcagcatctacaggtcacaccacccctcttcctgtcaccgacacttcctcagcatccaaaggtgacaccacccctcttcctgtcaccagcccttcctcagcatctacaggtcacaccacccctcttcctgtcaccgacacttcctcagcatccacaggtgacaccacccctcttcctgtcaccaatgcttcctcattatccacaggtcacgccacccctcttcatgtcaccagcccttcctcagcatccacaggtcacgccacccctcttcctgtcaccagcacttcctcagcatccaccggtcacgccacccctcttcctgtcaccggcctttcctcagctaccacagatgacaccacccgtcttcctgtcaccgacgtttcctcggcatccacaggtcaggccacccctcttcctgtcaccagcctttcctcagtatccacaggtgacaccacgcctcttcctgtcactagcccttcctcagcatccacaggtcacgccagccctcttcttgtcactgacgcttcctcagcatccacaggtcaggccacccctcttcctgtcaccgacacttcctcagtatccacagctcacgccaccccacttcctgtcaccggcctttcttcagcttccacagatgacaccacccgtcttcctgtcaccgacgtttcctcggcatccacaggtcaggccatccctcttcctgtcaccagcccttcctcagcatccacaggtgacaccacccctcttcctgtcaccgacgcttcctcagcatccacaggtgacaccacctctcttcctgtcaccatcccttcctcagcatcttcaggtcacaccacctctcttcctgtcaccgacgcttcctcagtgtccacaggtcacgccacctctcttcttgtcaccgacgcttcctcagtatccacaggtgacaccacccctcttcctgtcaccgacactaactcagcatccacaggtgacaccacccctcttcatgtcaccgacgcttcctcagtatccacaggtcacgccacctctcttcctgtcaccagcctttcctcagcatccacaggtgacaccacgcctcttcctgtcactagcccttcctcagcatcctcaggtcacaccacccctcttcctgtcaccgacgcttcctcagtacccacaggtcacgccacctctcttcctgtcaccgacgcttcctcagtgtccacaggtcacgccacccctcttcctgtcaccgacgcttcctcagtgtccacaggtcatgccacccctcttccggtcaccgacacttcctcagtatctacaggacaggccacccctcttcctgtcaccagcctttcctcagcatccactggtgacaccacgccgcttcctgtcaccgatacttcctcagcatccacaggtcaggacacccctcttcctgtcaccagcctttcctcagtatccacaggtgacaccacgcctcttcctgtcactaacccttcctcagcatccacaggtcacgccacccctcttcttgtcaccgacgcttcctcaatatccacaggtcacgccacctctcttcttgtcaccgacgcttcctcagtatccacaggtcacgccaccgctcttcatgacaccgatgcttcctcattatccacaggggacaccacccctcttcctgtcaccagcccttcctcaacatccacaggtgacaccacccctcttcctgtcaccgaaacttcctcagtatccacaggtcacgccacctctcttcctgtcaccgacacttcctcagcatccacaggtcacgccacctctcttcctgtcaccgacacttcctcagcatccacaggtcacgccacccctcttcctgtcaccgacacttcctcagcatccacaggtcaggccacccctcttcctgtcaccagcccttcctcagcatccacaggtcacgccatccctcttcttgtcaccgacacttcctcagcatccacaggacaggccacccctcttcctgtcaccagcctttcctcagcatccacaggtgacaccacccctcttcctgtcaccgacgcttcctcagtgtccacaggtcacgccacctctcttcctgtcaccagcctttcctcagtatccacaggtgacaccactcctcttcctgtcactagcccttcctcagcatccacaggtcacgccacccctcttcatgtcaccgacgcttcctcagcatccacaggtcacgccacccctcttcctgtcaccagcctttcctcagcatccacaggtgacaccacgcctcttcctgtcactagcccttcctcagcatccacaggtcacgccacccctcttcatgtcaccgacgcttcctcagtatccacaggtgacaccacccctcttcctgtcaccagctcttcctcagcatcctcaggtcacaccacccctcttcctgtcaccgacgcttcctcagcatccacaggtgacaccacccctcttcctgtcaccgacacttcctcagcatccacaggtcacgccacccatcttcctgtcaccggcctttcctcagcttccacaggtgacaccacccgtcttcctgtcaccaacgtttcctcggcatccacaggtcatgccacccctcttcctgtcaccagcacttcctcagcatccacaggtgacaccacccctcttcctggcaccgacacttcctcagtatccacaggtcacaccacccctcttcttgtcaccgacgcttcgtcagtatccacaggtgacaccacccgtcttcctgtcaccagcccttcctcagcatctacaggtcacaccacccctctacctgtcaccgacactccctcagcatccacaggtgacaccacccctcttcctgtcaccaatgcttcctcattatccacacgtcacgccacctctcttcatgtcaccagcccttcctcagcatccacaggtcacgccacctctcttcctgtcaccgacacttccgcagcatccacaggtcacgccacccctcttcctgtcaccagcacttcctcagcatccacaggtgacaccacccctcttcctgtcaccgacacttactcagcatccacaggtcaggccacccctcttcctgtcaccagcctttcctcagtatccacaggtgacaccacgcctcttcctgtcactagcccttcctcagcatccacaggtcacgccactcctcttcttgtcaccgacgcttcctcagcatccacaggtcaggccacccctcttcctgtcaccagcctttcctcagtatccacaggtgacaccacgcctcttcctgtcactagcccttcctcagcatccaccggtcatgccacctctcttcctgtcaccgacacttcctcagcatccacaggtgacaccacctctcttcctgtcaccgacacttcctcagcatacacaggtgacaccacctctcttcctgtcaccgacacttcctcatcatccacaggtgacaccacccctcttcttgtcaccgagacttcctcagtatccacaggtgacaccacccctcttcctgtcaccgacacttcctcagcatccacaggtcacgccacccctcttcctgtcaccaacacttcctcagtatccacaggtcacgccacccctcttcatgtcaccagcccttcctcagcatccacaggtcacaccacccctcttcctgtcaccgacgcttcgtcagtgtccacaggtcacgccacctctcttcctgtcaccgacgcttcctcagtgttcacaggtcatgccacctctcttcctgtcaccatcccttcctcagcatcctcaggtcacaccacccctcttcctgtcaccgacgcttcctcagtgtccacaggtcacgccacctctcttcctgtcaccgacgcttcctcagtgtccacaggtcatgccacccctcttcctgtcaccgacgcttcctcagtgtccacaggtcacgctacccctcttcctctcaccagcctttcctcagtatccacaggtgacaccacgcctcttcctgtcaccgacacttcctcagcatccacaggtcaggccacccctcttcctgtcaccagcctttcctcagtatccacaggtgacaccacccctcttcctgtcaccgacacttcctcagcatccacaggtcacgccacctctcttcctgtcaccgacacttcctcagcatccacaggtcacgccacccctcttcctgacaccgacacttcctcagcatccacaggtcacgccacccttcttcctgtcaccgacacttcctcagcatccataggtcacgccacctctcttcctgtcaccgacacttcctcaatatccacaggtcacgccacccctcttcatgtcaccagcccttcctcagcatccaccggtcacgccaccccgcttcctgtcaccgacacttcctcagcatccacaggtcacgccaaccctcttcatgtcaccagcccttcctcagcatccaccggtcacgccaccccgcttcctgtcaccgacacttcctcagcatccacaggtcacgccacccctcttcctgtcaccagcctttcctcagtatccacaggtgacaccacgcctcttcctgtcactagcccttcctcagcatccacaggtcacaccacccctcttcctgtcaccgacacttcctcagcatccacaggtcaggccaccgctcttcctgtcaccagcacttcctcagcatccacaggtgacaccacccctcttcctgtcaccgacacttcctcagcatccacaggtcaggccacccctcttcctgtcaccagcctttcctcagtatccacaggtgacaccacgcctcttcctgtcactagcccttcctcagcatccacaggtcacgccactcctcttcttgtcaccgacgcttcctcagcatccacaggtcaggccacccctcttcctgtcaccagcctttcctcagtatccacaggtgacaccacgcctcttcctgtcactagcccttcctcagcatccaccggtcatgccacctctcttcctgtcaccgacacttcctcagcatccacaggtgacaccacctctcttcctgtcaccgacacttcctcagcatacacaggtgacaccacctctcttcctgtcaccgacacttcctcatcatccacaggtgacaccacccctcttcttgtcaccgagacttcctcagtatccacaggtcacgccactcctcttcttgtcaccgacgcttcctcagcatccacaggtcacgccacccctcttcatgtcaccagcccttcctcagcatccacaggtgacaccacccctgtgcctgtcaccgacacttcctcagtatccacaggtcacgccacccctcttcctgtcaccggcctttcctcagcttccacaggtgacaccacccgtcttcctgtcaccgacatttcctcggcatccacaggtcaggccacccctcttcctgtcaccaacacttcctcagtatccacaggtgacaccatgcctcttcctgtcactagcccttcctcagcatccacaggtcacgccacccctcttcctgtcaccagcacttcctcagcatccaccggtcacgccacccctgttcctgtcaccagcacttcctcagcatctacaggtcacaccacccctcttcctgtcaccgacacttcctcagcatccacaggtgacaccacccctcttcctgtcaccagcccttcctcagcatctacaggtcacaccacccctcttcatgtcaccatcccttcctcagcatccacaggtgacaccagcactcttcctgtcaccggcgcttcctcagcatccaccggtcacgccacccctcttcctgtcaccgacacttcctcagtatccaccggtcacgccacgcctcttcctgtcaccagcctttcctcagtatccacaggtgacaccacccctcttcctgtcaccgacgcttcctcggcatccacaggtcaggccacccctcttcctgtcaccagcctttcctcagtatccacaggtgacaccacccctcttcttgtcaccgacgcttcctcagtatccacaggtcacgccacccctcttcctgtcaccgacacttcctcagcatccacaggtgacaccacccgtcttcctgtcacggacacttcctcagcatccacaggtcaggccacccctcttcctgtcaccagcctttcctcagtatccacaggtgacaccacccctcttcttgtcaccgacgcttcctcagtatccacaggtcacgccacccctcttcctgtcaccgacacttcctcagcatccacaggtgacaccacccgtcttcctgtcacggacacttcctcagcatccacaggtcaggccacccctcttcctgtcaccatcccttcctcatcatcctcaggtcacaccacccctcttcctgtcaccagcacttcctcagtatctacaggtcacgtcacccctcttcatgtcaccagcccttcctcagcatccacaggtcacgtcacccctcttcctgtcaccagcacttcctcagcatccacaggtcacgccacccctcttcttgtcaccgacgcttcctcagtgtccacaggtcacgccacgcctcttcctgtcaccgacgcttcctcagcatccacaggtgacaccacccctcttcctgtcaccgacacttcctcagcatccacaggtcaggccacccctcttcctgtcaccagcctttcctcagtatccacaggtgacaccacccctcttcctgtcaccgacgcttcctcagcatccacaggtcacgccacccctcttcctgtcaccatcccttcctcagtatccacaggtgacaccatgcctcttcctgtcactagcccttcctcagcatccacaggtcacgccacccctcttcctgttaccggcctttcctcagcttccacaggtgacaccacccctcttcctgtcaccgacacttcctcagcatccacacgtcacgccacccctcttcctgtcaccgacacttcctcagcttccacagatgacaccacccgtcttcctgtcaccgacgtttcctcggcatccacaggacatgccacccctcttcctgtcaccagcacttcctcagcatccacaggtgacaccacccctcttcctgtcaccgacacttcctcagtatccacaggtcacgccacctctcttcctgtcaccagccgttcctcagcatccacaggtcacgccaccccccttcctgtcaccgacacttcctcagtatccacaggtcacgccacccctcttcctgtcaccagcacttcctcagtatctacaggtcacgccacccctcttcctgtcaccagcccttcctcagcatccacaggtcacgccacccctgttcctgtcaccagcacttcctcagcatccacaggtgacaccacccctcttcctgtcaccaatgcttcctcattatccacaggtcacgccacccctcttcatgtcaccagcccttcctcagcatccagaggtgacaccagcactcttcctgtcaccgatgcttcctcagcatccaccggtcacgccacccctcttcctctcaccagcctttcctcagtatccacaggtgacaccacgcctcttcctgtcaccgacacttcctctgcatccacaggtcaggccacccctcttcctgtcaccagcctttcctcagtatccacaggtgacaccacgcctcttcctgtcaccatcccttcctcagcatcctcaggtcacaccacctctcttcctgtcaccgacgcttcctcagtgtccacaggtcacggcacccctcttcctgtcaccagcacttcctcagcatccacaggtgacaccacccctcttcctgtcaccgacacttcctcagcatccacaggtcacgccacccctcttcctgtcaccgacacttcctcagcatccacaggtcacgccacccctcttcctgtcaccagcctttcctcagtatccacaggtcacgccacccctcttgctgtcagcagtgctacctcagcttccacagtatcctcggactcccctctgaagatggaaacaccaggaatgacaacaccgtcactgaagacagacggtgggagacgcacagccacatcaccaccccccacaacctcccagaccatcatttccaccattcccagcactgccatgcacacccgctccacagctgcccccatccccatcctgcctgagagaggagtttccctcttcccctatggggcaggcgccggggacctggagttcgtcaggaggaccgtggacttcacctccccactcttcaagccggcgactggcttcccccttggctcctctctccgtgattccctctacttcacagacaatggccagatcatcttcccagagtcagactaccagattttctcctaccccaacccactcccaacaggcttcacaggccgggaccctgtggccctggtggctccgttctgggacgatgctgacttctccactggtcgggggaccacattttatcaggaatacgagacgttctatggtgaacacagcctgctagtccagcaggccgagtcttggattagaaagatgacaaacaacgggggctacaaggccaggtgggccctaaaggtcacgtgggtcaatgcccacgcctatcctgcccagtggaccctcgggagcaacacctaccaagccatcctctccacggacgggagcaggtcctatgccctgtttctctaccagagcggtgggatgcagtgggacgtggcccagcgctcaggcaacccggtgctcatgggcttctctagtggagatggctatttcgaaaacagcccactgatgtcccagccagtgtgggagaggtatcgccctgatagattcctgaattccaactcaggcctccaagggctgcagttctacaggctacaccgggaagaaaggcccaactaccgtctcgagtgcctgcagtggctgaagagccagcctcggtggcccagctggggctggaaccaggtctcctgcccttgttcctggcagcagggacgacgggacttacgattccaacccgtcagcataggtcgctggggcctcggcagtaggcagctgtgcagcttcacctcttggcgaggaggcgtgtgctgcagctacgggccctggggagagtttcgtgaaggctggcacgtgcagcgtccttggcagttggcccaggaactggagccacagagctggtgctgccgctggaatgacaagccctacctctgtgccctgtaccagcagaggcggccccacgtgggctgtgctacatacaggcccccacagcccgcctggatgttcggggacccccacatcaccaccttggatggtgtcagttacaccttcaatgggctgggggacttcctgctggtcggggcccaagacgggaactcctccttcctgcttcagggccgcaccgcccagactggctcagcccaggccaccaacttcatcgcctttgcggctcagtaccgctccagcagcctgggccccgtcacggtccaatggctccttgagcctcacgacgcaatccgtgtcctgctggataaccagactgtgacatttcagcctgaccatgaagacggcggaggccaggagacgttcaacgccaccggagtcctcctgagccgcaacggctctgaggtctcggccagcttcgacggctgggccaccgtctcggtgatcgcgctctccaacatcctccacgcctccgccagcctcccgcccgagtaccagaaccgcacggaggggctcctgggggtctggaataacaatccagaggacgacttcaggatgcccaatggctccaccattcccccagggagccctgaggagatgcttttccactttggaatgacctggcagatcaacgggacaggcctccttggcaagaggaatgaccagctgccttccaacttcacccctgttttctactcacaactgcaaaaaaacagctcctgggctgaacatttgatctccaactgtgacggagatagctcatgcatctatgacaccctggccctgcgcaacgcaagcatcggacttcacacgagggaagtcagtaaaaactacgagcaggcgaacgccaccctcaatcagtacccgccctccatcaatggtggtcgtgtgattgaagcctacaaggggcagaccacgctgattcagtacaccagcaatgctgaggatgccaacttcacgctcagagacagctgcaccgacttggagctctttgagaatgggacgttgctgtggacacccaagtcgctggagccattcactctggagattctagcaagaagtgccaagattggcttggcatctgcactccagcccaggactgtggtctgccattgcaatgcagagagccagtgtttgtacaatcagaccagcagggtgggcaactcctccctggaggtggctggctgcaagtgtgacgggggcaccttcggccgctactgcgagggctccgaggatgcctgtgaggagccgtgcttcccgagtgtccactgcgttcctgggaagggctgcgaggcctgccctccaaacctgactggggatgggcggcactgtgcggctctggggagctctttcctgtgtcagaaccagtcctgccctgtgaattactgctacaatcaaggccactgctacatctcccagactctgggctgtcagcccatgtgcacctgccccccagccttcactgacagccgctgcttcctggctgggaacaacttcagtccaactgtcaacctagaacttcccttaagagtcatccagctcttgctcagtgaagaggaaaatgcctccatggcagaagtcaacgcctcggtggcatacagactggggaccctggacatgcgggcctttctccgcaacagccaagtggaacgaatcgattctgcagcaccggcctcgggaagccccatccaacactggatggtcatctcggagttccagtaccgccctcggggcccggtcattgacttcctgaacaaccagctgctggccgcggtggtggaggcgttcttataccacgttccacggaggagtgaggagcccaggaacgacgtggtcttccagcccatctccggggaagacgtgcgcgatgtgacagccctgaacgtgagcacgctgaaggcttacttcagatgcgatggctacaagggctacgacctggtctacagcccccagagcggcttcacctgcgtgtccccgtgcagtaggggctactgtgaccatggaggccagtgccagcacctgcccagtgggccccgctgcagctgtgtgtccttctccatctacacggcctggggcgagcactgtgagcacctgagcatgaaactcgacgcgttcttcggcatcttctttggggccctgggcggcctcttgctgctgggggtcgggacgttcgtggtcctgcgcttctggggttgctccggggccaggttctcctatttcctgaactcagctgaggccttgccttgaaggggcagctgtggcctaggctacctcaagactcacctcatccttaccgcacatttaaggcgccattgcttttgggagactggaaaagggaaggtgactgaaggctgtcaggattcttcaaggagaatgaatactgggaatcaagacaagactataccttatccataggcgcaggtgcacagggggaggccataaagatcaaacatgcatggatgggtcctcacgcagacacacccacagaaggacactagcctgtgcacgcgcgcgtgcacacacacacacacacaagagttcataatgtggtgatggccctaagttaagcaaaatgcttctgcacacaaaactctctggtttacttcaaattaactctatttaaataaagtctctctgactttttgtgtcttcaaaa

SEQ ID NO: 155678 - DNA, 16631 bp, Homo sapiens
  Payload ID: 10597
  Gene Symbol: MUC4
  Gene Name: mucin 4, cell surface associated
  ENST ID: ENST00000631078
  CDS Start-End: 1-13181
gaaccacagaggacacattaataactggaagtaaaactgctgccccagtcacctcaacaggctcaacaacagcgacactagagggacaatcaactgcagcttcttcaaggacctctaatcaggacatatcagcttcatctcagaaccaccagactaagagcacggagaccaccagcaaagctcaaaccgacaccctcacgcagatgatgacatcaactcttttttcttccccaagtgtacacaatgtgatggagacagctcctccagatgaaatgaccacatcatttccctccagtgtcaccaacacactcatgatgacatcaaagactataacaatgacaacctccacagactccactcttggaaacacagaagagacatcaacagcaggaactgaaagttctaccccagtgacctcagcagtctcaataacagctggacaggaaggacaatcacgaacaacttcctggaggacctctatccaagacacatcagcttcttctcagaaccactggactcggagcacgcagaccaccagggaatctcaaaccagcaccctaacacacagaaccacttcaactccttctttctctccaagtgtacacaatgtgacagggactgtttctcagaagacatctccttcaggtgaaacagctacctcatccctctgtagtgtcacaaacacatccatgatgacatcagagaagataacagtgacaacctccacaggctccactcttggaaacccaggggagacatcatcagtacctgttactggaagtcttatgccagtcacctcagcagccttagtaacatttgatccagaaggacaatcaccagcaactttctcaaggacttctactcaggacacaacagctttttctaagaaccaccagactcagagcgtggagaccaccagagtatctcaaatcaacaccctcaacaccctcacaccggttacaacatcaactgttttatcctcaccaagtggattcaacccaagtggaacagtttctcaggagacattcccttctggtgaaacaaccacctcatccccttccagtgtcagcaatacattcctggtaacatcaaaggtgttcagaatgccaacctccagagactctactcttggaaacacagaggagacatcactatctgtaagtggaaccatttctgcaatcacttccaaagtttcaaccatatggtggtcagacactctgtcaacagcactctcccccagttctctacctccaaaaatatccacagctttccacacccagcagagtgaaggtgcagagaccacaggacggcctcatgagaggagctcattctctccaggtgtgtctcaagaaatatttactctacatgaaacaacaacatggccttcctcattctccagcaaaggccacacaacttggtcacaaacagaactgccctcaacatcaacaggtgctgccactaggcttgtcacaggaaatccatctacagggacagctggcactattccaagggtcccctctaaggtctcagcaataggggaaccaggagagcccaccacatactcctcccacagcacaactctcccaaaaacaacaggggcaggcgcccagacacaatggacacaagaaacggggaccactggagaggctcttctcagcagcccaagctacagtgtgactcagatgataaaaacggccacatccccatcttcttcacctatgctggatagacacacatcccaacaaattacaacggcaccatcaacaaatcattcaacaatacattccacaagcacctctcctcaggaatcaccagctgtttcccaaaggggtcacactcaagccccgcagaccacacaagaatcacaaaccacgaggtccgtctcccccatgactgacaccaagacagtcaccaccccaggttcttccttcacagccagtgggcactcgccctcagaaattgttcctcaggacgcacccaccataagtgcagcaacaacctttgccccagctcccaccggggatggtcacacaacccaggccccgaccacagcactgcaggcagcacccagcagccatgatgccaccctggggccctcaggaggcacgtcactttccaaaacaggtgcccttactctggccaactctgtagtgtcaacaccagggggcccagaaggacaatggacatcagcctctgccagcacctcacctgacacagcagcagccatgacccatacccaccaggctgagagcacagaggcctctggacaaacacagaccagcgaaccggcctcctcagggtcacgaaccacctcagcgggcacagctaccccttcctcatccggggcgagtggcacaacaccttcaggaagcgaaggaatatccacctcaggagagacgacaaggttttcatcaaacccctccagggacagtcacacaacccagtcaacaaccgaattgctgtccgcctcagccagtcatggtgccatcccagtaagcacaggaatggcgtcttcgatcgtccccggcacctttcatcccaccctctctgaggcctccactgcagggagaccgacaggacagtcaagcccaacttctcccagtgcctctcctcaggagacagccgccatttcccggatggcccagactcagaggacaagaaccagcagagggtctgacactatcagcctggcgtcccaggcaaccgacaccttctcaacagtcccacccacacctccatcgatcacatccactgggcttacatctccacaaaccgagacccacactctgtcaccttcagggtctggtaaaaccttcaccacggccctcatcagcaacgccacccctcttcctgtcacctacgcttcctcggcatccacaggtcacaccacccctcttcatgtcaccgatgcttcctcagtatccacaggtcacgccacccctcttcctgtcaccagcccttcctcagtatccacaggtcacaccacccctcttcctgtcaccgacacttcctcagaatccacaggtcacgtcacccctcttcctgtcaccagcttttcctcagcatccacaggtgacagcacccctcttcctgtcactgacacttcctcagcatccacaggtcacgtcacccctcttcctgtcaccagcctttcctcagcatccacaggtgacaccacccctcttcctgtcactgacacttcctcagcatccacaggtcacgccacctctcttcctgtcaccgacacttcctcagtatccacaggtcacaccacccctcttcctgtcaccgacacttcctcagcatccacaggtcacgccacctctcttcctgtcaccgacacttcctcagtatccacaggtcacaccacccctcttcatgtcactgatgcttcctcagcatccacaggtcaggccacccctcttcctgtcaccagcctttcctcagtatccacaggtgacaccacgcctcttcctgtcactagcccttcctcagcatccacaggtcacgccacccctcttcttgtcaccgacacttcctcagcatccacaggacacgccacccctcttcctgtcaccgacgcttcctcagtgtccacagatcacgccacctctcttcctgtaaccatcccttccgcagcatccacaggtcacaccacccctcttcctgtcaccgacacttcctcagcatccacaggtcaggccacctctcttcttgtcaccgacacttcctcagtatccacaggtgacaccacgcctcttcctgtcactagcacttcctcagcatccacaggtcacgtcactcctcttcatgtcaccagcccttcctcagcatccacaggtcacgccacccctcttcctgtcaccagcctttcctcagcatccacaggtgacaccatgcctcttcctgtcactagcccttcctcagcatccacaggtgacaccacccctcttcctgtcaccgacgcttcctcagtatccacaggtcacaccacccctcttcatgtcactgatgcttcctcagcatccacaggtcaggccacccctcttcctgtcaccagcctttcctcagtatccacaggtgacaccacgcctcttcctgtcactagcccttcctcagcatccacaggtcacgccacccctcttcttgtcaccgacacttcctcagcatccacaggacacgccacccctcttcctgtcaccgacgcttcctcagtgtccacagatcacgccacctctcttcctgtaaccatcccttccgcagcatccacaggtcacaccacccctcttcctgtcaccgacacttcctcagcatccacaggtcaggccacctctcttcttgtcaccgacacttcctcagtatccacaggtgacaccacgcctcttcctgtcactagcacttcctcagcatccacaggtcacgtcactcctcttcatgtcaccagcccttcctcagcatccacaggtcacgccacccctcttcctgtcaccagcctttcctcagcatccacaggtgacaccatgcctcttcctgtcactagcccttcctcagcatccacaggtgacaccacccctcttcctgtcaccgacgcttcctcagtatccacaggtcacaccacccctcttcctgtcaccagcccttcctcagcatctacaggtcacaccacccctcttcctgtcaccgacacttcctcagcatccaaaggtgacaccacccctcttcctgtcaccagcccttcctcagcatctacaggtcacaccacccctcttcctgtcaccgacacttcctcagcatccacaggtgacaccacccctcttcctgtcaccaatgcttcctcattatccacaggtcacgccacccctcttcatgtcaccagcccttcctcagcatccacaggtcacgccacccctcttcctgtcaccagcacttcctcagcatccaccggtcacgccacccctcttcctgtcaccggcctttcctcagctaccacagatgacaccacccgtcttcctgtcaccgacgtttcctcggcatccacaggtcaggccacccctcttcctgtcaccagcctttcctcagtatccacaggtgacaccacgcctcttcctgtcactagcccttcctcagcatccacaggtcacgccagccctcttcttgtcactgacgcttcctcagcatccacaggtcaggccacccctcttcctgtcaccgacacttcctcagtatccacagctcacgccaccccacttcctgtcaccggcctttcttcagcttccacagatgacaccacccgtcttcctgtcaccgacgtttcctcggcatccacaggtcaggccatccctcttcctgtcaccagcccttcctcagcatccacaggtgacaccacccctcttcctgtcaccgacgcttcctcagcatccacaggtgacaccacctctcttcctgtcaccatcccttcctcagcatcttcaggtcacaccacctctcttcctgtcaccgacgcttcctcagtgtccacaggtcacgccacctctcttcttgtcaccgacgcttcctcagtatccacaggtgacaccacccctcttcctgtcaccgacactaactcagcatccacaggtgacaccacccctcttcatgtcaccgacgcttcctcagtatccacaggtcacgccacctctcttcctgtcaccagcctttcctcagcatccacaggtgacaccacgcctcttcctgtcactagcccttcctcagcatcctcaggtcacaccacccctcttcctgtcaccgacgcttcctcagtacccacaggtcacgccacctctcttcctgtcaccgacgcttcctcagtgtccacaggtcacgccacccctcttcctgtcaccgacgcttcctcagtgtccacaggtcatgccacccctcttccggtcaccgacacttcctcagtatctacaggacaggccacccctcttcctgtcaccagcctttcctcagcatccactggtgacaccacgccgcttcctgtcaccgatacttcctcagcatccacaggtcaggacacccctcttcctgtcaccagcctttcctcagtatccacaggtgacaccacgcctcttcctgtcactaacccttcctcagcatccacaggtcacgccacccctcttcttgtcaccgacgcttcctcaatatccacaggtcacgccacctctcttcttgtcaccgacgcttcctcagtatccacaggtcacgccaccgctcttcatgacaccgatgcttcctcattatccacaggggacaccacccctcttcctgtcaccagcccttcctcaacatccacaggtgacaccacccctcttcctgtcaccgaaacttcctcagtatccacaggtcacgccacctctcttcctgtcaccgacacttcctcagcatccacaggtcacgccacctctcttcctgtcaccgacacttcctcagcatccacaggtcacgccacccctcttcctgtcaccgacacttcctcagcatccacaggtcaggccacccctcttcctgtcaccagcccttcctcagcatccacaggtcacgccatccctcttcttgtcaccgacacttcctcagcatccacaggacaggccacccctcttcctgtcaccagcctttcctcagcatccacaggtgacaccacccctcttcctgtcaccgacgcttcctcagtgtccacaggtcacgccacctctcttcctgtcaccagcctttcctcagtatccacaggtgacaccactcctcttcctgtcactagcccttcctcagcatccacaggtcacgccacccctcttcatgtcaccgacgcttcctcagcatccacaggtcacgccacccctcttcctgtcaccagcctttcctcagcatccacaggtgacaccacgcctcttcctgtcactagcccttcctcagcatccacaggtcacgccacccctcttcatgtcaccgacgcttcctcagtatccacaggtgacaccacccctcttcctgtcaccagctcttcctcagcatcctcaggtcacaccacccctcttcctgtcaccgacgcttcctcagcatccacaggtgacaccacccctcttcctgtcaccgacacttcctcagcatccacaggtcacgccacccatcttcctgtcaccggcctttcctcagcttccacaggtgacaccacccgtcttcctgtcaccaacgtttcctcggcatccacaggtcatgccacccctcttcctgtcaccagcacttcctcagcatccacaggtgacaccacccctcttcctggcaccgacacttcctcagtatccacaggtcacaccacccctcttcttgtcaccgacgcttcgtcagtatccacaggtgacaccacccgtcttcctgtcaccagcccttcctcagcatctacaggtcacaccacccctctacctgtcaccgacactccctcagcatccacaggtgacaccacccctcttcctgtcaccaatgcttcctcattatccacacgtcacgccacctctcttcatgtcaccagcccttcctcagcatccacaggtcacgccacctctcttcctgtcaccgacacttccgcagcatccacaggtcacgccacccctcttcctgtcaccagcacttcctcagcatccacaggtgacaccacccctcttcctgtcaccgacacttactcagcatccacaggtcaggccacccctcttcctgtcaccagcctttcctcagtatccacaggtgacaccacgcctcttcctgtcactagcccttcctcagcatccacaggtcacgccactcctcttcttgtcaccgacgcttcctcagcatccacaggtcaggccacccctcttcctgtcaccagcctttcctcagtatccacaggtgacaccacgcctcttcctgtcactagcccttcctcagcatccaccggtcatgccacctctcttcctgtcaccgacacttcctcagcatccacaggtgacaccacctctcttcctgtcaccgacacttcctcagcatacacaggtgacaccacctctcttcctgtcaccgacacttcctcatcatccacaggtgacaccacccctcttcttgtcaccgagacttcctcagtatccacaggtgacaccacccctcttcctgtcaccgacacttcctcagcatccacaggtcacgccacccctcttcctgtcaccaacacttcctcagtatccacaggtcacgccacccctcttcatgtcaccagcccttcctcagcatccacaggtcacaccacccctcttcctgtcaccgacgcttcgtcagtgtccacaggtcacgccacctctcttcctgtcaccgacgcttcctcagtgttcacaggtcatgccacctctcttcctgtcaccatcccttcctcagcatcctcaggtcacaccacccctcttcctgtcaccgacgcttcctcagtgtccacaggtcacgccacctctcttcctgtcaccgacgcttcctcagtgtccacaggtcatgccacccctcttcctgtcaccgacgcttcctcagtgtccacaggtcacgctacccctcttcctctcaccagcctttcctcagtatccacaggtgacaccacgcctcttcctgtcaccgacacttcctcagcatccacaggtcaggccacccctcttcctgtcaccagcctttcctcagtatccacaggtgacaccacccctcttcctgtcaccgacacttcctcagcatccacaggtcacgccacctctcttcctgtcaccgacacttcctcagcatccacaggtcacgccacccctcttcctgacaccgacacttcctcagcatccacaggtcacgccacccttcttcctgtcaccgacacttcctcagcatccataggtcacgccacctctcttcctgtcaccgacacttcctcaatatccacaggtcacgccacccctcttcatgtcaccagcccttcctcagcatccaccggtcacgccaccccgcttcctgtcaccgacacttcctcagcatccacaggtcacgccaaccctcttcatgtcaccagcccttcctcagcatccaccggtcacgccaccccgcttcctgtcaccgacacttcctcagcatccacaggtcacgccacccctcttcctgtcaccagcctttcctcagtatccacaggtgacaccacgcctcttcctgtcactagcccttcctcagcatccacaggtcacaccacccctcttcctgtcaccgacacttcctcagcatccacaggtcaggccaccgctcttcctgtcaccagcacttcctcagcatccacaggtgacaccacccctcttcctgtcaccgacacttcctcagcatccacaggtcaggccacccctcttcctgtcaccagcctttcctcagtatccacaggtgacaccacgcctcttcctgtcactagcccttcctcagcatccacaggtcacgccactcctcttcttgtcaccgacgcttcctcagcatccacaggtcaggccacccctcttcctgtcaccagcctttcctcagtatccacaggtgacaccacgcctcttcctgtcactagcccttcctcagcatccaccggtcatgccacctctcttcctgtcaccgacacttcctcagcatccacaggtgacaccacctctcttcctgtcaccgacacttcctcagcatacacaggtgacaccacctctcttcctgtcaccgacacttcctcatcatccacaggtgacaccacccctcttcttgtcaccgagacttcctcagtatccacaggtcacgccactcctcttcttgtcaccgacgcttcctcagcatccacaggtcacgccacccctcttcatgtcaccagcccttcctcagcatccacaggtgacaccacccctgtgcctgtcaccgacacttcctcagtatccacaggtcacgccacccctcttcctgtcaccggcctttcctcagcttccacaggtgacaccacccgtcttcctgtcaccgacatttcctcggcatccacaggtcaggccacccctcttcctgtcaccaacacttcctcagtatccacaggtgacaccatgcctcttcctgtcactagcccttcctcagcatccacaggtcacgccacccctcttcctgtcaccagcacttcctcagcatccaccggtcacgccacccctgttcctgtcaccagcacttcctcagcatctacaggtcacaccacccctcttcctgtcaccgacacttcctcagcatccacaggtgacaccacccctcttcctgtcaccagcccttcctcagcatctacaggtcacaccacccctcttcatgtcaccatcccttcctcagcatccacaggtgacaccagcactcttcctgtcaccggcgcttcctcagcatccaccggtcacgccacccctcttcctgtcaccgacacttcctcagtatccaccggtcacgccacgcctcttcctgtcaccagcctttcctcagtatccacaggtgacaccacccctcttcctgtcaccgacgcttcctcggcatccacaggtcaggccacccctcttcctgtcaccagcctttcctcagtatccacaggtgacaccacccctcttcttgtcaccgacgcttcctcagtatccacaggtcacgccacccctcttcctgtcaccgacacttcctcagcatccacaggtgacaccacccgtcttcctgtcacggacacttcctcagcatccacaggtcaggccacccctcttcctgtcaccagcctttcctcagtatccacaggtgacaccacccctcttcttgtcaccgacgcttcctcagtatccacaggtcacgccacccctcttcctgtcaccgacacttcctcagcatccacaggtgacaccacccgtcttcctgtcacggacacttcctcagcatccacaggtcaggccacccctcttcctgtcaccatcccttcctcatcatcctcaggtcacaccacccctcttcctgtcaccagcacttcctcagtatctacaggtcacgtcacccctcttcatgtcaccagcccttcctcagcatccacaggtcacgtcacccctcttcctgtcaccagcacttcctcagcatccacaggtcacgccacccctcttcttgtcaccgacgcttcctcagtgtccacaggtcacgccacgcctcttcctgtcaccgacgcttcctcagcatccacaggtgacaccacccctcttcctgtcaccgacacttcctcagcatccacaggtcaggccacccctcttcctgtcaccagcctttcctcagtatccacaggtgacaccacccctcttcctgtcaccgacgcttcctcagcatccacaggtcacgccacccctcttcctgtcaccatcccttcctcagtatccacaggtgacaccatgcctcttcctgtcactagcccttcctcagcatccacaggtcacgccacccctcttcctgttaccggcctttcctcagcttccacaggtgacaccacccctcttcctgtcaccgacacttcctcagcatccacacgtcacgccacccctcttcctgtcaccgacacttcctcagcttccacagatgacaccacccgtcttcctgtcaccgacgtttcctcggcatccacaggacatgccacccctcttcctgtcaccagcacttcctcagcatccacaggtgacaccacccctcttcctgtcaccgacacttcctcagtatccacaggtcacgccacctctcttcctgtcaccagccgttcctcagcatccacaggtcacgccaccccccttcctgtcaccgacacttcctcagtatccacaggtcacgccacccctcttcctgtcaccagcacttcctcagtatctacaggtcacgccacccctcttcctgtcaccagcccttcctcagcatccacaggtcacgccacccctgttcctgtcaccagcacttcctcagcatccacaggtgacaccacccctcttcctgtcaccaatgcttcctcattatccacaggtcacgccacccctcttcatgtcaccagcccttcctcagcatccagaggtgacaccagcactcttcctgtcaccgatgcttcctcagcatccaccggtcacgccacccctcttcctctcaccagcctttcctcagtatccacaggtgacaccacgcctcttcctgtcaccgacacttcctctgcatccacaggtcaggccacccctcttcctgtcaccagcctttcctcagtatccacaggtgacaccacgcctcttcctgtcaccatcccttcctcagcatcctcaggtcacaccacctctcttcctgtcaccgacgcttcctcagtgtccacaggtcacggcacccctcttcctgtcaccagcacttcctcagcatccacaggtgacaccacccctcttcctgtcaccgacacttcctcagcatccacaggtcacgccacccctcttcctgtcaccgacacttcctcagcatccacaggtcacgccacccctcttcctgtcaccagcctttcctcagtatccacaggtcacgccacccctcttgctgtcagcagtgctacctcagcttccacagtatcctcggactcccctctgaagatggaaacaccaggaatgacaacaccgtcactgaagacagacggtgggagacgcacagccacatcaccaccccccacaacctcccagaccatcatttccaccattcccagcactgccatgcacacccgctccacagctgcccccatccccatcctgcctgagagaggtgaggccatacaggagtttccctcttcccctatggggcaggcgccggggacctggagttcgtcaggaggaccgtggacttcacctccccactcttcaagccggcgactggcttcccccttggctcctctctccgtgattccctctacttcacagacaatggccagatcatcttcccagagtcagactaccagattttctcctaccccaacccactcccaacaggcttcacaggccgggaccctgtggccctggtggctccgttctgggacgatgctgacttctccactggtcgggggaccacattttatcaggctgtagggggtctatcctaacaagagtgagtcaagagggcccgtcctgtgctcctggactgggtgaataactccaatcagaggaaatgtgatgaaagctactgcaggaagtgtggaccgtgcccctgccacggacagggcagtgtggaggctccaagaggaagagactcacgcctgttctcaagaagctgcagattaggcatggggaggaatacgagacgttctatggtgaacacagcctgctagtccagcaggccgagtcttggattagaaagatgacaaacaacgggggctacaaggccaggtgggccctaaaggtcacgtgggtcaatgcccacgcctatcctgcccagtggaccctcgggagcaacacctaccaagccatcctctccacggacgggagcaggtcctatgccctgtttctctaccagagcggtgggatgcagtgggacgtggcccagcgctcaggcaacccggtgctcatgggcttctctagtggagatggctatttcgaaaacagcccactgatgtcccagccagtgtgggagaggtatcgccctgatagattcctgaattccaactcaggcctccaagggctgcagttctacaggctacaccgggaagaaaggcccaactaccgtctcgagtgcctgcagtggctgaagagccagcctcggtggcccagctggggctggaaccaggtctcctgcccttgttcctggcagcagggacgacgggacttacgattccaacccgtcagcataggtcgctggggcctcggcagtaggcagctgtgcagcttcacctcttggcgaggaggcgtgtgctgcagctacgggccctggggagagtttcgtgaaggctggcacgtgcagcgtccttggcagttggcccaggaactggagccacagagctggtgctgccgctggaatgacaagccctacctctgtgccctgtaccagcagaggcggccccacgtgggctgtgctacatacaggcccccacagcccgcctggatgttcggggacccccacatcaccaccttggatggtgtcagttacaccttcaatgggctgggggacttcctgctggtcggggcccaagacgggaactcctccttcctgcttcagggccgcaccgcccagactggctcagcccaggccaccaacttcatcgcctttgcggctcagtaccgctccagcagcctgggccccgtcacggtccaatggctccttgagcctcacgacgcaatccgtgtcctgctggataaccagactgtgacatttcagcctgaccatgaagacggcggaggccaggagacgttcaacgccaccggagtcctcctgagccgcaacggctctgaggtctcggccagcttcgacggctgggccaccgtctcggtgatcgcgctctccaacatcctccacgcctccgccagcctcccgcccgagtaccagaaccgcacggaggggctcctgggggtctggaataacaatccagaggacgacttcaggatgcccaatggctccaccattcccccagggagccctgaggagatgcttttccactttggaatgacctggcagatcaacgggacaggcctccttggcaagaggaatgaccagctgccttccaacttcacccctgttttctactcacaactgcaaaaaaacagctcctgggctgaacatttgatctccaactgtgacggagatagctcatgcatctatgacaccctggccctgcgcaacgcaagcatcggacttcacacgagggaagtcagtaaaaactacgagcaggcgaacgccaccctcaatcagtacccgccctccatcaatggtggtcgtgtgattgaagcctacaaggggcagaccacgctgattcagtacaccagcaatgctgaggatgccaacttcacgctcagagacagctgcaccgacttggagctctttgagaatgggacgttgctgtggacacccaagtcgctggagccattcactctggagattctagcaagaagtgccaagattggcttggcatctgcactccagcccaggactgtggtctgccattgcaatgcagagagccagtgtttgtacaatcagaccagcagggtgggcaactcctccctggagctctggggagctctttcctgtgtcagaaccagtcctgccctgtgaattactgctacaatcaaggccactgctacatctcccagactctgggctgtcagcccatgtgcacctgccccccagccttcactgacagccgctgcttcctggctgggaacaacttcagtccaactgtcaacctagaacttcccttaagagtcatccagctcttgctcagtgaagaggaaaatgcctccatggcagaagtcaacgcctcggtggcatacagactggggaccctggacatgcgggcctttctccgcaacagccaagtggaacgaatcgattctgcagcaccggcctcgggaagccccatccaacactggatggtcatctcggagttccagtaccgccctcggggcccggtcattgacttcctgaacaaccagctgctggccgcggtggtggaggcgttcttataccacgttccacggaggagtgaggagcccaggaacgacgtggtcttccagcccatctccggggaagacgtgcgcgatgtgacagccctgaacgtgagcacgctgaaggcttacttcagatgcgatggctacaagggctacgacctggtctacagcccccagagcggcttcacctgcgtgtccccgtgcagtaggggctactgtgaccatggaggccagtgccagcacctgcccagtgggccccgctgcagctgtgtgtccttctccatctacacggcctggggcgagcactgtgagcacctgagcatgaaactcgacgcgttcttcggcatcttctttggggccctgggcggcctcttgctgctgggggtcgggacgttcgtggtcctgcgcttctggggttgctccggggccaggttctcctatttcctgaactcagctgaggccttgccttgaaggggcagctgtggcctaggctacctcaagactcacctcatccttaccgcacatttaaggcgccattgcttttgggagactggaaaagggaaggtgactgaaggctgtcaggattcttcaaggagaatgaatactgggaatcaagacaagactataccttatccataggcgcaggtgcacagggggaggccataaagatcaaacatgcatggatgggtcctcacgcagacacacccacagaaggacactagcctgtgcacgcgcgcgtgcacacacacacacacacacacgagttcataatgtggtgatggccctaagttaagcaaaatgcttctgcacacaaaactctctggtttacttcaaattaactctatttaaataaagtctctctgactttttgtgtctccaaaa

SEQ ID NO: 155679 - DNA, 3714 bp, Homo sapiens
  Payload ID: 10597
  Gene Symbol: MUC4
  Gene Name: mucin 4, cell surface associated
  ENST ID: ENST00000629775
  CDS Start-End: 1-434
ctctgaagatggaaacaccaggaatgacaacaccgtcactgaagacagacggtgggagacgcacagccacatcaccaccccccacaacctcccagaccatcatttccaccattcccagcactgccatgcacacccgctccacagctgcccccatccccatcctgcctgagagaggagtttccctcttcccctatggggcaggcgccggggacctggagttcgtcaggaggaccgtggacttcacctccccactcttcaagccggcgactggcttcccccttggctcctctctccgtgattccctctacgcttcacaggccgggaccctgtggccctggtggctccgttctgggacgatgctgacttctccactggtcgggggaccacattttatcaggaatacgagacgttctatggtgaacacagcctgctagtccagcaggccgagtcttggattagaaagatgacaaacaacgggggctacaaggccaggtgggccctaaaggtcacgtgggtcaatgcccacgcctatcctgcccagtggaccctcgggagcaacacctaccaagccatcctctccacggacgggagcaggtcctatgccctgtttctctaccagagcggtgggatgcagtgggacgtggcccagcgctcaggcaacccggtgctcatgggcttctctaggcctccaagggctgcagttctacaggctacaccgggaagaaaggcccaactaccgtctcgagtgcctgcagtggctgaagagccagcctcggtggcccagctggggctggaaccaggtctcctgcccttgttcctggcagcagggacgacgggacttacgattccaacccgtcagcataggtcgctggggcctcggcagtaggcagctgtgcagcttcacctcttggcgaggaggcgtgtgctgcagctacgggccctggggagagtttcgtgaaggctggcacgtgcagcgtccttggcagttggcccaggaactggagccacagagctggtgctgccgctggaatgacaagccctacctctgtgccctgtaccagcagaggcggccccacgtgggctgtgctacatacaggcccccacagcccgcctggatgttcggggacccccacatcaccaccttggatggtgtcagttacaccttcaatgggctgggggacttcctgctggtcggggcccaagacgggaactcctccttcctgcttcagggccgcaccgcccagactggctcagcccaggccaccaacttcatcgcctttgcggctcagtaccgctccagcagcctgggccccgtcacggtccaatggctccttgagcctcacgacgcaatccgtgtcctgctggataaccagactgtgacatttcagcctgaccatgaagacggcggaggccaggagacgttcaacgccaccggagtcctcctgagccgcaacggctctgaggtctcggccagcttcgacggctgggccaccgtctcggtgatcgcgctctccaacatcctccacgcctccgccagcctcccgcccgagtaccagaaccgcacggaggggctcctgggggtctggaataacaatccagaggacgacttcaggatgcccaatggctccaccattcccccagggagccctgaggagatgcttttccactttggaatgacctggcagatcaacgggacaggcctccttggcaagaggaatgaccagctgccttccaacttcacccctgttttctactcacaactgcaaaaaaacagctcctgggctgaacatttgatctccaactgtgacggagatagctcatgcatctatgacaccctggccctgcgcaacgcaagcatcggacttcacacgagggaagtcagtaaaaactacgagcaggcgaacgccaccctcaatcagtacccgccctccatcaatggtggtcgtgtgattgaagcctacaaggggcagaccacgctgattcagtacaccagcaatgctgaggatgccaacttcacgctcagagacagctgcaccgacttggagctctttgagaatgggacgttgctgtggacacccaagtcgctggagccattcactctggagattctagcaagaagtgccaagattggcttggcatctgcactccagcccaggactgtggtctgccattgcaatgcagagagccagtgtttgtacaatcagaccagcagggtgggcaactcctccctggaggtggctggctgcaagtgtgacgggggcaccttcggccgctactgcgagggctccgaggatgcctgtgaggagccgtgcttcccgagtgtccactgcgttcctgggaagggctgcgaggcctgccctccaaacctgactggggatgggcggcactgtgcggctctggggagctctttcctgtgtcagaaccagtcctgccctgtgaattactgctacaatcaaggccactgctacatctcccagactctgggctgtcagcccatgtgcacctgccccccagccttcactgacagccgctgcttcctggctgggaacaacttcagtccaactgtcaacctagaacttcccttaagagtcatccagctcttgctcagtgaagaggaaaatgcctccatggcagaagtcaacgcctcggtggcatacagactggggaccctggacatgcgggcctttctccgcaacagccaagtggaacgaatcgattctgcagcaccggcctcgggaagccccatccaacactggatggtcatctcggagttccagtaccgccctcggggcccggtcattgacttcctgaacaaccagctgctggccgcggtggtggaggcgttcttataccacgttccacggaggagtgaggagcccaggaacgacgtggtcttccagcccatctccggggaagacgtgcgcgatgtgacagccctgaacgtgagcacgctgaaggcttacttcagatgcgatggctacaagggctacgacctggtctacagcccccagagcggcttcacctgcgtgtccccgtgcagtaggggctactgtgaccatggaggccagtgccagcacctgcccagtgggccccgctgcagctgtgtgtccttctccatctacacggcctggggcgagcactgtgagcacctgagcatgaaactcgacgcgttcttcggcatcttctttggggccctgggcggcctcttgctgctgggggtcgggacgttcgtggtcctgcgcttctggggttgctccggggccaggttctcctatttcctgaactcagctgaggccttgccttgaaggggcagctgtggcctaggctacctcaagactcacctcatccttaccgcacatttaaggcgccattgcttttgggagactggaaaagggaaggtgactgaaggctgtcaggattcttcaaggagaatgaatactgggaatcaagacaagactataccttatccataggcgcaggtgcacagggggaggccataaagatcaaacatgcatggatgggtcctcacgcagacacacccacagaaggacactagcctgtgcacgcgcgcgtgcacacacacacacacacaagagttcataatgtggtgatggccctaagttaagcaaaatgcttctgcacacaaaactctctggtttacttcaaattaactctatttaaataaagtctctctgactttttgtgtcttcaaaa

SEQ ID NO: 155680 - DNA, 3707 bp, Homo sapiens
  Payload ID: 10597
  Gene Symbol: MUC4
  Gene Name: mucin 4, cell surface associated
  ENST ID: ENST00000628456
  CDS Start-End: 1-3296
gagtttccctcttcccctatggggcaggcgccggggacctggagttcgtcaggaggaccgtggacttcacctccccactcttcaagccggcgactggcttcccccttggctcctctctccgtgattccctctacttcacagacaatggccagatcatcttcccagagtcagactaccagattttctcctaccccaacccactcccaacaggcttcacaggccgggaccctgtggccctggtggctccgttctgggacgatgctgacttctccactggtcgggggaccacattttatcaggaatacgagacgttctatggtgaacacagcctgctagtccagcaggccgagtcttggattagaaagatgacaaacaacgggggctacaaggccaggtgggccctaaaggtcacgtgggtcaatgcccacgcctatcctgcccagtggaccctcgggagcaacacctaccaagccatcctctccacggacgggagcaggtcctatgccctgtttctctaccagagcggtgggatgcagtgggacgtggcccagcgctcaggcaacccggtgctcatgggcttctctagtggagatggctatttcgaaaacagcccactgatgtcccagccagtgtgggagaggtatcgccctgatagattcctgaattccaactcaggcctccaagggctgcagttctacaggctacaccgggaagaaaggcccaactaccgtctcgagtgcctgcagtggctgaagagccagcctcggtggcccagctggggctggaaccaggtctcctgcccttgttcctggcagcagggacgacgggacttacgattccaacccgtcagcataggtcgctggggcctcggcagtaggcagctgtgcagcttcacctcttggcgaggaggcgtgtgctgcagctacgggccctggggagagtttcgtgaaggctggcacgtgcagcgtccttggcagttggcccaggaactggagccacagagctggtgctgccgctggaatgacaagccctacctctgtgccctgtaccagcagaggcggccccacgtgggctgtgctacatacaggcccccacagcccgcctggatgttcggggacccccacatcaccaccttggatggtgtcagttacaccttcaatgggctgggggacttcctgctggtcggggcccaagacgggaactcctccttcctgcttcagggccgcaccgcccagactggctcagcccaggccaccaacttcatcgcctttgcggctcagtaccgctccagcagcctgggccccgtcacggtccaatggctccttgagcctcacgacgcaatccgtgtcctgctggataaccagactgtgacatttcagcctgaccatgaagacggcggaggccaggagacgttcaacgccaccggagtcctcctgagccgcaacggctctgaggtctcggccagcttcgacggctgggccaccgtctcggtgatcgcgctctccaacatcctccacgcctccgccagcctcccgcccgagtaccagaaccgcacggaggggctcctgggggtctggaataacaatccagaggacgacttcaggatgcccaatggctccaccattcccccagggagccctgaggagatgcttttccactttggaatgacctggcagatcaacgggacaggcctccttggcaagaggaatgaccagctgccttccaacttcacccctgttttctactcacaactgcaaaaaaacagctcctgggctgaacatttgatctccaactgtgacggagatagctcatgcatctatgacaccctggccctgcgcaacgcaagcatcggacttcacacgagggaagtcagtaaaaactacgagcaggcgaacgccaccctcaatcagtacccgccctccatcaatggtggtcgtgtgattgaagcctacaaggggcagaccacgctgattcagtacaccagcaatgctgaggatgccaacttcacgctcagagacagctgcaccgacttggagctctttgagaatgggacgttgctgtggacacccaagtcgctggagccattcactctggagattctagcaagaagtgccaagattggcttggcatctgcactccagcccaggactgtggtctgccattgcaatgcagagagccagtgtttgtacaatcagaccagcagggtgggcaactcctccctggaggtggctggctgcaagtgtgacgggggcaccttcggccgctactgcgagggctccgaggatgcctgtgaggagccgtgcttcccgagtgtccactgcgttcctgggaagggctgcgaggcctgccctccaaacctgactggggatgggcggcactgtgcggctctggggagctctttcctgtgtcagaaccagtcctgccctgtgaattactgctacaatcaaggccactgctacatctcccagactctgggctgtcagcccatgtgcacctgccccccagccttcactgacagccgctgcttcctggctgggaacaacttcagtccaactgtcaacctagaacttcccttaagagtcatccagctcttgctcagtgaagaggaaaatgcctccatggcagaagtcaacgcctcggtggcatacagactggggaccctggacatgcgggcctttctccgcaacagccaagtggaacgaatcgattctgcagcaccggcctcgggaagccccatccaacactggatggtcatctcggagttccagtaccgccctcggggcccggtcattgacttcctgaacaaccagctgctggccgcggtggtggaggcgttcttataccacgttccacggaggagtgaggagcccaggaacgacgtggtcttccagcccatctccggggaagacgtgcgcgatgtgacagccctgaacgtgagcacgctgaaggcttacttcagatgcgatggctacaagggctacgacctggtctacagcccccagagcggcttcacctgcgtgtccccgtgcagtaggggctactgtgaccatggaggccagtgccagcacctgcccagtgggccccgctgcagctgtgtgtccttctccatctacacggcctggggcgagcactgtgagcacctgagcatgaaactcgacgcgttcttcggcatcttctttggggccctgggcggcctcttgctgctgggggtcgggacgttcgtggtcctgcgcttctggggttgctccggggccaggttctcctatttcctgaactcagctgaggccttgccttgaaggggcagctgtggcctaggctacctcaagactcacctcatccttaccgcacatttaaggcgccattgcttttgggagactggaaaagggaaggtgactgaaggctgtcaggattcttcaaggagaatgaatactgggaatcaagacaagactataccttatccataggcgcaggtgcacagggggaggccataaagatcaaacatgcatggatgggtcctcacgcagacacacccacagaaggacactagcctgtgcacgcgcgcgtgcacacacacacacacacacacgagttcataatgtggtgatggccctaagttaagcaaaatgcttctgcacacaaaactctctggtttacttcaaattaactctatttaaataaagtctctctgactttttgtgtctccaaaa

SEQ ID NO: 155681 - DNA, 16409 bp, Homo sapiens
  Payload ID: 10597
  Gene Symbol: MUC4
  Gene Name: mucin 4, cell surface associated
  ENST ID: ENST00000625238
  CDS Start-End: 1-15134
gaaccacagaggacacattaataactggaagtaaaactgctgccccagtcacctcaacaggctcaacaacagcgacactagagggacaatcaactgcagcttcttcaaggacctctaatcaggacatatcagcttcatctcagaaccaccagactaagagcacggagaccaccagcaaagctcaaaccgacaccctcacgcagatgatgacatcaactcttttttcttccccaagtgtacacaatgtgatggagacagctcctccagatgaaatgaccacatcatttccctccagtgtcaccaacacactcatgatgacatcaaagactataacaatgacaacctccacagactccactcttggaaacacagaagagacatcaacagcaggaactgaaagttctaccccagtgacctcagcagtctcaataacagctggacaggaaggacaatcacgaacaacttcctggaggacctctatccaagacacatcagcttcttctcagaaccactggactcggagcacgcagaccaccagggaatctcaaaccagcaccctaacacacagaaccacttcaactccttctttctctccaagtgtacacaatgtgacagggactgtttctcagaagacatctccttcaggtgaaacagctacctcatccctctgtagtgtcacaaacacatccatgatgacatcagagaagataacagtgacaacctccacaggctccactcttggaaacccaggggagacatcatcagtacctgttactggaagtcttatgccagtcacctcagcagccttagtaacatttgatccagaaggacaatcaccagcaactttctcaaggacttctactcaggacacaacagctttttctaagaaccaccagactcagagcgtggagaccaccagagtatctcaaatcaacaccctcaacaccctcacaccggttacaacatcaactgttttatcctcaccaagtggattcaacccaagtggaacagtttctcaggagacattcccttctggtgaaacaaccacctcatccccttccagtgtcagcaatacattcctggtaacatcaaaggtgttcagaatgccaacctccagagactctactcttggaaacacagaggagacatcactatctgtaagtggaaccatttctgcaatcacttccaaagtttcaaccatatggtggtcagacactctgtcaacagcactctcccccagttctctacctccaaaaatatccacagctttccacacccagcagagtgaaggtgcagagaccacaggacggcctcatgagaggagctcattctctccaggtgtgtctcaagaaatatttactctacatgaaacaacaacatggccttcctcattctccagcaaaggccacacaacttggtcacaaacagaactgccctcaacatcaacaggtgctgccactaggcttgtcacaggaaatccatctacagggacagctggcactattccaagggtcccctctaaggtctcagcaataggggaaccaggagagcccaccacatactcctcccacagcacaactctcccaaaaacaacaggggcaggcgcccagacacaatggacacaagaaacggggaccactggagaggctcttctcagcagcccaagctacagtgtgactcagatgataaaaacggccacatccccatcttcttcacctatgctggatagacacacatcccaacaaattacaacggcaccatcaacaaatcattcaacaatacattccacaagcacctctcctcaggaatcaccagctgtttcccaaaggggtcacactcaagccccgcagaccacacaagaatcacaaaccacgaggtccgtctcccccatgactgacaccaagacagtcaccaccccaggttcttccttcacagccagtgggcactcgccctcagaaattgttcctcaggacgcacccaccataagtgcagcaacaacctttgccccagctcccaccggggatggtcacacaacccaggccccgaccacagcactgcaggcagcacccagcagccatgatgccaccctggggccctcaggaggcacgtcactttccaaaacaggtgcccttactctggccaactctgtagtgtcaacaccagggggcccagaaggacaatggacatcagcctctgccagcacctcacctgacacagcagcagccatgacccatacccaccaggctgagagcacagaggcctctggacaaacacagaccagcgaaccggcctcctcagggtcacgaaccacctcagcgggcacagctaccccttcctcatccggggcgagtggcacaacaccttcaggaagcgaaggaatatccacctcaggagagacgacaaggttttcatcaaacccctccagggacagtcacacaacccagtcaacaaccgaattgctgtccgcctcagccagtcatggtgccatcccagtaagcacaggaatggcgtcttcgatcgtccccggcacctttcatcccaccctctctgaggcctccactgcagggagaccgacaggacagtcaagcccaacttctcccagtgcctctcctcaggagacagccgccatttcccggatggcccagactcagaggacaagaaccagcagagggtctgacactatcagcctggcgtcccaggcaaccgacaccttctcaacagtcccacccacacctccatcgatcacatccactgggcttacatctccacaaaccgagacccacactctgtcaccttcagggtctggtaaaaccttcaccacggccctcatcagcaacgccacccctcttcctgtcacctacgcttcctcggcatccacaggtcacaccacccctcttcatgtcaccgatgcttcctcagtatccacaggtcacgccacccctcttcctgtcaccagcccttcctcagtatccacaggtcacaccacccctcttcctgtcaccgacacttcctcagaatccacaggtcacgtcacccctcttcctgtcaccagcttttcctcagcatccacaggtgacagcacccctcttcctgtcactgacacttcctcagcatccacaggtcacgtcacccctcttcctgtcaccagcctttcctcagcatccacaggtgacaccacccctcttcctgtcactgacacttcctcagcatccacaggtcacgccacctctcttcctgtcaccgacacttcctcagtatccacaggtcacaccacccctcttcctgtcaccgacacttcctcagcatccacaggtcacgccacctctcttcctgtcaccgacacttcctcagtatccacaggtcacaccacccctcttcatgtcactgatgcttcctcagcatccacaggtcaggccacccctcttcctgtcaccagcctttcctcagtatccacaggtgacaccacgcctcttcctgtcactagcccttcctcagcatccacaggtcacgccacccctcttcttgtcaccgacacttcctcagcatccacaggacacgccacccctcttcctgtcaccgacgcttcctcagtgtccacagatcacgccacctctcttcctgtaaccatcccttccgcagcatccacaggtcacaccacccctcttcctgtcaccgacacttcctcagcatccacaggtcaggccacctctcttcttgtcaccgacacttcctcagtatccacaggtgacaccacgcctcttcctgtcactagcacttcctcagcatccacaggtcacgtcactcctcttcatgtcaccagcccttcctcagcatccacaggtcacgccacccctcttcctgtcaccagcctttcctcagcatccacaggtgacaccatgcctcttcctgtcactagcccttcctcagcatccacaggtgacaccacccctcttcctgtcaccgacgcttcctcagtatccacaggtcacaccacccctcttcatgtcactgatgcttcctcagcatccacaggtcaggccacccctcttcctgtcaccagcctttcctcagtatccacaggtgacaccacgcctcttcctgtcactagcccttcctcagcatccacaggtcacgccacccctcttcttgtcaccgacacttcctcagcatccacaggacacgccacccctcttcctgtcaccgacgcttcctcagtgtccacagatcacgccacctctcttcctgtaaccatcccttccgcagcatccacaggtcacaccacccctcttcctgtcaccgacacttcctcagcatccacaggtcaggccacctctcttcttgtcaccgacacttcctcagtatccacaggtgacaccacgcctcttcctgtcactagcacttcctcagcatccacaggtcacgtcactcctcttcatgtcaccagcccttcctcagcatccacaggtcacgccacccctcttcctgtcaccagcctttcctcagcatccacaggtgacaccatgcctcttcctgtcactagcccttcctcagcatccacaggtgacaccacccctcttcctgtcaccgacgcttcctcagtatccacaggtcacaccacccctcttcctgtcaccagcccttcctcagcatctacaggtcacaccacccctcttcctgtcaccgacacttcctcagcatccaaaggtgacaccacccctcttcctgtcaccagcccttcctcagcatctacaggtcacaccacccctcttcctgtcaccgacacttcctcagcatccacaggtgacaccacccctcttcctgtcaccaatgcttcctcattatccacaggtcacgccacccctcttcatgtcaccagcccttcctcagcatccacaggtcacgccacccctcttcctgtcaccagcacttcctcagcatccaccggtcacgccacccctcttcctgtcaccggcctttcctcagctaccacagatgacaccacccgtcttcctgtcaccgacgtttcctcggcatccacaggtcaggccacccctcttcctgtcaccagcctttcctcagtatccacaggtgacaccacgcctcttcctgtcactagcccttcctcagcatccacaggtcacgccagccctcttcttgtcactgacgcttcctcagcatccacaggtcaggccacccctcttcctgtcaccgacacttcctcagtatccacagctcacgccaccccacttcctgtcaccggcctttcttcagcttccacagatgacaccacccgtcttcctgtcaccgacgtttcctcggcatccacaggtcaggccatccctcttcctgtcaccagcccttcctcagcatccacaggtgacaccacccctcttcctgtcaccgacgcttcctcagcatccacaggtgacaccacctctcttcctgtcaccatcccttcctcagcatcttcaggtcacaccacctctcttcctgtcaccgacgcttcctcagtgtccacaggtcacgccacctctcttcttgtcaccgacgcttcctcagtatccacaggtgacaccacccctcttcctgtcaccgacactaactcagcatccacaggtgacaccacccctcttcatgtcaccgacgcttcctcagtatccacaggtcacgccacctctcttcctgtcaccagcctttcctcagcatccacaggtgacaccacgcctcttcctgtcactagcccttcctcagcatcctcaggtcacaccacccctcttcctgtcaccgacgcttcctcagtacccacaggtcacgccacctctcttcctgtcaccgacgcttcctcagtgtccacaggtcacgccacccctcttcctgtcaccgacgcttcctcagtgtccacaggtcatgccacccctcttccggtcaccgacacttcctcagtatctacaggacaggccacccctcttcctgtcaccagcctttcctcagcatccacaggtgacaccacccctcttcctgtcaccgacacttcctcagcatccacaggtcacgccccccatcttcctgtcaccggcctttcctcagcttccacaggtgacaccacccgtcttcctgtcaccaacgtttcctcggcatccacaggtcatgccacccctcttcctgtcaccagcacttcctcagcatccacaggtgacaccacccctcttcctggcaccgacacttcctcagtatccacaggtcacaccacccctcttcttgtcaccgacgcttcgtcagtatccacaggtgacaccacccgtcttcctgtcaccagcccttcctcagcatctacaggtcacaccacccctcttcatgtcaccgatgcttcctcagtatccacaggtcacaccacccctcttcctgtcaccgacacttcctcagcatccacaggtcaggccacctctcttcttgtcaccgacacttcctcagtatccacaggtgacaccacgcctcttcctgtcactagcacttcctcagcatccacaggtcacgtcactcctcttcatgtcaccagcccttcctcagcatccacaggtcacgccacccctcttcctgtcaccagcctttcctcagcatccacaggtgacaccacccctcttcctgtcaccgacacttcctcagtatccacaggtcacaccacccctcttcctgtcaccagcccttcctcagcatctacaggtcacaccacccctcttcctgtcaccgacacttcctcagcatccaaaggtgacaccacccctcttcctgtcaccagcccttcctcagcatctacaggtcacaccacccctcttcctgtcaccgacacttcctcagcatccacaggtgacaccacccctcttcctgtcaccaatgcttcctcattatccacaggtcacgccacccctcttcatgtcaccagcccttcctcagcatccacaggtcacgccacccctcttcctgtcaccagcacttcctcagcatccaccggtcacgccacccctcttcctgtcaccagcacttcctcagcatccaccggtcacgccacccctcttcctgtcaccgacaattcctcagtatccacaggtcatgccacccctcttcctgtcaccggcctttcctcagctaccacagatgacaccacccgtcttcctgtcaccgacgtgtcctcggcatccacaggtcaggccacccctcttcctgtcaccagcctttcctcagtatccacaggtgacaccacgcctcttcctgtcactagcccttcctcagcatccacaggtcacgccagccctcttcttgtcactgacgcttcctcagcatccacaggtcaggccacccctcttcctgtcaccgacacttcctcagtatccacagctcacgccaccccacttcctgtcaccggcctttcctcagcttccacagatgacaccacccgtcttcctgtcaccgacgtttcctcggcatccacaggtcaggccatccctcttcctgtcaccagcccttcctcagcatccacaggtgacaccacccctcttcctgtcaccgacgcttcctcagcatccacaggtgacaccacctctcttcctgtcaccatcccttcctcagcatcttcaggtcacaccacctctcttcctgtcaccgacgcttcctcagtgtccacaggtcacgccacctctcttcttgtcaccgacgcttcctcagtatccacaggtgacaccacccctcttcctgtcaccgacactaactcagcatccacaggtgacaccacccctcttcatgtcaccgacgcttcctcagtatccacaggtcacgccacctctcttcctgtcaccagcctttcctcagcatccacaggtgacaccacgcctcttcctgtcactagcccttcctcagcatcctcaggtcacaccacctctcttcctgtcaccgacgcttcctcagtgtccacaggtcacgccacctctcttcctgtcaccatcccttcctcagcatcctcaggtcacaccacccctcttcctgtcaccgacgcttcctcagtacccacaggtcacgccacctctcttcctgtcaccgacgcttcctcagtgtccacaggtcacgccacccctcttcctgtcaccgacgcttcctcagtgtccacaggtcatgccacccctcttccggtcaccgacacttcctcagtatctacaggacaggccacccctcttcctgtcaccagcctttcctcagcatcatccactggtgacaccacgccgcttcctgtcactgatacttcctcagcatccacaggtcaggacacccctcttcctgtcaccagccttttctcagtatccacaggtgacaccacgcctcttcctgtcactagcccttcctcagcatccacaggtcacgccacccatcttcttgtcaccgacgcttcctcagtatccacaggtcacgccacctctcttcttgtcaccgacgcttcctcagtatccacaggtcacgccaccgctcttcatgtcaccgatgcttcctcattatccacaggggacaccacccctcttcctgtcaccagcccttcctcagcatccacaggtgacaccacccctcttcctgtcaccgacacttcctcagtatccacaggtcacgccacctctcttcctgtcactgacacttcctcagcatccacaggtcacgccacctctcttcctgtcaccgacacttcctcagcatccacaggtcaggccacccctcttcctgtcaccagcccttcctcagcatccacaggtcacgccatccctcttcttgtcaccgacacttcctcagcatccacaggacaggccacccctcttcctgtcaccagcctttcctcagcatccacaggtgacaccacccctcttcctgtcaccgatgcttcctcagtgtccacaggtcacgccacctctcttcctgtcaccagcctttcctcagtatccacaggtgacaccacccctcttcctgtcactagcccttcctcagcatccacaggtcacgccacccctcttcatgtcaccagcccttcctcagcatccacaggtcacgccacccctcttcctgtcaccagcctttcctcagcatccacaggtgacaccacgcctcttcctgtcactagcccttcctcagcatccacaggtcacgccacccctcttcatgtcaccgacgcttcctcagtatccacaggtgacaccacccctcttcctgtcaccagcccttcctcagcatcctcaggtcacaccacccctcttcctgtcaccgacgcttcctcagcatccacaggtgacaccacccctcttcctgtcaccgacacttcctcagcatccacaggtcacgccacccatcttcctgtcaccggcctttcctcagcttccacaggtgacaccacccgtcttcctgtcaccgacgtttcctcggcatccacaggtcatgccacccctcttcctgtcaccagcacttcctcagcatccacaggtgacaccacccctcttcctggcaccgacacttcctcagtatccacaggtcacaccacccctcttcttgtcaccgacgcttcgtcagtatccacaggtgacaccacccgtcttcctgtcaccagcccttcctcagcatctacaggtcacaccacccctctacctgtcaccgacactccctcagcatccacaggtgacaccacccctcttcctgtcaccaatgcttcctcattatccacacgtcacgccacctctcttcatgtcaccagcccttcctcagcatccaccggtcacgccacccctcttcctgttaccgacacttccgcagcatccacaggtcacgccacccctcttcctgtcaccagcacttcctcagcatccacaggtgacaccacccctcttcctgtcaccgacacttcctcagcatccacaggtcatgccacccctcttcctgtcaccaacacttcctcagtatccacaggtcacgccacccctcttcatgtcaccagcccttcctcagcatccacaggtcacaccacccctcttcctgtcaccgacgcttcgtcagtgtccacaggtcacgccacctctcttcctgtcaccgacgcttcctcagtgtccacaggtcacgccacccctcttcctgtcaccgacgcttcctcagtgtccacaggtcacgctacccctcttcctctcaccagcctttcctcagtatccacaggtgacaccacgcctcttcctgtcaccgacacttcctcagcatccacaggtcaggccacccctcttcctgtcaccagcctttcctcagtatccacaggtgacaccacccctcttcctgtcaccgacacttcctcagcatccacaggtcacgccacctctcttcctgtcaccgacacttcctcagcatccacaggtcacgccacccctcttcatgtcaccagcccttcctcagcatccaccggtcacgccaccccgcttcctgtcaccgacacttcctcagcatccacaggtcacgccacccctcttcctgtcaccagcctttcctcagtatccacaggtgacaccacgcctcttcctgtcactagcccttcctcagcatccacaggtcacgccactcctcttcttgtcaccgacgcttcctcagcatccacaggtcaggccacccctcttcctgtcaccagcctttcctcagtatccacaggtgacaccacgcctcttcctgtcactagcccttcctcagcatccaccggtcatgccacctctcttcctgtcaccgacacttcctcagcatccacaggtgacaccacctctcttcctgtcaccgacacttcctcagcatacacaggtgacaccacctctcttcctgtcaccgacacttcctcatcatccacaggtgacaccacccctcttcttgtcaccgagacttcctcagcatccacaggtgacaccacccctgtgcctgtcaccgacacttcctcagtatccacaggtcacgccacccctcttcctgtcaccggcctttcctcagcttccacaggtgacaccacccgtcttcctgtcaccgacatttcctcggcatccacaggtcaggccacccctcttcctgtcaccaacacttcctcagtatccacaggtgacaccatgcctcttcctgtcactagcccttcctcagcatccacaggtcacgccacccctcttcctgtcaccagcacttcctcagcatccaccggtcacgccacccctgttcctgtcaccagcacttcctcagcatccacaggtcacaccacccctcttcctgtcaccagcccttcctcagcatctacaggtcacaccacccctcttcctgtcaccgacacttcctcagcatccacaggtgacaccacccctcttcctgtcaccaatgcttcctcattatccacaggacacaccacccctcttcatgtcaccatcccttcctcagcatccacaggtgacaccagcactcttcctgtcaccggcgcttcctcagcatccaccggtcacgccacccctcttcctgtcaccgacacttcctcagtatccacaggtcacgccacccctcttcctgtcaccagcttttcctcagtatccacaggtgacaccacccctcttcctgtcaccgacgcttcctcggcatccaccggtcacgccacccctcttcctgtcaccgacacttcctcagcatccacaggtgacaccacccctcttcctgtcaccgacgcttcctcggcatccacaggtcaggccacccctcttcctgtcaccagcctttcctcagtatcaacaggtgacaccacgcctcttcctgtcaccatcccttcctcagcatcctcaggtcacaccacctctcttcctgtcagcgacacttcctcagcatccacaggtcaggccacccctcttcctgtcaccagcctttcctcagtatccacaggtgacaccacccctcttcttgtcaccgacgcttcctcagtatccacaggtcacgccacccctcttcctgtcaccgacacttcctcagcatccacaggtgacaccacccgtcttcctgtcacggacacttcctcagcatccacaggtcaggccacccctcttcctgtcaccagcctttcctcagtatccacaggtgacaccacccctcttcttgtcaccaacacttcctcagtatccacaggtcacgccacctctcttcctgtcaccatcccttcctcatcatcctcaggtcacaccacccctcttcctgtcaccagcacttcctcagtatctacaggtcacgtcacccctcttcatgtcaccagcccttcctcatcatccacaggtcaggccacccctcttcctgtcaccagcacttcctcatcatccacaggtcaggccacccctcttcctgtcaccagcacttcctcagcatccacaggtcacgccacccctcttcctgtcaccgacgcttcctcagtgtccacaggtcacgccacgcctcttcctgtcaccgacacttcctcagcatccacaggtgacaccacccctcttcctgtcaccgacacttcctcagcatccacaggtcaggccacccctcttcctgtcaccagcctttcctcagtatccacaggtcacgccacccctcttgctgtcagcagtgctacctcagcttccacagtatcctcggactcccctctgaagatggaaacatcaggaatgacaacaccgtcactgaagacagacggtgggagacgcacagccacatcaccaccccccacaacctcccagaccatcatttccaccattcccagcactgccatgcacacccgctccacagctgcccccatccccatcctgcctgagagaggagtttccctcttcccctatggggcagacgccggggacctggagttcgtcaggaggaccgtggacttcacctccccactcttcaagccggcgactggcttcccccttggctcctctctccgtgattccctctacttcacagacaatggccagatcatcttcccagagtcagactaccagattttctcctaccccaacccactcccaacaggcttcacaggccgggaccctgtggccctggtggctccgttctgggacgatgctgacttctccactggtcgggggaccacattttatcaggaatacgagacgttctatggtgaacacagcctgctagtccagcaggccgagtcttggattagaaagatcacaaacaacgggggctacaaggccaggtgggccctaaaggtcacgtgggtcaatgcccacgcctatcctgcccagtggaccctcgggagcaacacctaccaagccatcctctccacggacgggagcaggtcctatgccctgtttctctaccagagcggtgggatgcagtgggacgtggcccagcgctcaggcaagccggtgctcatgggcttctctagtggagatggctatttcgaaaacagcccactgatgtcccagccagtgtgggagaggtatcgccctgatagattcctgaattccaactcaggcctccaagggctgcagttctacaggctacaccgggaagaaaggcccaactaccgtctcgagtgcctgcagtggctgaagagccagcctcggtggcccagctggggctggaaccaggtctcctgcccttgttcctggcagcagggacgacgggacttacgattccaacccgtcagcataggtcgctggggcctcggcagtaggcagctgtgcagcttcacctcttggcgaggaggcgtgtgctgcagctacgggccctggggagagtttcgtgaaggctggcacgtgcagcgtccttggcagttggcccaggaactggagccacagagctggtgctgccgctggaatgacaagccctacctctgtgccctgtaccagcagaggcggccccacgtgggctgtgctacatacaggcccccacagcccgcctggatgttcggggacccccacatcaccaccttggatggtgtcagttacaccttcaatgggctgggggacttcctgctggtcggggcccaagacgggaactcctccttcctgcttcagggccgcaccgcccagactggctcagcccaggccaccaacttcatcgcctttgcggctcagtaccgctccagcagcctgggccccgtcacggtccaatggctccttgagcctcacgacgcaatccgtgtcctgctggataaccagactgtgacatttcagcctgaccatgaagacggcggaggccaggagacgttcaacgccaccggagtcctcctgagccgcaacggctctgaggtctccgccagcttcgacggctgggccaccgtctcggtgatcgcgctctccaacatcctccactcctccgccagcctcccgcccgagtaccagaaccgcacggaggggctcctgggggtctggaataacaatccagaggacgacttcaggatgcccaatggctccaccattcccccagggagccctgaggagatgcttttccactttggaatgacctggcagatcaacgggacaggcctccttggcaagaggaatgaccagctgccttccaacttcacccctgttttctactcacaactgcaaaaaaacagctcctgggctgaacatttgatctccaactgtgacggagatagctcatgcatctatgacaccctggccctgcgcaacgcaagcatcggacttcacacgagggaagtcagtaaaaactacgagcaggcgaacgccaccctcaatcagtacccgccctccatcaatggtggtcgtgtgattgaagcctacaaggggcagaccacgctgattcagtacaccagcaatgctgaggatgccaacttcacgctcagagacagctgcaccgacttggagctctttgagaatgggacgttgctgtggacacccaagtcgctggagccattcactctggagattctagcaagaagtgccaagattggcttggcatctgcactccagcccaggactgtggtctgccattgcaatgcagagagccagtgtttgtacaatcagaccagcagggtgggcaactcctccctggagctctggggagctctttcctgtgtcagaaccagtcctgccctgtgaattactgctacaatcaaggccactgctacatctcccagactctgggctgtcagcccatgtgcacctgccccccagccttcactgacagccgctgcttcctggctgggaacaacttcagtccaactgtcaacctagaacttcccttaagagtcatccagctcttgctcagtgaagaggaaaatgcctccatggcagaggtcaacgcctcggtggcatacagactggggaccctggacatgcgggcctttctccgcaacagccaagtggaacgaatcgattctgcagcaccggcctcgggaagccccatccaacactggatggtcatctcggagttccagtaccgccctcggggcccggtcattgacttcctgaacaaccagctgctggccgcggtggtggaggcgttcttataccacgttccacggaggagtgaggagcccaggaacgacgtggtcttccagcccatctccggggaagacgtgcgcgatgtgacagccctgaacgtgagcacgctgaaggcttacttcagatgcgatggctacaagggctacgacctggtctacagcccccagagcggcttcacctgcgtgtccccgtgcagtaggggctactgtgaccatggaggccagtgccagcacctgcccagtgggccccgctgcagctgtgtgtccttctccatctacacggcctggggcgagcactgtgagcacctgagcatgaaactcgacgcgttcttcggcatcttctttggggccctgggcggcctcttgctgctgggggtcgggacgttcgtggtcctgcgcttctggggttgctccggggccaggttctcctatttcctgaactcagctgaggccttgccttgaaggggcagctgtggcctaggctacctcaagactcacctcatccttaccgcacatttaaggcgccattgcttttgggagactggaaaagggaaggtgactgaaggctgtcaggattcttcaaggagaatgaatactgggaatcaagacaagactataccttatccataggcgcaggtgcacagggggaggccataaagatcaaacatgcatggatgggtcctcacgcagacacacccacagaaggacactagcctgtgcacgcgcgcgtgcacacacacacacacacaagagttcataatgtggtgatggccctaagttaagcaaaatgcttctgcacacaaaactctctggtttacttcaaattaactctatttaaataaagtctctctgactttttgtgtcttcaaaa

SEQ ID NO: 155682 - DNA, 22461 bp, Homo sapiens
  Payload ID: 10597
  Gene Symbol: MUC4
  Gene Name: mucin 4, cell surface associated
  ENST ID: ENST00000629163
  CDS Start-End: 73-19383
gtctgctcctcacactgcagctgctgggccgtggagcttccccagggagccagggggacttttgccgcagccatgaagggggcacgctggaggagggtcccctgggtgtccctgagctgcctgtgtctctgcctccttccgcatgtggtcccaggaaccacagaggacacattaataactggaagtaaaactcctgccccagtcacctcaacaggctcaacaacagcgacactagagggacaatcaactgcagcttcttcaaggacctctaatcaggacatatcagcttcatctcagaaccaccagactaagagcacggagaccaccagcaaagctcaaaccgacaccctcacgcagatgatgacatcaactcttttttcttccccaagtgtacacaatgtgatggagactgttacgcaggagacagctcctccagatgaaatgaccacatcatttccctccagtgtcaccaacacactcatgatgacatcaaagactataacaatgacaacctccacagactccactcttggaaacacagaagagacatcaacagcaggaactgaaagttctaccccagtgacctcagcagtctcaataacagctggacaggaaggacaatcacgaacaacttcctggaggacctctatccaagacacatcagcttcttctcagaaccactggactcggagcacgcagaccaccagggaatctcaaaccagcaccctaacacacagaaccacttcaactccttctttctctccaagtgtacacaatgtgacagggactgtttctcagaagacatctccttcaggtgaaacagctacctcatccctctgtagtgtcacaaacacatccatgatgacatcagagaagataacagtgacaacctccacaggctccactcttggaaacccaggggagacatcatcagtacctgttactggaagtcttatgccagtcacctcagcagccttagtaacagttgatccagaaggacaatcaccagtaactttctcaaggacttctactcaggacacaacagctttttctaagaaccaccagactcagagcgtggagaccaccagagtatctcaaatcaacaccctcaacaccctcacaccggttacaacatcaactgttttatcctcaccaagtggattcaacccaagtggaacagtttctcaggagacattcccttctggtgaaacaaccatctcatccccttccagtgtcagcaatacattcctggtaacatcaaaggtgttcagaatgccaatctccagagactctactcttggaaacacagaggagacatcactatctgtaagtggaaccatttctgcaatcacttccaaagtttcaaccatatggtggtcagacactctgtcaacagcactctcccccagttctctacctccaaaaatatccacagctttccacacccagcagagtgaaggtgcagagaccacaggacggcctcatgagaggagctcattctctccaggtgtgtctcaagaaatatttactctacatgaaacaacaacatggccttcctcattctccagcaaaggccacacaacttggtcacaaacagaactgccctcaacatcaacaggtgctgccactaggcttgtcacaggaaatccatctacaggggcagctggcactattccaagggtcccctctaaggtctcagcaataggggaaccaggagagcccaccacatactcctcccacagcacaactctcccaaaaacaacaggggcaggcgcccagacacaatggacacaagaaacggggaccactggagaggctcttctcagcagcccaagctacagtgtgactcagatgataaaaacggccacatccccatcttcttcacctatgctggatagacacacatcacaacaaattacaacggcaccatcaacaaatcattcaacaatacattccacaagcacctctcctcaggaatcaccagctgtttcccaaaggggtcacactcaagccccgcagaccacacaagaatcacaaaccacgaggtccgtctcccccatgactgacaccaagacagtcaccaccccaggttcttccttcacagccagtgggcactcgccctcagaaattgttcctcaggacgcacccaccataagtgcagcaacaacctttgccccagctcccaccggggatggtcacacaacccaggccccgaccacagcactgcaggcagcacccagcagccatgatgccaccctggggccctcaggaggcacgtcactttccaaaacaggtgcccttactctggccaactctgtagtgtcaacaccagggggcccagaaggacaatggacatcagcctctgccagcacctcacctgacacagcagcagccatgacccatacccaccaggctgagagcacagaggcctctggacaaacacagaccagcgaaccggcctcctcagggtcacgaaccacctcagcgggcacagctaccccttcctcatccggggcgagtggcacaacaccttcaggaagcgaaggaatatccacctcaggagagacgacaaggttttcatcaaacccctccagggacagtcacacaacccagtcaacaaccgaattgctgtccgcctcagccagtcatggtgccatcccagtaagcacaggaatggcgtcttcgatcgtccccggcacctttcatcccaccctctctgaggcctccactgcagggagaccgacaggacagtcaagcccaacttctcccagtgcctctcctcaggagacagccgccatttcccggatggcccagactcagaggacaagaaccagcagagggtctgacactatcagcctggcgtcccaggcaaccgacaccttctcaacagtcccacccacacctccatcgatcacatccagtgggcttacatctccacaaacccagacccacactctgtcaccttcagggtctggtaaaaccttcaccacggccctcatcagcaacgccacccctcttcctgtcacctacgcttcctcggcatccacaggtcacaccacccctcttcatgtcaccgatgcttcctcagtatccacaggtcacgccacccctcttcctgtcaccgacacttcctcagaatccacaggtcacgccacccctcttcctgtcaccagcccttcctcagtatccacaggtcacaccacccctcttcctgtcaccgacacttcctcagaatccacaggtcatgtcacccctcttcctgtcaccagcctttcctcagcatccacaggtgacagcacccctcttcctgtcactgacacttcctcagcatccacaggtcacgtcacccctcttcctgtcaccagcctttcctcagcatccacaggtgacaccacccctcttcctgtcactgacacttcctcagcatccacaggtcacgccacctctcttcctgtcaccgacacttcctcagtatccacaggtcacaccacccctcttcctgtcaccgacacttcctcagcatccacaggtcacgccacctctcttcctgtcaccgacacttcctcagtatccacagctcacgccaccccacttcctgtcaccggcctttcttcagcttccacagatgacaccacccgtcttcctgtcaccgacgtttcctcggcatccacaggtcaggccatccctcttcctgtcaccagcccttcctcagcatccacaggtgacaccacccctcttcctgtcaccgacgcttcctcagcatccacaggtgacaccacctctcttcctgtcaccatcccttcctcagcatcttcaggtcacaccacctctcttcctgtcaccgacgcttcctcagtgtccacaggtcacgccacctctcttcttgtcaccgacgcttcctcagtatccacaggtgacaccacccctcttcctgtcaccgacactaactcagcatccacaggtgacaccacccctcttcatgtcaccgacgcttcctcagtatccacaggtcacgccacctctcttcctgtcaccagcctttcctcagcatccacaggtgacaccacgcctcttcctgtcactagcccttcctcagcatcctcaggtcacaccacccctcttcctgtcaccgacgcttcctcagtacccacaggtcacgccacctctcttcctgtcaccgacgcttcctcagtgtccacaggtcacgccacccctcttcctgtcaccgacgcttcctcagtgtccacaggtcatgccacccctcttccggtcaccgacacttcctcagtatctacaggacaggccacccctcttcctgtcaccagcctttcctcagcatccactggtgacaccacgccgcttcctgtcaccgatacttcctcagcatccacaggtcaggacacccctcttcctgtcaccagcctttcctcagtatccacaggtgacaccacgcctcttcctgtcactagcccttcctcagcatccacaggtcacgccacccctcttcttgtcaccgacgcttcctcagtatccacaggtcacgccacctctcttcttgtcaccgacgcttcctcagtatccacaggtcacgccaccgctcttcatgtcaccgatgcttcctcattatccacaggggacaccacccctcttcctgtcaccagcccttcctcagcatccacaggtgacaccacccctcttcctgtcaccgacacttcctcagcatccacaggtcacgccacctctcttcctgtcaccgacacttcctcagcatccacaggtcacgccacccctcttcctgtcaccgacacttcctcagcatccacaggtcaggccacccctcttcctgtcaccggcccttcctcagcatccacaggtcacgccatccctcttcttgtcaccgacacttcctcagcatccacaggacaggccacccctcttcctgtcaccagcctttcctcagcatccacaggtgacaccacccctcttcctgtcaccgacgcttcctcagtgtccacaggtcacgccacctctcttcctgtcaccagcctttcctcagtatccacaggtgacaccacccctcttcctgtcaccagcccttcctcagcatcctcaggtcacaccacccctcttcctgtcaccgacgcttcctcagtatccacaggtgacaccacccctcttcctgtcaccagcccttcctcagcatcctcaggtcacaccacccctcttcctgtcaccagcccttcctcagcatcctcaggtcacaccacccctcttcctgtcaccgacgcttcctcagcatccacaggtgacaccacccctcttcctgtcaccgacacttcctcagcatccacaggtcacgccacccatcttcctgtcaccggcctttcctcagcttccacaggtgacaccacccgtcttcctgtcaccaacgtttcctcggcatccacaggtcatgccacccctcttcctgtcaccagcacttcctcagcatccacaggtgacaccacccctcttcctggcaccgacacttcctcagtatccacaggtcacaccacccctcttcttgtcaccgacgcttcgtcagtatccacaggtgacaccacccgtcttcctgtcaccagcccttcctcagcatctacaggtcacaccacccctctacctgtcaccgacactccctcagcatccacaggtgacaccacccctcttcctgtcaccaatgcttcctcattatccacacgtcacaccacctctcttcatgtcaccagcccttcctcagcatccacaggtcacgccacctctcttcctgtcaccgacacttcctcagtatccacaggtcatgccacccctcttcatgtcaccagcccttcctcagcatccacaggtgacaccacccctcttcctgtcaccgacacttactcagcatccacaggtcaggccacccctcttcctgtcaccgacacttcctcagcatccacaggtgacaccacccctcttcctgtcaccgacacttcctcagcatccacaggtcacgccacccctcttcctgtcaccaacacttcctcagtatccacaggtcacgccacccctcttcatgtcaccagcccttcctcagcatccacaggtcacaccacccctcttcctgtcaccgacgcttcgtcagtgtccacaggtcacgccacctctcttcctgtcaccgacgcttcctcagtgttcacaggtcacgccacctcgcttcctgtcaccatcccttcctcagcatcctcaggtcacaccacccctcttcctgtcaccgacgcttcctcagtgtccacaggtcacgccacctctcttcctgtcaccgacgcttcctcagtgtccacaggtcacgccacccctcttcctgtcaccgacgcttcctcagtgtccacaggtcacgctacccctcttcctgtcaccgacacttcctcagtatccacaggtcacgccacccctcttcctctcaccagcctttcctcagtatccacaggtgacaccacgcctcttcctgtcaccgacacttcctcagcatccacaggtcaggccacccctcttcctgtcaccagcctttcctcagtatccacaggtgacaccacccctcttcctgtcaccgacacttcctcagcatccacaggtcacgccacctctcttcctgtcaccgacacttcctcagcatccacaggtcacgccacccctcttcctgacaccgacacttcctcagcatccacaggtcacgccacccctcttcctgtcaccgacacttcctcagcatccacaggtcacgccacccttcttcctgtcaccgacacttcctcagcatccataggtcacgccacccctcttcctgtcaccgacacttcctcaatatccacaggtcacgccacccctcttcatgtcaccagcccttcctcagcatccaccggtcacgccaccccgcttcctgtcaccgacacttcctcagcatccacaggtcacgccaaccctcttcatgtcaccagcccttcctcagcatccaccggtcacgccaccccgcttcctgtcaccgacacttcctcagcatccacaggtcacgccacccctcttcctgtcaccagcctttcctcagtatccacaggtgacaccacgcctcttcctgtcactagcccttcctcagcatccacaggtcacaccacccctcttcctgtcaccgacacttcctcagcatccacaggtcaggccaccgctcttcctgtcaccagcacttcctcagcatccacaggtgacaccacccctcttcctgttaccgacacttcctcagcatccacaggtcaggccacccctcttcctgtcaccagcctttcctcagtatccacaggtgacaccacgcctcttcctgtcactagcccttcctcagcatccacaggtcacgccactcctcttcttgtcaccgacgcttcctcagcatccacaggtcaggccacccctcttcctgtcaccgacacttcctcagcatacacaggtgacaccacctctcttcctgtcaccgacacttcctcatcatccacaggtgacaccacccctcttcttgtcaccgagacttcctcagcatccacaggtcacgccacccctcttcatgtcaccagcccttcctcagcatccacaggtgacaccacccctgtgcctgtcaccgacacttcctcagtatccacaggtcacgccacccctcttcctgtcaccggcctttcctcagcttccacaggtgacaccacccgtcttcctgtcaccgacatttcctcggcatccacaggtcaggccacccctcttcctgtcaccaacacttcctcagcatccacaggtcacgccacccctcttcctgtcaccggcctttcctcagcttccacaggtgacaccacccgtcttcctgtcaccgacatttcctcggcatccacaggtcaggccacccctcttcctgtcaccaacacttcctcagtatccacaggtgacaccatgcctcttcctgtcactagcccttcctcagcatccacaggtcacgccacccctcttcctgtcaccagcacttcctcagcatccaccggtcacgccacccctgttcctgtcaccagcacttcctcagcatctacaggtcacaccacccctcttcctgtcaccgacacttcctcagcatccacaggtgacaccacccctcttcctgtcaccagcccttcctcagcatctacaggtcacaccacccctcttcatgtcaccatcccttcctcagcatccacaggtgacaccagcactcttcctgtcaccggcgcttcctcagcatccaccggtcacgccacccctcttcctgtcaccgacacttcctcagtatccacaggtcacgccacccctcttcctgtcaccagcttttcctcagtatccacaggtgacaccacgcctcttcctgtcaccgacacttcctcagtatccacaggtcacgccacccctcttcctgtcaccagcttttcctcagtatccacaggtgacaccacccctcttcctgtcaccgacgcttcctcggcatccaccggtcacgccacccctcttcctgtcaccgacacttcctcagtatccacaggtcacgccacccctcttcctctcaccagcctttcctcagtatccacaggtgacaccacgactcttcctgtcaccgacacttcctcagtatccacaggtcacgccacccctcttcctgtcaccagcttttcctcagtatccacaggtgacaccacccctcttcctgtcaccgacgcttcctcggcatccaccggtcacgccacccctcttcctgtcaccgacacttcctcagtatccaccggtcacgccacgcctcttcctgtcaccagcctttcctcagtatccacaggtgacaccacccctcttcctgtcaccgacgcttcctcggcatccacaggtcaggccacccctcttcctgtcaccagcctttcctcagtatcaacaggtgacaccacgcctcttcctgtcaccatcccttcctcagcatcctcaggtcacaccacctctcttcctgtcaccgacacttcctcagcatccacaggtcaggccacccctcttcctgtcaccagcctttcctcagtatccacaggtgacaccacccctcttcttgtcaccgacgcttcctcagtatccacaggtcacgccacccctcttcctgtcaccgacacttcctcagcatccacaggtgacaccacccgtcttcctgtcacagacacttcctcagcatccacaggtcaggccacccctcttcctgtcaccagcctttcctcagtatccacaggtgacaccacccctcttcttgtcaccaacacttcctcagtatccagaggtcacgccacctctcttcctgtcaccatcccttcctcatcatcctcaggtcacaccacccctcttcctgtcaccagcacttcctcagtatctacaggtcacgtcacccctcttcctgtcaccagcacttcctcagcatccacaggtcacgccacctctcttcctgtcaccgacacttcctcagtatccacaggtcacgccacctctcttcctgtcaccgacacttcctcagtatccacaggtcacgccacccctcttcctgtcaccgacgcttcctcagtgtccacaggtcacgccacgcctcttcctgtcaccgacgcttcctcagcatccacaggtgacaccacccctcttcctgtcaccaacacttcctcagcatccacaggtcaggccacccctcttcctgtcaccagcctttcctcagtatccacaggtgacaccatgcctcttcctgtcactagcccttcctcagcatccacaggtcacgccacccctcttcctgttaccggcctttcctcagcttccacaggtgacaccacccctcttcctgtcactgacacttcctcagcatccacaggtcacgtcacccctcttcctgtcaccagcctttcctcagcatccacaggtgacagcacccctcttcctgtcactgacacttcctcagcatccacaggtcacgtcacccctcttcctgtcaccagcctttcctcagcatccacaggtgacaccacccctcttcctgtcactgacacttcctcagcatccacaggtcacgccacccctcttcatgtcactgatgcttcctcagcatccacaggtcaggccacccttcttcctgtcaccagcctttcctcagtatccacaggtgacaccacgcctcttcctgtcactagcccttcctcagcatccacaggtcacgccacccctcttcttgtcaccgacacttcctcagcatccacaggacacgccacccctcttcctgtcacggacgcttcctcagtgtccacaggtcacgccacctctcttcctgtaaccatccgttcctcaggttccacaggtcacaccacccctcttcctgtcaccgacacttcctcagcatccacaggtcaggccacctctcttcttgtcaccgacacttcctcagtatccacaggtgacaccacgcctcttcctgtcactagcacttcctcagcatccacaggtcacgtcactcctcttcatgtcaccagcccttcctcagcatccacaggtcacgccacccctcttcctgtcaccagcctttcctcagcatccacaggtgacaccatgcctcttcctgtcactagcccttcctcagcatccacaggtgacaccacccctcttcctgtcaccgacgcttcctcagtatccacaggtcacaccacccctcttcctgtcaccagcccttcctcagcatctacaggtcacaccacccctcttcctgtcaccgacactacctcagcatccaaaggtgacaccacccctcttcctgtcaccagcccttcctcagcatctacaggtcacaccacccctcttcctgtcaccgacacttcctcagcatccacaggtgacaccacccctcttcctgtcaccagcccttcctcagcatccacaggtcacgccacccctcttcctgtcaccaatgcttcctcattatccacaggtcacgccacccctcttcatgtcaccagcccttcctcagcatccacaggtcacgccacccctcttcctgtcaccagcacttcctcagcatccaccggtcacgccacctctcttcctgtcaccagcacttcctcagcatccaccggtcacgccacccctcttcctgtcaccgacaattcctcagtatccacaggtcacgccacccctcttcctgtcaccggcctttcctcagctaccacagatgacaccacccgtcttcctgtcaccgacgtttcctcggcatccacaggtcaggccacccctcttcctgtcaccagcctttcctcagtatccacaggtgacaccacgcctcttcctgtcactagcccttcctcagcatccacaggtcacgccagccctcttcttgtcactgacgcttcctcagcatccacaggtcaggccacccctcttcctgtcaccgacacttcctcagtatccacagctcacgccaccccacttcctgtcaccggcctttcttcagcttccacagatgacaccacccgtcttcctgtcaccgacgtttcctcggcatccacaggtcaggccatccctcttcctgtcaccagcccttcctcagcatccacaggtgacaccacccctcttcctgtcaccgacgcttcctcagcatccacaggtgacaccacctctcttcctgtcaccatcccttcctcagcatcttcaggtcacaccacctctcttcctgtcaccgacgcttcctcagtgtccacaggtcacgccacctctcttcttgtcaccgacgcttcctcagtatccacaggtgacaccacccctcttcctgtcaccgacactaactcagcatccacaggtgacaccacccctcttcatgtcaccgacgcttcctcagtatccacaggtcacgccacctctcttcctgtcaccagcctttcctcagcatccacaggtgacaccacgcctcttcctgtcactagcccttcctcagcatcctcaggtgacaccacccctcttcctgtcaccgacacttcctcagcatccacaggtcacgccacccatcttcctgtcaccggcctttcctcagcttccacaggtgacaccacccgtcttcctgtcaccaacgtttcctcggcatccacaggtcatgccacccctcttcctgtcaccagcacttcctcagcatccacaggtgacaccacccctcttcctggcaccgacacttcctcagtatccacaggtcacaccacccctcttcttgtcaccgacgcttcgtcagtatccacaggtgacaccacccgtcttcctgtcaccagcccttcctcagcatctacaggtcacaccacccctcttcatgtcaccgatgcttcctcagtatccacaggtcacaccacccctcttcctgtcaccgacacttcctcagcatccacaggtcaggccacctctcttcttgtcaccgacacttcctcagtatccacaggtgacaccacgcctcttcctgtcactagcacttcctcagcatccacaggtcacgtcactcctcttcatgtcaccagcccttcctcagcatccacaggtcacgccacccctcttcctgtcaccagcctttcctcagcatccacaggtgacaccacccctcttcctgtcaccgacacttcctcagtatccacaggtcacaccacccctcttcctgtcaccagcccttcctcagcatctacaggtcacaccacccctcttcctgtcaccgacacttcctcagcatccaaaggtgacaccacccctcttcctgtcaccagcccttcctcagcatctacaggtcacaccacccctcttcctgtcaccgacacttcctcagcatccacaggtgacaccacccctcttcctgtcaccaatgcttcctcattatccacaggtcacgccacccctcttcatgtcaccagcccttcctcagcatccacaggtcacgccacccctcttcctgtcaccagcacttcctcagcatccaccggtcacgccacccctcttcctgtcaccagcacttcctcagcatccaccggtcacgccacccctcttcctgtcaccgacaattcctcagtatccacaggtcatgccacccctcttcctgtcaccggcctttcctcagctaccacagatgacaccacccgtcttcctgtcaccgacgtgtcctcggcatccacaggtcaggccacccctcttcctgtcaccagcctttcctcagtatccacaggtgacaccacgcctcttcctgtcactagcccttcctcagcatccacaggtcacgccagccctcttcttgtcactgacgcttcctcagcatccacaggtcaggccacccctcttcctgtcaccgacacttcctcagtatccacagctcacgccaccccacttcctgtcaccggcctttcctcagcttccacagatgacaccacccgtcttcctgtcaccgacgtttcctcggcatccacaggtcaggccatccctcttcctgtcaccagcccttcctcagcatccacaggtgacaccacccctcttcctgtcaccgacgcttcctcagcatccacaggtgacaccacctctcttcctgtcaccatcccttcctcagcatcttcaggtcacaccacctctcttcctgtcaccgacgcttcctcagtgtccacaggtcacgccacctctcttcttgtcaccgacgcttcctcagtatccacaggtgacaccacccctcttcctgtcaccgacactaactcagcatccacaggtgacaccacccctcttcatgtcaccgacgcttcctcagtatccacaggtcacgccacctctcttcctgtcaccagcctttcctcagcatccacaggtgacaccacgcctcttcctgtcactagcccttcctcagcatcctcaggtcacaccacctctcttcctgtcaccgacgcttcctcagtgtccacaggtcacgccacctctcttcctgtcaccatcccttcctcagcatcctcaggtcacaccacccctcttcctgtcaccgacgcttcctcagtacccacaggtcacgccacctctcttcctgtcaccgacgcttcctcagtgtccacaggtcacgccacccctcttcctgtcaccgacgcttcctcagtgtccacaggtcatgccacccctcttccggtcaccgacacttcctcagtatctacaggacaggccacccctcttcctgtcaccagcctttcctcagcatcatccactggtgacaccacgccgcttcctgtcactgatacttcctcagcatccacaggtcaggacacccctcttcctgtcaccagccttttctcagtatccacaggtgacaccacgcctcttcctgtcactagcccttcctcagcatccacaggtcacgccacccatcttcttgtcaccgacgcttcctcagtatccacaggtcacgccacctctcttcttgtcaccgacgcttcctcagtatccacaggtcacgccaccgctcttcatgtcaccgatgcttcctcattatccacaggggacaccacccctcttcctgtcaccagcccttcctcagcatccacaggtgacaccacccctcttcctgtcaccgacacttcctcagtatccacaggtcacgccacctctcttcctgtcactgacacttcctcagcatccacaggtcacgccacctctcttcctgtcaccgacacttcctcagcatccacaggtcaggccacccctcttcctgtcaccagcccttcctcagcatccacaggtcacgccatccctcttcttgtcaccgacacttcctcagcatccacaggacaggccacccctcttcctgtcaccagcctttcctcagcatccacaggtgacaccacccctcttcctgtcaccgatgcttcctcagtgtccacaggtcacgccacctctcttcctgtcaccagcctttcctcagtatccacaggtgacaccacccctcttcctgtcactagcccttcctcagcatccacaggtcacgccacccctcttcatgtcaccagcccttcctcagcatccacaggtcacgccacccctcttcctgtcaccagcctttcctcagcatccacaggtgacaccacgcctcttcctgtcactagcccttcctcagcatccacaggtcacgccacccctcttcatgtcaccgacgcttcctcagtatccacaggtgacaccacccctcttcctgtcaccagcccttcctcagcatcctcaggtcacaccacccctcttcctgtcaccgacgcttcctcagcatccacaggtgacaccacccctcttcctgtcaccgacacttcctcagcatccacaggtcacgccacccatcttcctgtcaccggcctttcctcagcttccacaggtgacaccacccgtcttcctgtcaccgacgtttcctcggcatccacaggtcatgccacccctcttcctgtcaccagcacttcctcagcatccacaggtgacaccacccctcttcctggcaccgacacttcctcagtatccacaggtcacaccacccctcttcttgtcaccgacgcttcgtcagtatccacaggtgacaccacccgtcttcctgtcaccagcccttcctcagcatctacaggtcacaccacccctctacctgtcaccgacactccctcagcatccacaggtgacaccacccctcttcctgtcaccaatgcttcctcattatccacacgtcacgccacctctcttcatgtcaccagcccttcctcagcatccaccggtcacgccacccctcttcctgttaccgacacttccgcagcatccacaggtcacgccacccctcttcctgtcaccagcacttcctcagcatccacaggtgacaccacccctcttcctgtcaccgacacttcctcagcatccacaggtcacgccacccctcttcctgtcaccaacacttcctcagtatccacaggtcacgccacccctcttcatgtcaccagcccttcctcagcatccacaggtcacaccacccctcttcctgtcaccgacgcttcgtcagtgtccacaggtcacgccacctctcttcctgtcaccgacgcttcctcagtgtccacaggtcacgccacccctcttcctgtcaccgacgcttcctcagtgtccacaggtcacgctacccctcttcctctcaccagcctttcctcagtatccacaggtgacaccacgcctcttcctgtcaccgacacttcctcagcatccacaggtcaggccacccctcttcctgtcaccagcctttcctcagtatccacaggtgacaccacccctcttcctgtcaccgacacttcctcagcatccacaggtcacgccacctctcttcctgtcaccgacacttcctcagcatccacaggtcacgccacccctcttcctgtcaccgacacttcctcaatatccacaggtcacgccacccctcttcatgtcaccagcccttcctcagcatccaccggtcacgccaccccgcttcctgtcaccgacacttcctcagcatccacaggtcacgccacccctcttcctgtcaccagcctttcctcagtatccacaggtgacaccacgcctcttcctgtcactagcccttcctcagcatccacaggtcacgccactcctcttcttgtcaccgacgcttcctcagcatccacaggtcaggccacccctcttcctgtcaccagcctttcctcagtatccacaggtgacaccacgcctcttcctgtcactagcccttcctcagcatccaccggtcatgccacctctcttcctgtcaccgacacttcctcagcatccacaggtgacaccacctctcttcctgtcaccgacacttcctcagcatacacaggtgacaccacctctcttcctgtcaccgacacttcctcatcatccacaggtgacaccacccctcttcttgtcaccgagacttcctcagcatccacaggtgacaccacccctgtgcctgtcaccgacacttcctcagtatccacaggtcacgccacccctcttcctgtcaccggcctttcctcagcttccacaggtgacaccacccgtcttcctgtcaccgacatttcctcggcatccacaggtcaggccacccctcttcctgtcaccaacacttcctcagtatccacaggtgacaccatgcctcttcctgtcactagcccttcctcagcatccacaggtcacgccacccctcttcctgtcaccagcacttcctcagcatccaccggtcacgccacccctgttcctgtcaccagcacttccttagcatccacaggtcacaccacccctcttcctgtcaccagcccttcctcagcatctacaggtcacaccacccctcttcctgtcaccgacacttcctcagcatccacaggtgacaccacccctcttcctgtcaccaatgcttcctcattatccacaggacacaccacccctcttcatgtcaccatcccttcctcagcatccacaggtgacaccagcactcttcctgtcaccggcgcttcctcagcatccaccggtcacgccacccctcttcctgtcaccgacacttcctcagtatccacaggtcacgccacccctcttcctgtcaccagcttttcctcagtatccacaggtgacaccacccctcttcctgtcaccgacgcttcctcggcatccaccggtcacgccacccctcttcctgtcaccgacacttcctcagcatccacaggtgacaccacccctcttcctgtcaccgacgcttcctcggcatccacaggtcaggccacccctcttcctgtcaccagcctttcctcagtatcaacaggtgacaccacgcctcttcctgtcaccatcccttcctcagcatcctcaggtcacaccacctctcttcctgtcagcgacacttcctcagcatccacaggtcaggccacccctcttcctgtcaccagcctttcctcagtatccacaggtgacaccacccctcttcttgtcaccgacgcttcctcagtatccacaggtcacgccacccctcttcctgtcaccgacacttcctcagcatccacaggtgacaccacccgtcttcctgtcacggacacttcctcagcatccacaggtcaggccacccctcttcctgtcaccagcctttcctcagtatccacaggtgacaccacccctcttcttgtcaccaacacttcctcagtatccacaggtcacgccacctctcttcctgtcaccatcccttcctcatcatcctcaggtcacaccacccctcttcctgtcaccagcacttcctcagtatctacaggtcacgtcacccctcttcatgtcaccagcccttcctcatcatccacaggtcaggccacccctcttcctgtcaccagcacttcctcagtatctacaggtcacgtcacccctcttcatgtcaccagcccttcctcagcatccacaggtcacgccacccctcttcctgtcaccagcacttcctcagcatccacaggtcacgccacccctcttcctgtcaccgacgcttcctcagtgtccacaggtcacgccacgcctcttcctgtcaccgacacttcctcagcatccacaggtgacaccacccctcttcctgtcaccgacacttcctcagcatccacaggtcaggccacccctcttcctgtcaccagcctttcctcagtatccacaggtcacgccacccctcttgctgtcagcagtgctacctcagcttccacagtatcctcggactcccctctgaagatggaaacatcaggaatgacaacaccgtcactgaagacagacggtgggagacgcacagccacatcaccaccccccacaacctcccagaccatcatttccaccattcccagcactgccatgcacacccgctccacagctgcccccatccccatcctgcctgagagaggtgaggccatacaggagtttccctcttcccctatggggcagacgccggggacctggagttcgtcaggaggaccgtggacttcacctccccactcttcaagccggcgactggcttcccccttggctcctctctccgtgattccctctacttcacagacaatggccagatcatcttcccagagtcagactaccagattttctcctaccccaacccactcccaacaggcttcacaggccgggaccctgtggccctggtggctccgttctgggacgatgctgacttctccactggtcgggggaccacattttatcaggaatacgagacgttctatggtgaacacagcctgctagtccagcaggccgagtcttggattagaaagatgacaaacaacgggggctacaaggccaggtgggccctaaaggtcacgtgggtcaatgcccacgcctatcctgcccagtggaccctcgggagcaacacctaccaagccatcctctccacggacgggagcaggtcctatgccctgtttctctaccagagcggtgggatgcagtgggacgtggcccagcgctcaggcaacccggtgctcatgggcttctctagtggagatggctatttcgaaaacagcccactgatgtcccagccagtgtgggagaggtatcgccctgatagattcctgaattccaactcaggcctccaagggctgcagttctacaggctacaccgggaagaaaggcccaactaccgtctcgagtgcctgcagtggctgaagagccagcctcggtggcccagctggggctggaaccaggtctcctgcccttgttcctggcagcagggacgacgggacttacgattccaacccgtcagcataggtcgctggggcctcggcagtaggcagctgtgcagcttcacctcttggcgaggaggcgtgtgctgcagctacgggccctggggagagtttcgtgaaggctggcacgtgcagcgtccttggcagttggcccaggaactggagccacagagctggtgctgccgctggaatgacaagccctacctctgtgccctgtaccagcagaggcggccccacgtgggctgtgctacatacaggcccccacagcccgcctggatgttcggggacccccacatcaccaccttggatggtgtcagttacaccttcaatgggctgggggacttcctgctggtcggggcccaagacgggaactcctccttcctgcttcagggccgcaccgcccagactggctcagcccaggccaccaacttcatcgcctttgcggctcagtaccgctccagcagcctgggccccgtcacggtccaatggctccttgagcctcacgacgcaatccgtgtcctgctggataaccagactgtgacatttcagcctgaccatgaagacggcggaggccaggagacgttcaacgccaccggagtcctcctgagccgcaacggctctgaggtctcggccagcttcgacggctgggccaccgtctcggtgatcgcgctctccaacatcctccacgcctccgccagcctcccgcccgagtaccagaaccgcacggaggggctcctgggggtctggaataacaatccagaggacgacttcaggatgcccaatggctccaccattcccccagggagccctgaggagatgcttttccactttggaatgacctggcagatcaacgggacaggcctccttggcaagaggaatgaccagctgccttccaacttcacccctgttttctactcacaactgcaaaaaaacagctcctgggctgaacatttgatctccaactgtgacggagatagctcatgcatctatgacaccctggccctgcgcaacgcaagcatcggacttcacacgagggaagtcagtaaaaactacgagcaggcgaacgccaccctcaatcagtacccgccctccatcaatggtggtcgtgtgattgaagcctacaaggggcagaccacgctgattcagtacaccagcaatgctgaggatgccaacttcacgctcagagacagctgcaccgacttggagctctttgagaatgggacgttgctgtggacacccaagtcgctggagccattcactctggagattctagcaagaagtgccaagattggcttggcatctgcactccagcccaggactgtggtctgccattgcaatgcagagagccagtgtttgtacaatcagaccagcagggtgggcaactcctccctggaggtggctggctgcaagtgtgacgggggcaccttcggccgctactgcgagggctccgaggatgcctgtgaggagccgtgcttcccgagtgtccactgcgttcctgggaagggctgcgaggcctgccctccaaacctgactggggatgggcggcactgtgcggctctggggagctctttcctgtgtcagaaccagtcctgccctgtgaattactgctacaatcaaggccactgctacatctcccagactctgggctgtcagcccatgtgcacctgccccccagccttcactgacagccgctgcttcctggctgggaacaacttcagtccaactgtcaacctagaacttcccttaagagtcatccagctcttgctcagtgaagaggaaaatgcctccatggcagaagtcaacgcctcggtggcatacagactggggaccctggacatgcgggcctttctccgcaacagccaagtggaacgaatcgattctgcagcaccggcctcgggaagccccatccaacactggatggtcatctcggagttccagtaccgccctcggggcccggtcattgacttcctgaacaaccagctgctggccgcggtggtggaggcgttcttataccacgttccacggaggagtgaggagcccaggaacgacgtggtcttccagcccatctccggggaagacgtgcgcgatgtgacagccctgaacgtgagcacgctgaaggcttacttcagatgcgatggctacaagggctacgacctggtctacagcccccagagcggcttcacctgcgtgtccccgtgcagtaggggctactgtgaccatggaggccagtgccagcacctgcccagtgggccccgctgcagctgtgtgtccttctccatctacacggcctggggcgagcactgtgagcacctgagcatgaaactcgacgcgttcttcggcatcttctttggggccctgggcggcctcttgctgctgggggtcgggacgttcgtggtcctgcgcttctggggttgctccggggccaggttctcctatttcctgaactcagctgaggccttgccttgaaggggcagctgtggcctaggctacctcaagactcacctcatccttaccgcacatttaaggcgccattgcttttgggagactggaaaagggaaggtgactgaaggctgtcaggattctt

SEQ ID NO: 155683 - DNA, 16332 bp, Homo sapiens
  Payload ID: 10597
  Gene Symbol: MUC4
  Gene Name: mucin 4, cell surface associated
  ENST ID: ENST00000629826
  CDS Start-End: 1-13121
gaaccacagaggacacattaataactggaagtaaaactgctgccccagtcacctcaacaggctcaacaacagcgacactagagggacaatcaactgcagcttcttcaaggacctctaatcaggacatatcagcttcatctcagaaccaccagactaagagcacggagaccaccagcaaagctcaaaccgacaccctcacgcagatgatgacatcaactcttttttcttccccaagtgtacacaatgtgatggagacagctcctccagatgaaatgaccacatcatttccctccagtgtcaccaacacactcatgatgacatcaaagactataacaatgacaacctccacagactccactcttggaaacacagaagagacatcaacagcaggaactgaaagttctaccccagtgacctcagcagtctcaataacagctggacaggaaggacaatcacgaacaacttcctggaggacctctatccaagacacatcagcttcttctcagaaccactggactcggagcacgcagaccaccagggaatctcaaaccagcaccctaacacacagaaccacttcaactccttctttctctccaagtgtacacaatgtgacagggactgtttctcagaagacatctccttcaggtgaaacagctacctcatccctctgtagtgtcacaaacacatccatgatgacatcagagaagataacagtgacaacctccacaggctccactcttggaaacccaggggagacatcatcagtacctgttactggaagtcttatgccagtcacctcagcagccttagtaacatttgatccagaaggacaatcaccagcaactttctcaaggacttctactcaggacacaacagctttttctaagaaccaccagactcagagcgtggagaccaccagagtatctcaaatcaacaccctcaacaccctcacaccggttacaacatcaactgttttatcctcaccaagtggattcaacccaagtggaacagtttctcaggagacattcccttctggtgaaacaaccacctcatccccttccagtgtcagcaatacattcctggtaacatcaaaggtgttcagaatgccaacctccagagactctactcttggaaacacagaggagacatcactatctgtaagtggaaccatttctgcaatcacttccaaagtttcaaccatatggtggtcagacactctgtcaacagcactctcccccagttctctacctccaaaaatatccacagctttccacacccagcagagtgaaggtgcagagaccacaggacggcctcatgagaggagctcattctctccaggtgtgtctcaagaaatatttactctacatgaaacaacaacatggccttcctcattctccagcaaaggccacacaacttggtcacaaacagaactgccctcaacatcaacaggtgctgccactaggcttgtcacaggaaatccatctacagggacagctggcactattccaagggtcccctctaaggtctcagcaataggggaaccaggagagcccaccacatactcctcccacagcacaactctcccaaaaacaacaggggcaggcgcccagacacaatggacacaagaaacggggaccactggagaggctcttctcagcagcccaagctacagtgtgactcagatgataaaaacggccacatccccatcttcttcacctatgctggatagacacacatcccaacaaattacaacggcaccatcaacaaatcattcaacaatacattccacaagcacctctcctcaggaatcaccagctgtttcccaaaggggtcacactcaagccccgcagaccacacaagaatcacaaaccacgaggtccgtctcccccatgactgacaccaagacagtcaccaccccaggttcttccttcacagccagtgggcactcgccctcagaaattgttcctcaggacgcacccaccataagtgcagcaacaacctttgccccagctcccaccggggatggtcacacaacccaggccccgaccacagcactgcaggcagcacccagcagccatgatgccaccctggggccctcaggaggcacgtcactttccaaaacaggtgcccttactctggccaactctgtagtgtcaacaccagggggcccagaaggacaatggacatcagcctctgccagcacctcacctgacacagcagcagccatgacccatacccaccaggctgagagcacagaggcctctggacaaacacagaccagcgaaccggcctcctcagggtcacgaaccacctcagcgggcacagctaccccttcctcatccggggcgagtggcacaacaccttcaggaagcgaaggaatatccacctcaggagagacgacaaggttttcatcaaacccctccagggacagtcacacaacccagtcaacaaccgaattgctgtccgcctcagccagtcatggtgccatcccagtaagcacaggaatggcgtcttcgatcgtccccggcacctttcatcccaccctctctgaggcctccactgcagggagaccgacaggacagtcaagcccaacttctcccagtgcctctcctcaggagacagccgccatttcccggatggcccagactcagaggacaagaaccagcagagggtctgacactatcagcctggcgtcccaggcaaccgacaccttctcaacagtcccacccacacctccatcgatcacatccactgggcttacatctccacaaaccgagacccacactctgtcaccttcagggtctggtaaaaccttcaccacggccctcatcagcaacgccacccctcttcctgtcacctacgcttcctcggcatccacaggtcacaccacccctcttcatgtcaccgatgcttcctcagtatccacaggtcacgccacccctcttcctgtcaccagcccttcctcagtatccacaggtcacaccacccctcttcctgtcaccgacacttcctcagaatccacaggtcacgtcacccctcttcctgtcaccagcttttcctcagcatccacaggtgacagcacccctcttcctgtcactgacacttcctcagcatccacaggtcacgtcacccctcttcctgtcaccagcctttcctcagcatccacaggtgacaccacccctcttcctgtcactgacacttcctcagcatccacaggtcacgccacctctcttcctgtcaccgacacttcctcagtatccacaggtcacaccacccctcttcctgtcaccgacacttcctcagcatccacaggtcacgccacctctcttcctgtcaccgacacttcctcagtatccacaggtcacaccacccctcttcatgtcactgatgcttcctcagcatccacaggtcaggccacccctcttcctgtcaccagcctttcctcagtatccacaggtgacaccacgcctcttcctgtcactagcccttcctcagcatccacaggtcacgccacccctcttcttgtcaccgacacttcctcagcatccacaggacacgccacccctcttcctgtcaccgacgcttcctcagtgtccacagatcacgccacctctcttcctgtaaccatcccttccgcagcatccacaggtcacaccacccctcttcctgtcaccgacacttcctcagcatccacaggtcaggccacctctcttcttgtcaccgacacttcctcagtatccacaggtgacaccacgcctcttcctgtcactagcacttcctcagcatccacaggtcacgtcactcctcttcatgtcaccagcccttcctcagcatccacaggtcacgccacccctcttcctgtcaccagcctttcctcagcatccacaggtgacaccatgcctcttcctgtcactagcccttcctcagcatccacaggtgacaccacccctcttcctgtcaccgacgcttcctcagtatccacaggtcacaccacccctcttcatgtcactgatgcttcctcagcatccacaggtcaggccacccctcttcctgtcaccagcctttcctcagtatccacaggtgacaccacgcctcttcctgtcactagcccttcctcagcatccacaggtcacgccacccctcttcttgtcaccgacacttcctcagcatccacaggacacgccacccctcttcctgtcaccgacgcttcctcagtgtccacagatcacgccacctctcttcctgtaaccatcccttccgcagcatccacaggtcacaccacccctcttcctgtcaccgacacttcctcagcatccacaggtcaggccacctctcttcttgtcaccgacacttcctcagtatccacaggtgacaccacgcctcttcctgtcactagcacttcctcagcatccacaggtcacgtcactcctcttcatgtcaccagcccttcctcagcatccacaggtcacgccacccctcttcctgtcaccagcctttcctcagcatccacaggtgacaccatgcctcttcctgtcactagcccttcctcagcatccacaggtgacaccacccctcttcctgtcaccgacgcttcctcagtatccacaggtcacaccacccctcttcctgtcaccagcccttcctcagcatctacaggtcacaccacccctcttcctgtcaccgacacttcctcagcatccaaaggtgacaccacccctcttcctgtcaccagcccttcctcagcatctacaggtcacaccacccctcttcctgtcaccgacacttcctcagcatccacaggtgacaccacccctcttcctgtcaccaatgcttcctcattatccacaggtcacgccacccctcttcatgtcaccagcccttcctcagcatccacaggtcacgccacccctcttcctgtcaccagcacttcctcagcatccaccggtcacgccacccctcttcctgtcaccggcctttcctcagctaccacagatgacaccacccgtcttcctgtcaccgacgtttcctcggcatccacaggtcaggccacccctcttcctgtcaccagcctttcctcagtatccacaggtgacaccacgcctcttcctgtcactagcccttcctcagcatccacaggtcacgccagccctcttcttgtcactgacgcttcctcagcatccacaggtcaggccacccctcttcctgtcaccgacacttcctcagtatccacagctcacgccaccccacttcctgtcaccggcctttcttcagcttccacagatgacaccacccgtcttcctgtcaccgacgtttcctcggcatccacaggtcaggccatccctcttcctgtcaccagcccttcctcagcatccacaggtgacaccacccctcttcctgtcaccgacgcttcctcagcatccacaggtgacaccacctctcttcctgtcaccatcccttcctcagcatcttcaggtcacaccacctctcttcctgtcaccgacgcttcctcagtgtccacaggtcacgccacctctcttcttgtcaccgacgcttcctcagtatccacaggtgacaccacccctcttcctgtcaccgacactaactcagcatccacaggtgacaccacccctcttcatgtcaccgacgcttcctcagtatccacaggtcacgccacctctcttcctgtcaccagcctttcctcagcatccacaggtgacaccacgcctcttcctgtcactagcccttcctcagcatcctcaggtcacaccacccctcttcctgtcaccgacgcttcctcagtacccacaggtcacgccacctctcttcctgtcaccgacgcttcctcagtgtccacaggtcacgccacccctcttcctgtcaccgacgcttcctcagtgtccacaggtcatgccacccctcttccggtcaccgacacttcctcagtatctacaggacaggccacccctcttcctgtcaccagcctttcctcagcatccactggtgacaccacgccgcttcctgtcaccgatacttcctcagcatccacaggtcaggacacccctcttcctgtcaccagcctttcctcagtatccacaggtgacaccacgcctcttcctgtcactaacccttcctcagcatccacaggtcacgccacccctcttcttgtcaccgacgcttcctcaatatccacaggtcacgccacctctcttcttgtcaccgacgcttcctcagtatccacaggtcacgccaccgctcttcatgacaccgatgcttcctcattatccacaggggacaccacccctcttcctgtcaccagcccttcctcaacatccacaggtgacaccacccctcttcctgtcaccgaaacttcctcagtatccacaggtcacgccacctctcttcctgtcaccgacacttcctcagcatccacaggtcacgccacctctcttcctgtcaccgacacttcctcagcatccacaggtcacgccacccctcttcctgtcaccgacacttcctcagcatccacaggtcaggccacccctcttcctgtcaccagcccttcctcagcatccacaggtcacgccatccctcttcttgtcaccgacacttcctcagcatccacaggacaggccacccctcttcctgtcaccagcctttcctcagcatccacaggtgacaccacccctcttcctgtcaccgacgcttcctcagtgtccacaggtcacgccacctctcttcctgtcaccagcctttcctcagtatccacaggtgacaccactcctcttcctgtcactagcccttcctcagcatccacaggtcacgccacccctcttcatgtcaccgacgcttcctcagcatccacaggtcacgccacccctcttcctgtcaccagcctttcctcagcatccacaggtgacaccacgcctcttcctgtcactagcccttcctcagcatccacaggtcacgccacccctcttcatgtcaccgacgcttcctcagtatccacaggtgacaccacccctcttcctgtcaccagctcttcctcagcatcctcaggtcacaccacccctcttcctgtcaccgacgcttcctcagcatccacaggtgacaccacccctcttcctgtcaccgacacttcctcagcatccacaggtcacgccacccatcttcctgtcaccggcctttcctcagcttccacaggtgacaccacccgtcttcctgtcaccaacgtttcctcggcatccacaggtcatgccacccctcttcctgtcaccagcacttcctcagcatccacaggtgacaccacccctcttcctggcaccgacacttcctcagtatccacaggtcacaccacccctcttcttgtcaccgacgcttcgtcagtatccacaggtgacaccacccgtcttcctgtcaccagcccttcctcagcatctacaggtcacaccacccctctacctgtcaccgacactccctcagcatccacaggtgacaccacccctcttcctgtcaccaatgcttcctcattatccacacgtcacgccacctctcttcatgtcaccagcccttcctcagcatccacaggtcacgccacctctcttcctgtcaccgacacttccgcagcatccacaggtcacgccacccctcttcctgtcaccagcacttcctcagcatccacaggtgacaccacccctcttcctgtcaccgacacttactcagcatccacaggtcaggccacccctcttcctgtcaccagcctttcctcagtatccacaggtgacaccacgcctcttcctgtcactagcccttcctcagcatccacaggtcacgccactcctcttcttgtcaccgacgcttcctcagcatccacaggtcaggccacccctcttcctgtcaccagcctttcctcagtatccacaggtgacaccacgcctcttcctgtcactagcccttcctcagcatccaccggtcatgccacctctcttcctgtcaccgacacttcctcagcatccacaggtgacaccacctctcttcctgtcaccgacacttcctcagcatacacaggtgacaccacctctcttcctgtcaccgacacttcctcatcatccacaggtgacaccacccctcttcttgtcaccgagacttcctcagtatccacaggtgacaccacccctcttcctgtcaccgacacttcctcagcatccacaggtcacgccacccctcttcctgtcaccaacacttcctcagtatccacaggtcacgccacccctcttcatgtcaccagcccttcctcagcatccacaggtcacaccacccctcttcctgtcaccgacgcttcgtcagtgtccacaggtcacgccacctctcttcctgtcaccgacgcttcctcagtgttcacaggtcatgccacctctcttcctgtcaccatcccttcctcagcatcctcaggtcacaccacccctcttcctgtcaccgacgcttcctcagtgtccacaggtcacgccacctctcttcctgtcaccgacgcttcctcagtgtccacaggtcatgccacccctcttcctgtcaccgacgcttcctcagtgtccacaggtcacgctacccctcttcctctcaccagcctttcctcagtatccacaggtgacaccacgcctcttcctgtcaccgacacttcctcagcatccacaggtcaggccacccctcttcctgtcaccagcctttcctcagtatccacaggtgacaccacccctcttcctgtcaccgacacttcctcagcatccacaggtcacgccacctctcttcctgtcaccgacacttcctcagcatccacaggtcacgccacccctcttcctgacaccgacacttcctcagcatccacaggtcacgccacccttcttcctgtcaccgacacttcctcagcatccataggtcacgccacctctcttcctgtcaccgacacttcctcaatatccacaggtcacgccacccctcttcatgtcaccagcccttcctcagcatccaccggtcacgccaccccgcttcctgtcaccgacacttcctcagcatccacaggtcacgccaaccctcttcatgtcaccagcccttcctcagcatccaccggtcacgccaccccgcttcctgtcaccgacacttcctcagcatccacaggtcacgccacccctcttcctgtcaccagcctttcctcagtatccacaggtgacaccacgcctcttcctgtcactagcccttcctcagcatccacaggtcacaccacccctcttcctgtcaccgacacttcctcagcatccacaggtcaggccaccgctcttcctgtcaccagcacttcctcagcatccacaggtgacaccacccctcttcctgtcaccgacacttcctcagcatccacaggtcaggccacccctcttcctgtcaccagcctttcctcagtatccacaggtgacaccacgcctcttcctgtcactagcccttcctcagcatccacaggtcacgccactcctcttcttgtcaccgacgcttcctcagcatccacaggtcaggccacccctcttcctgtcaccagcctttcctcagtatccacaggtgacaccacgcctcttcctgtcactagcccttcctcagcatccaccggtcatgccacctctcttcctgtcaccgacacttcctcagcatccacaggtgacaccacctctcttcctgtcaccgacacttcctcagcatacacaggtgacaccacctctcttcctgtcaccgacacttcctcatcatccacaggtgacaccacccctcttcttgtcaccgagacttcctcagtatccacaggtcacgccactcctcttcttgtcaccgacgcttcctcagcatccacaggtcacgccacccctcttcatgtcaccagcccttcctcagcatccacaggtgacaccacccctgtgcctgtcaccgacacttcctcagtatccacaggtcacgccacccctcttcctgtcaccggcctttcctcagcttccacaggtgacaccacccgtcttcctgtcaccgacatttcctcggcatccacaggtcaggccacccctcttcctgtcaccaacacttcctcagtatccacaggtgacaccatgcctcttcctgtcactagcccttcctcagcatccacaggtcacgccacccctcttcctgtcaccagcacttcctcagcatccaccggtcacgccacccctgttcctgtcaccagcacttcctcagcatctacaggtcacaccacccctcttcctgtcaccgacacttcctcagcatccacaggtgacaccacccctcttcctgtcaccagcccttcctcagcatctacaggtcacaccacccctcttcatgtcaccatcccttcctcagcatccacaggtgacaccagcactcttcctgtcaccggcgcttcctcagcatccaccggtcacgccacccctcttcctgtcaccgacacttcctcagtatccaccggtcacgccacgcctcttcctgtcaccagcctttcctcagtatccacaggtgacaccacccctcttcctgtcaccgacgcttcctcggcatccacaggtcaggccacccctcttcctgtcaccagcctttcctcagtatccacaggtgacaccacccctcttcttgtcaccgacgcttcctcagtatccacaggtcacgccacccctcttcctgtcaccgacacttcctcagcatccacaggtgacaccacccgtcttcctgtcacggacacttcctcagcatccacaggtcaggccacccctcttcctgtcaccagcctttcctcagtatccacaggtgacaccacccctcttcttgtcaccgacgcttcctcagtatccacaggtcacgccacccctcttcctgtcaccgacacttcctcagcatccacaggtgacaccacccgtcttcctgtcacggacacttcctcagcatccacaggtcaggccacccctcttcctgtcaccatcccttcctcatcatcctcaggtcacaccacccctcttcctgtcaccagcacttcctcagtatctacaggtcacgtcacccctcttcatgtcaccagcccttcctcagcatccacaggtcacgtcacccctcttcctgtcaccagcacttcctcagcatccacaggtcacgccacccctcttcttgtcaccgacgcttcctcagtgtccacaggtcacgccacgcctcttcctgtcaccgacgcttcctcagcatccacaggtgacaccacccctcttcctgtcaccgacacttcctcagcatccacaggtcaggccacccctcttcctgtcaccagcctttcctcagtatccacaggtgacaccacccctcttcctgtcaccgacgcttcctcagcatccacaggtcacgccacccctcttcctgtcaccatcccttcctcagtatccacaggtgacaccatgcctcttcctgtcactagcccttcctcagcatccacaggtcacgccacccctcttcctgttaccggcctttcctcagcttccacaggtgacaccacccctcttcctgtcaccgacacttcctcagcatccacacgtcacgccacccctcttcctgtcaccgacacttcctcagcttccacagatgacaccacccgtcttcctgtcaccgacgtttcctcggcatccacaggacatgccacccctcttcctgtcaccagcacttcctcagcatccacaggtgacaccacccctcttcctgtcaccgacacttcctcagtatccacaggtcacgccacctctcttcctgtcaccagccgttcctcagcatccacaggtcacgccaccccccttcctgtcaccgacacttcctcagtatccacaggtcacgccacccctcttcctgtcaccagcacttcctcagtatctacaggtcacgccacccctcttcctgtcaccagcccttcctcagcatccacaggtcacgccacccctgttcctgtcaccagcacttcctcagcatccacaggtgacaccacccctcttcctgtcaccaatgcttcctcattatccacaggtcacgccacccctcttcatgtcaccagcccttcctcagcatccagaggtgacaccagcactcttcctgtcaccgatgcttcctcagcatccaccggtcacgccacccctcttcctctcaccagcctttcctcagtatccacaggtgacaccacgcctcttcctgtcaccgacacttcctctgcatccacaggtcaggccacccctcttcctgtcaccagcctttcctcagtatccacaggtgacaccacgcctcttcctgtcaccatcccttcctcagcatcctcaggtcacaccacctctcttcctgtcaccgacgcttcctcagtgtccacaggtcacggcacccctcttcctgtcaccagcacttcctcagcatccacaggtgacaccacccctcttcctgtcaccgacacttcctcagcatccacaggtcacgccacccctcttcctgtcaccgacacttcctcagcatccacaggtcacgccacccctcttcctgtcaccagcctttcctcagtatccacaggtcacgccacccctcttgctgtcagcagtgctacctcagcttccacagtatcctcggactcccctctgaagatggaaacaccaggaatgacaacaccgtcactgaagacagacggtgggagacgcacagccacatcaccaccccccacaacctcccagaccatcatttccaccattcccagcactgccatgcacacccgctccacagctgcccccatccccatcctgcctgagagaggagtttccctcttcccctatggggcaggcgccggggacctggagttcgtcaggaggaccgtggacttcacctccccactcttcaagccggcgactggcttcccccttggctcctctctccgtgattccctctacgcttcacaggccgggaccctgtggccctggtggctccgttctgggacgatgctgacttctccactggtcgggggaccacattttatcaggaatacgagacgttctatggtgaacacagcctgctagtccagcaggccgagtcttggattagaaagatgacaaacaacgggggctacaaggccaggtgggccctaaaggtcacgtgggtcaatgcccacgcctatcctgcccagtggaccctcgggagcaacacctaccaagccatcctctccacggacgggagcaggtcctatgccctgtttctctaccagagcggtgggatgcagtgggacgtggcccagcgctcaggcaacccggtgctcatgggcttctctagtggagatggctatttcgaaaacagcccactgatgtcccagccagtgtgggagaggtatcgccctgatagattcctgaattccaactcaggcctccaagggctgcagttctacaggctacaccgggaagaaaggcccaactaccgtctcgagtgcctgcagtggctgaagagccagcctcggtggcccagctggggctggaaccaggtctcctgcccttgttcctggcagcagggacgacgggacttacgattccaacccgtcagcataggtcgctggggcctcggcagtaggcagctgtgcagcttcacctcttggcgaggaggcgtgtgctgcagctacgggccctggggagagtttcgtgaaggctggcacgtgcagcgtccttggcagttggcccaggaactggagccacagagctggtgctgccgctggaatgacaagccctacctctgtgccctgtaccagcagaggcggccccacgtgggctgtgctacatacaggcccccacagcccgcctggatgttcggggacccccacatcaccaccttggatggtgtcagttacaccttcaatgggctgggggacttcctgctggtcggggcccaagacgggaactcctccttcctgcttcagggccgcaccgcccagactggctcagcccaggccaccaacttcatcgcctttgcggctcagtaccgctccagcagcctgggccccgtcacggtccaatggctccttgagcctcacgacgcaatccgtgtcctgctggataaccagactgtgacatttcagcctgaccatgaagacggcggaggccaggagacgttcaacgccaccggagtcctcctgagccgcaacggctctgaggtctcggccagcttcgacggctgggccaccgtctcggtgatcgcgctctccaacatcctccacgcctccgccagcctcccgcccgagtaccagaaccgcacggaggggctcctgggggtctggaataacaatccagaggacgacttcaggatgcccaatggctccaccattcccccagggagccctgaggagatgcttttccactttggaatgacctggcagatcaacgggacaggcctccttggcaagaggaatgaccagctgccttccaacttcacccctgttttctactcacaactgcaaaaaaacagctcctgggctgaacatttgatctccaactgtgacggagatagctcatgcatctatgacaccctggccctgcgcaacgcaagcatcggacttcacacgagggaagtcagtaaaaactacgagcaggcgaacgccaccctcaatcagtacccgccctccatcaatggtggtcgtgtgattgaagcctacaaggggcagaccacgctgattcagtacaccagcaatgctgaggatgccaacttcacgctcagagacagctgcaccgacttggagctctttgagaatgggacgttgctgtggacacccaagtcgctggagccattcactctggagattctagcaagaagtgccaagattggcttggcatctgcactccagcccaggactgtggtctgccattgcaatgcagagagccagtgtttgtacaatcagaccagcagggtgggcaactcctccctggagctctggggagctctttcctgtgtcagaaccagtcctgccctgtgaattactgctacaatcaaggccactgctacatctcccagactctgggctgtcagcccatgtgcacctgccccccagccttcactgacagccgctgcttcctggctgggaacaacttcagtccaactgtcaacctagaacttcccttaagagtcatccagctcttgctcagtgaagaggaaaatgcctccatggcagaagtcaacgcctcggtggcatacagactggggaccctggacatgcgggcctttctccgcaacagccaagtggaacgaatcgattctgcagcaccggcctcgggaagccccatccaacactggatggtcatctcggagttccagtaccgccctcggggcccggtcattgacttcctgaacaaccagctgctggccgcggtggtggaggcgttcttataccacgttccacggaggagtgaggagcccaggaacgacgtggtcttccagcccatctccggggaagacgtgcgcgatgtgacagccctgaacgtgagcacgctgaaggcttacttcagatgcgatggctacaagggctacgacctggtctacagcccccagagcggcttcacctgcgtgtccccgtgcagtaggggctactgtgaccatggaggccagtgccagcacctgcccagtgggccccgctgcagctgtgtgtccttctccatctacacggcctggggcgagcactgtgagcacctgagcatgaaactcgacgcgttcttcggcatcttctttggggccctgggcggcctcttgctgctgggggtcgggacgttcgtggtcctgcgcttctggggttgctccggggccaggttctcctatttcctgaactcagctgaggccttgccttgaaggggcagctgtggcctaggctacctcaagactcacctcatccttaccgcacatttaaggcgccattgcttttgggagactggaaaagggaaggtgactgaaggctgtcaggattcttcaaggagaatgaatactgggaatcaagacaagactataccttatccataggcgcaggtgcacagggggaggccataaagatcaaacatgcatggatgggtcctcacgcagacacacccacagaaggacactagcctgtgcacgcgcgcgtgcacacacacacacacacacacgagttcataatgtggtgatggccctaagttaagcaaaatgcttctgcacacaaaactctctggtttacttcaaattaactctatttaaataaagtctctctgactttttgtgtctccaaaa

SEQ ID NO: 155684 - DNA, 16119 bp, Homo sapiens; identical to SEQ ID NO: 155672
  Payload ID: 10597
  Gene Symbol: MUC4
  Gene Name: mucin 4, cell surface associated
  ENST ID: ENST00000629154
  CDS Start-End: 1-16001

SEQ ID NO: 155685 - DNA, 22419 bp, Homo sapiens
  Payload ID: 10597
  Gene Symbol: MUC4
  Gene Name: mucin 4, cell surface associated
  ENST ID: ENST00000628818
  CDS Start-End: 73-19623
gtctgctcctcacactgcagctgctgggccgtggagcttccccagggagccagggggacttttgccgcagccatgaagggggcacgctggaggagggtcccctgggtgtccctgagctgcctgtgtctctgcctccttccgcatgtggtcccaggaaccacagaggacacattaataactggaagtaaaactcctgccccagtcacctcaacaggctcaacaacagcgacactagagggacaatcaactgcagcttcttcaaggacctctaatcaggacatatcagcttcatctcagaaccaccagactaagagcacggagaccaccagcaaagctcaaaccgacaccctcacgcagatgatgacatcaactcttttttcttccccaagtgtacacaatgtgatggagactgttacgcaggagacagctcctccagatgaaatgaccacatcatttccctccagtgtcaccaacacactcatgatgacatcaaagactataacaatgacaacctccacagactccactcttggaaacacagaagagacatcaacagcaggaactgaaagttctaccccagtgacctcagcagtctcaataacagctggacaggaaggacaatcacgaacaacttcctggaggacctctatccaagacacatcagcttcttctcagaaccactggactcggagcacgcagaccaccagggaatctcaaaccagcaccctaacacacagaaccacttcaactccttctttctctccaagtgtacacaatgtgacagggactgtttctcagaagacatctccttcaggtgaaacagctacctcatccctctgtagtgtcacaaacacatccatgatgacatcagagaagataacagtgacaacctccacaggctccactcttggaaacccaggggagacatcatcagtacctgttactggaagtcttatgccagtcacctcagcagccttagtaacagttgatccagaaggacaatcaccagtaactttctcaaggacttctactcaggacacaacagctttttctaagaaccaccagactcagagcgtggagaccaccagagtatctcaaatcaacaccctcaacaccctcacaccggttacaacatcaactgttttatcctcaccaagtggattcaacccaagtggaacagtttctcaggagacattcccttctggtgaaacaaccatctcatccccttccagtgtcagcaatacattcctggtaacatcaaaggtgttcagaatgccaatctccagagactctactcttggaaacacagaggagacatcactatctgtaagtggaaccatttctgcaatcacttccaaagtttcaaccatatggtggtcagacactctgtcaacagcactctcccccagttctctacctccaaaaatatccacagctttccacacccagcagagtgaaggtgcagagaccacaggacggcctcatgagaggagctcattctctccaggtgtgtctcaagaaatatttactctacatgaaacaacaacatggccttcctcattctccagcaaaggccacacaacttggtcacaaacagaactgccctcaacatcaacaggtgctgccactaggcttgtcacaggaaatccatctacaggggcagctggcactattccaagggtcccctctaaggtctcagcaataggggaaccaggagagcccaccacatactcctcccacagcacaactctcccaaaaacaacaggggcaggcgcccagacacaatggacacaagaaacggggaccactggagaggctcttctcagcagcccaagctacagtgtgactcagatgataaaaacggccacatccccatcttcttcacctatgctggatagacacacatcacaacaaattacaacggcaccatcaacaaatcattcaacaatacattccacaagcacctctcctcaggaatcaccagctgtttcccaaaggggtcacactcaagccccgcagaccacacaagaatcacaaaccacgaggtccgtctcccccatgactgacaccaagacagtcaccaccccaggttcttccttcacagccagtgggcactcgccctcagaaattgttcctcaggacgcacccaccataagtgcagcaacaacctttgccccagctcccaccggggatggtcacacaacccaggccccgaccacagcactgcaggcagcacccagcagccatgatgccaccctggggccctcaggaggcacgtcactttccaaaacaggtgcccttactctggccaactctgtagtgtcaacaccagggggcccagaaggacaatggacatcagcctctgccagcacctcacctgacacagcagcagccatgacccatacccaccaggctgagagcacagaggcctctggacaaacacagaccagcgaaccggcctcctcagggtcacgaaccacctcagcgggcacagctaccccttcctcatccggggcgagtggcacaacaccttcaggaagcgaaggaatatccacctcaggagagacgacaaggttttcatcaaacccctccagggacagtcacacaacccagtcaacaaccgaattgctgtccgcctcagccagtcatggtgccatcccagtaagcacaggaatggcgtcttcgatcgtccccggcacctttcatcccaccctctctgaggcctccactgcagggagaccgacaggacagtcaagcccaacttctcccagtgcctctcctcaggagacagccgccatttcccggatggcccagactcagaggacaagaaccagcagagggtctgacactatcagcctggcgtcccaggcaaccgacaccttctcaacagtcccacccacacctccatcgatcacatccagtgggcttacatctccacaaacccagacccacactctgtcaccttcagggtctggtaaaaccttcaccacggccctcatcagcaacgccacccctcttcctgtcacctacgcttcctcggcatccacaggtcacaccacccctcttcatgtcaccgatgcttcctcagtatccacaggtcacgccacccctcttcctgtcaccgacacttcctcagaatccacaggtcacgccacccctcttcctgtcaccagcccttcctcagtatccacaggtcacaccacccctcttcctgtcaccgacacttcctcagaatccacaggtcatgtcacccctcttcctgtcaccagcctttcctcagcatccacaggtgacagcacccctcttcctgtcactgacacttcctcagcatccacaggtcacgtcacccctcttcctgtcaccagcctttcctcagcatccacaggtgacaccacccctcttcctgtcactgacacttcctcagcatccacaggtcacgccacctctcttcctgtcaccgacacttcctcagtatccacaggtcacaccacccctcttcctgtcaccgacacttcctcagcatccacaggtcacgccacctctcttcctgtcaccgacacttcctcagtatccacagctcacgccaccccacttcctgtcaccggcctttcttcagcttccacagatgacaccacccgtcttcctgtcaccgacgtttcctcggcatccacaggtcaggccatccctcttcctgtcaccagcccttcctcagcatccacaggtgacaccacccctcttcctgtcaccgacgcttcctcagcatccacaggtgacaccacctctcttcctgtcaccatcccttcctcagcatcttcaggtcacaccacctctcttcctgtcaccgacgcttcctcagtgtccacaggtcacgccacctctcttcttgtcaccgacgcttcctcagtatccacaggtgacaccacccctcttcctgtcaccgacactaactcagcatccacaggtgacaccacccctcttcatgtcaccgacgcttcctcagtatccacaggtcacgccacctctcttcctgtcaccagcctttcctcagcatccacaggtgacaccacgcctcttcctgtcactagcccttcctcagcatcctcaggtcacaccacccctcttcctgtcaccgacgcttcctcagtacccacaggtcacgccacctctcttcctgtcaccgacgcttcctcagtgtccacaggtcacgccacccctcttcctgtcaccgacgcttcctcagtgtccacaggtcatgccacccctcttccggtcaccgacacttcctcagtatctacaggacaggccacccctcttcctgtcaccagcctttcctcagcatccactggtgacaccacgccgcttcctgtcaccgatacttcctcagcatccacaggtcaggacacccctcttcctgtcaccagcctttcctcagtatccacaggtgacaccacgcctcttcctgtcactagcccttcctcagcatccacaggtcacgccacccctcttcttgtcaccgacgcttcctcagtatccacaggtcacgccacctctcttcttgtcaccgacgcttcctcagtatccacaggtcacgccaccgctcttcatgtcaccgatgcttcctcattatccacaggggacaccacccctcttcctgtcaccagcccttcctcagcatccacaggtgacaccacccctcttcctgtcaccgacacttcctcagcatccacaggtcacgccacctctcttcctgtcaccgacacttcctcagcatccacaggtcacgccacccctcttcctgtcaccgacacttcctcagcatccacaggtcaggccacccctcttcctgtcaccggcccttcctcagcatccacaggtcacgccatccctcttcttgtcaccgacacttcctcagcatccacaggacaggccacccctcttcctgtcaccagcctttcctcagcatccacaggtgacaccacccctcttcctgtcaccgacgcttcctcagtgtccacaggtcacgccacctctcttcctgtcaccagcctttcctcagtatccacaggtgacaccacccctcttcctgtcaccagcccttcctcagcatcctcaggtcacaccacccctcttcctgtcaccgacgcttcctcagtatccacaggtgacaccacccctcttcctgtcaccagcccttcctcagcatcctcaggtcacaccacccctcttcctgtcaccagcccttcctcagcatcctcaggtcacaccacccctcttcctgtcaccgacgcttcctcagcatccacaggtgacaccacccctcttcctgtcaccgacacttcctcagcatccacaggtcacgccacccatcttcctgtcaccggcctttcctcagcttccacaggtgacaccacccgtcttcctgtcaccaacgtttcctcggcatccacaggtcatgccacccctcttcctgtcaccagcacttcctcagcatccacaggtgacaccacccctcttcctggcaccgacacttcctcagtatccacaggtcacaccacccctcttcttgtcaccgacgcttcgtcagtatccacaggtgacaccacccgtcttcctgtcaccagcccttcctcagcatctacaggtcacaccacccctctacctgtcaccgacactccctcagcatccacaggtgacaccacccctcttcctgtcaccaatgcttcctcattatccacacgtcacaccacctctcttcatgtcaccagcccttcctcagcatccacaggtcacgccacctctcttcctgtcaccgacacttcctcagtatccacaggtcatgccacccctcttcatgtcaccagcccttcctcagcatccacaggtgacaccacccctcttcctgtcaccgacacttactcagcatccacaggtcaggccacccctcttcctgtcaccgacacttcctcagcatccacaggtgacaccacccctcttcctgtcaccgacacttcctcagcatccacaggtcacgccacccctcttcctgtcaccaacacttcctcagtatccacaggtcacgccacccctcttcatgtcaccagcccttcctcagcatccacaggtcacaccacccctcttcctgtcaccgacgcttcgtcagtgtccacaggtcacgccacctctcttcctgtcaccgacgcttcctcagtgttcacaggtcacgccacctcgcttcctgtcaccatcccttcctcagcatcctcaggtcacaccacccctcttcctgtcaccgacgcttcctcagtgtccacaggtcacgccacctctcttcctgtcaccgacgcttcctcagtgtccacaggtcacgccacccctcttcctgtcaccgacgcttcctcagtgtccacaggtcacgctacccctcttcctgtcaccgacacttcctcagtatccacaggtcacgccacccctcttcctctcaccagcctttcctcagtatccacaggtgacaccacgcctcttcctgtcaccgacacttcctcagcatccacaggtcaggccacccctcttcctgtcaccagcctttcctcagtatccacaggtgacaccacccctcttcctgtcaccgacacttcctcagcatccacaggtcacgccacctctcttcctgtcaccgacacttcctcagcatccacaggtcacgccacccctcttcctgacaccgacacttcctcagcatccacaggtcacgccacccctcttcctgtcaccgacacttcctcagcatccacaggtcacgccacccttcttcctgtcaccgacacttcctcagcatccataggtcacgccacccctcttcctgtcaccgacacttcctcaatatccacaggtcacgccacccctcttcatgtcaccagcccttcctcagcatccaccggtcacgccaccccgcttcctgtcaccgacacttcctcagcatccacaggtcacgccaaccctcttcatgtcaccagcccttcctcagcatccaccggtcacgccaccccgcttcctgtcaccgacacttcctcagcatccacaggtcacgccacccctcttcctgtcaccagcctttcctcagtatccacaggtgacaccacgcctcttcctgtcactagcccttcctcagcatccacaggtcacaccacccctcttcctgtcaccgacacttcctcagcatccacaggtcaggccaccgctcttcctgtcaccagcacttcctcagcatccacaggtgacaccacccctcttcctgttaccgacacttcctcagcatccacaggtcaggccacccctcttcctgtcaccagcctttcctcagtatccacaggtgacaccacgcctcttcctgtcactagcccttcctcagcatccacaggtcacgccactcctcttcttgtcaccgacgcttcctcagcatccacaggtcaggccacccctcttcctgtcaccgacacttcctcagcatacacaggtgacaccacctctcttcctgtcaccgacacttcctcatcatccacaggtgacaccacccctcttcttgtcaccgagacttcctcagcatccacaggtcacgccacccctcttcatgtcaccagcccttcctcagcatccacaggtgacaccacccctgtgcctgtcaccgacacttcctcagtatccacaggtcacgccacccctcttcctgtcaccggcctttcctcagcttccacaggtgacaccacccgtcttcctgtcaccgacatttcctcggcatccacaggtcaggccacccctcttcctgtcaccaacacttcctcagcatccacaggtcacgccacccctcttcctgtcaccggcctttcctcagcttccacaggtgacaccacccgtcttcctgtcaccgacatttcctcggcatccacaggtcaggccacccctcttcctgtcaccaacacttcctcagtatccacaggtgacaccatgcctcttcctgtcactagcccttcctcagcatccacaggtcacgccacccctcttcctgtcaccagcacttcctcagcatccaccggtcacgccacccctgttcctgtcaccagcacttcctcagcatctacaggtcacaccacccctcttcctgtcaccgacacttcctcagcatccacaggtgacaccacccctcttcctgtcaccagcccttcctcagcatctacaggtcacaccacccctcttcatgtcaccatcccttcctcagcatccacaggtgacaccagcactcttcctgtcaccggcgcttcctcagcatccaccggtcacgccacccctcttcctgtcaccgacacttcctcagtatccacaggtcacgccacccctcttcctgtcaccagcttttcctcagtatccacaggtgacaccacgcctcttcctgtcaccgacacttcctcagtatccacaggtcacgccacccctcttcctgtcaccagcttttcctcagtatccacaggtgacaccacccctcttcctgtcaccgacgcttcctcggcatccaccggtcacgccacccctcttcctgtcaccgacacttcctcagtatccacaggtcacgccacccctcttcctctcaccagcctttcctcagtatccacaggtgacaccacgactcttcctgtcaccgacacttcctcagtatccacaggtcacgccacccctcttcctgtcaccagcttttcctcagtatccacaggtgacaccacccctcttcctgtcaccgacgcttcctcggcatccaccggtcacgccacccctcttcctgtcaccgacacttcctcagtatccaccggtcacgccacgcctcttcctgtcaccagcctttcctcagtatccacaggtgacaccacccctcttcctgtcaccgacgcttcctcggcatccacaggtcaggccacccctcttcctgtcaccagcctttcctcagtatcaacaggtgacaccacgcctcttcctgtcaccatcccttcctcagcatcctcaggtcacaccacctctcttcctgtcaccgacacttcctcagcatccacaggtcaggccacccctcttcctgtcaccagcctttcctcagtatccacaggtgacaccacccctcttcttgtcaccgacgcttcctcagtatccacaggtcacgccacccctcttcctgtcaccgacacttcctcagcatccacaggtgacaccacccgtcttcctgtcacagacacttcctcagcatccacaggtcaggccacccctcttcctgtcaccagcctttcctcagtatccacaggtgacaccacccctcttcttgtcaccaacacttcctcagtatccagaggtcacgccacctctcttcctgtcaccatcccttcctcatcatcctcaggtcacaccacccctcttcctgtcaccagcacttcctcagtatctacaggtcacgtcacccctcttcctgtcaccagcacttcctcagcatccacaggtcacgccacctctcttcctgtcaccgacacttcctcagtatccacaggtcacgccacctctcttcctgtcaccgacacttcctcagtatccacaggtcacgccacccctcttcctgtcaccgacgcttcctcagtgtccacaggtcacgccacgcctcttcctgtcaccgacgcttcctcagcatccacaggtgacaccacccctcttcctgtcaccaacacttcctcagcatccacaggtcaggccacccctcttcctgtcaccagcctttcctcagtatccacaggtgacaccatgcctcttcctgtcactagcccttcctcagcatccacaggtcacgccacccctcttcctgttaccggcctttcctcagcttccacaggtgacaccacccctcttcctgtcactgacacttcctcagcatccacaggtcacgtcacccctcttcctgtcaccagcctttcctcagcatccacaggtgacagcacccctcttcctgtcactgacacttcctcagcatccacaggtcacgtcacccctcttcctgtcaccagcctttcctcagcatccacaggtgacaccacccctcttcctgtcactgacacttcctcagcatccacaggtcacgccacccctcttcatgtcactgatgcttcctcagcatccacaggtcaggccacccttcttcctgtcaccagcctttcctcagtatccacaggtgacaccacgcctcttcctgtcactagcccttcctcagcatccacaggtcacgccacccctcttcttgtcaccgacacttcctcagcatccacaggacacgccacccctcttcctgtcacggacgcttcctcagtgtccacaggtcacgccacctctcttcctgtaaccatccgttcctcaggttccacaggtcacaccacccctcttcctgtcaccgacacttcctcagcatccacaggtcaggccacctctcttcttgtcaccgacacttcctcagtatccacaggtgacaccacgcctcttcctgtcactagcacttcctcagcatccacaggtcacgtcactcctcttcatgtcaccagcccttcctcagcatccacaggtcacgccacccctcttcctgtcaccagcctttcctcagcatccacaggtgacaccatgcctcttcctgtcactagcccttcctcagcatccacaggtgacaccacccctcttcctgtcaccgacgcttcctcagtatccacaggtcacaccacccctcttcctgtcaccagcccttcctcagcatctacaggtcacaccacccctcttcctgtcaccgacactacctcagcatccaaaggtgacaccacccctcttcctgtcaccagcccttcctcagcatctacaggtcacaccacccctcttcctgtcaccgacacttcctcagcatccacaggtgacaccacccctcttcctgtcaccagcccttcctcagcatccacaggtcacgccacccctcttcctgtcaccaatgcttcctcattatccacaggtcacgccacccctcttcatgtcaccagcccttcctcagcatccacaggtcacgccacccctcttcctgtcaccagcacttcctcagcatccaccggtcacgccacctctcttcctgtcaccagcacttcctcagcatccaccggtcacgccacccctcttcctgtcaccgacaattcctcagtatccacaggtcacgccacccctcttcctgtcaccggcctttcctcagctaccacagatgacaccacccgtcttcctgtcaccgacgtttcctcggcatccacaggtcaggccacccctcttcctgtcaccagcctttcctcagtatccacaggtgacaccacgcctcttcctgtcactagcccttcctcagcatccacaggtcacgccagccctcttcttgtcactgacgcttcctcagcatccacaggtcaggccacccctcttcctgtcaccgacacttcctcagtatccacagctcacgccaccccacttcctgtcaccggcctttcttcagcttccacagatgacaccacccgtcttcctgtcaccgacgtttcctcggcatccacaggtcaggccatccctcttcctgtcaccagcccttcctcagcatccacaggtgacaccacccctcttcctgtcaccgacgcttcctcagcatccacaggtgacaccacctctcttcctgtcaccatcccttcctcagcatcttcaggtcacaccacctctcttcctgtcaccgacgcttcctcagtgtccacaggtcacgccacctctcttcttgtcaccgacgcttcctcagtatccacaggtgacaccacccctcttcctgtcaccgacactaactcagcatccacaggtgacaccacccctcttcatgtcaccgacgcttcctcagtatccacaggtcacgccacctctcttcctgtcaccagcctttcctcagcatccacaggtgacaccacgcctcttcctgtcactagcccttcctcagcatcctcaggtgacaccacccctcttcctgtcaccgacacttcctcagcatccacaggtcacgccacccatcttcctgtcaccggcctttcctcagcttccacaggtgacaccacccgtcttcctgtcaccaacgtttcctcggcatccacaggtcatgccacccctcttcctgtcaccagcacttcctcagcatccacaggtgacaccacccctcttcctggcaccgacacttcctcagtatccacaggtcacaccacccctcttcttgtcaccgacgcttcgtcagtatccacaggtgacaccacccgtcttcctgtcaccagcccttcctcagcatctacaggtcacaccacccctcttcatgtcaccgatgcttcctcagtatccacaggtcacaccacccctcttcctgtcaccgacacttcctcagcatccacaggtcaggccacctctcttcttgtcaccgacacttcctcagtatccacaggtgacaccacgcctcttcctgtcactagcacttcctcagcatccacaggtcacgtcactcctcttcatgtcaccagcccttcctcagcatccacaggtcacgccacccctcttcctgtcaccagcctttcctcagcatccacaggtgacaccacccctcttcctgtcaccgacacttcctcagtatccacaggtcacaccacccctcttcctgtcaccagcccttcctcagcatctacaggtcacaccacccctcttcctgtcaccgacacttcctcagcatccaaaggtgacaccacccctcttcctgtcaccagcccttcctcagcatctacaggtcacaccacccctcttcctgtcaccgacacttcctcagcatccacaggtgacaccacccctcttcctgtcaccaatgcttcctcattatccacaggtcacgccacccctcttcatgtcaccagcccttcctcagcatccacaggtcacgccacccctcttcctgtcaccagcacttcctcagcatccaccggtcacgccacccctcttcctgtcaccagcacttcctcagcatccaccggtcacgccacccctcttcctgtcaccgacaattcctcagtatccacaggtcatgccacccctcttcctgtcaccggcctttcctcagctaccacagatgacaccacccgtcttcctgtcaccgacgtgtcctcggcatccacaggtcaggccacccctcttcctgtcaccagcctttcctcagtatccacaggtgacaccacgcctcttcctgtcactagcccttcctcagcatccacaggtcacgccagccctcttcttgtcactgacgcttcctcagcatccacaggtcaggccacccctcttcctgtcaccgacacttcctcagtatccacagctcacgccaccccacttcctgtcaccggcctttcctcagcttccacagatgacaccacccgtcttcctgtcaccgacgtttcctcggcatccacaggtcaggccatccctcttcctgtcaccagcccttcctcagcatccacaggtgacaccacccctcttcctgtcaccgacgcttcctcagcatccacaggtgacaccacctctcttcctgtcaccatcccttcctcagcatcttcaggtcacaccacctctcttcctgtcaccgacgcttcctcagtgtccacaggtcacgccacctctcttcttgtcaccgacgcttcctcagtatccacaggtgacaccacccctcttcctgtcaccgacactaactcagcatccacaggtgacaccacccctcttcatgtcaccgacgcttcctcagtatccacaggtcacgccacctctcttcctgtcaccagcctttcctcagcatccacaggtgacaccacgcctcttcctgtcactagcccttcctcagcatcctcaggtcacaccacctctcttcctgtcaccgacgcttcctcagtgtccacaggtcacgccacctctcttcctgtcaccatcccttcctcagcatcctcaggtcacaccacccctcttcctgtcaccgacgcttcctcagtacccacaggtcacgccacctctcttcctgtcaccgacgcttcctcagtgtccacaggtcacgccacccctcttcctgtcaccgacgcttcctcagtgtccacaggtcatgccacccctcttccggtcaccgacacttcctcagtatctacaggacaggccacccctcttcctgtcaccagcctttcctcagcatcatccactggtgacaccacgccgcttcctgtcactgatacttcctcagcatccacaggtcaggacacccctcttcctgtcaccagccttttctcagtatccacaggtgacaccacgcctcttcctgtcactagcccttcctcagcatccacaggtcacgccacccatcttcttgtcaccgacgcttcctcagtatccacaggtcacgccacctctcttcttgtcaccgacgcttcctcagtatccacaggtcacgccaccgctcttcatgtcaccgatgcttcctcattatccacaggggacaccacccctcttcctgtcaccagcccttcctcagcatccacaggtgacaccacccctcttcctgtcaccgacacttcctcagtatccacaggtcacgccacctctcttcctgtcactgacacttcctcagcatccacaggtcacgccacctctcttcctgtcaccgacacttcctcagcatccacaggtcaggccacccctcttcctgtcaccagcccttcctcagcatccacaggtcacgccatccctcttcttgtcaccgacacttcctcagcatccacaggacaggccacccctcttcctgtcaccagcctttcctcagcatccacaggtgacaccacccctcttcctgtcaccgatgcttcctcagtgtccacaggtcacgccacctctcttcctgtcaccagcctttcctcagtatccacaggtgacaccacccctcttcctgtcactagcccttcctcagcatccacaggtcacgccacccctcttcatgtcaccagcccttcctcagcatccacaggtcacgccacccctcttcctgtcaccagcctttcctcagcatccacaggtgacaccacgcctcttcctgtcactagcccttcctcagcatccacaggtcacgccacccctcttcatgtcaccgacgcttcctcagtatccacaggtgacaccacccctcttcctgtcaccagcccttcctcagcatcctcaggtcacaccacccctcttcctgtcaccgacgcttcctcagcatccacaggtgacaccacccctcttcctgtcaccgacacttcctcagcatccacaggtcacgccacccatcttcctgtcaccggcctttcctcagcttccacaggtgacaccacccgtcttcctgtcaccgacgtttcctcggcatccacaggtcatgccacccctcttcctgtcaccagcacttcctcagcatccacaggtgacaccacccctcttcctggcaccgacacttcctcagtatccacaggtcacaccacccctcttcttgtcaccgacgcttcgtcagtatccacaggtgacaccacccgtcttcctgtcaccagcccttcctcagcatctacaggtcacaccacccctctacctgtcaccgacactccctcagcatccacaggtgacaccacccctcttcctgtcaccaatgcttcctcattatccacacgtcacgccacctctcttcatgtcaccagcccttcctcagcatccaccggtcacgccacccctcttcctgttaccgacacttccgcagcatccacaggtcacgccacccctcttcctgtcaccagcacttcctcagcatccacaggtgacaccacccctcttcctgtcaccgacacttcctcagcatccacaggtcacgccacccctcttcctgtcaccaacacttcctcagtatccacaggtcacgccacccctcttcatgtcaccagcccttcctcagcatccacaggtcacaccacccctcttcctgtcaccgacgcttcgtcagtgtccacaggtcacgccacctctcttcctgtcaccgacgcttcctcagtgtccacaggtcacgccacccctcttcctgtcaccgacgcttcctcagtgtccacaggtcacgctacccctcttcctctcaccagcctttcctcagtatccacaggtgacaccacgcctcttcctgtcaccgacacttcctcagcatccacaggtcaggccacccctcttcctgtcaccagcctttcctcagtatccacaggtgacaccacccctcttcctgtcaccgacacttcctcagcatccacaggtcacgccacctctcttcctgtcaccgacacttcctcagcatccacaggtcacgccacccctcttcctgtcaccgacacttcctcaatatccacaggtcacgccacccctcttcatgtcaccagcccttcctcagcatccaccggtcacgccaccccgcttcctgtcaccgacacttcctcagcatccacaggtcacgccacccctcttcctgtcaccagcctttcctcagtatccacaggtgacaccacgcctcttcctgtcactagcccttcctcagcatccacaggtcacgccactcctcttcttgtcaccgacgcttcctcagcatccacaggtcaggccacccctcttcctgtcaccagcctttcctcagtatccacaggtgacaccacgcctcttcctgtcactagcccttcctcagcatccaccggtcatgccacctctcttcctgtcaccgacacttcctcagcatccacaggtgacaccacctctcttcctgtcaccgacacttcctcagcatacacaggtgacaccacctctcttcctgtcaccgacacttcctcatcatccacaggtgacaccacccctcttcttgtcaccgagacttcctcagcatccacaggtgacaccacccctgtgcctgtcaccgacacttcctcagtatccacaggtcacgccacccctcttcctgtcaccggcctttcctcagcttccacaggtgacaccacccgtcttcctgtcaccgacatttcctcggcatccacaggtcaggccacccctcttcctgtcaccaacacttcctcagtatccacaggtgacaccatgcctcttcctgtcactagcccttcctcagcatccacaggtcacgccacccctcttcctgtcaccagcacttcctcagcatccaccggtcacgccacccctgttcctgtcaccagcacttccttagcatccacaggtcacaccacccctcttcctgtcaccagcccttcctcagcatctacaggtcacaccacccctcttcctgtcaccgacacttcctcagcatccacaggtgacaccacccctcttcctgtcaccaatgcttcctcattatccacaggacacaccacccctcttcatgtcaccatcccttcctcagcatccacaggtgacaccagcactcttcctgtcaccggcgcttcctcagcatccaccggtcacgccacccctcttcctgtcaccgacacttcctcagtatccacaggtcacgccacccctcttcctgtcaccagcttttcctcagtatccacaggtgacaccacccctcttcctgtcaccgacgcttcctcggcatccaccggtcacgccacccctcttcctgtcaccgacacttcctcagcatccacaggtgacaccacccctcttcctgtcaccgacgcttcctcggcatccacaggtcaggccacccctcttcctgtcaccagcctttcctcagtatcaacaggtgacaccacgcctcttcctgtcaccatcccttcctcagcatcctcaggtcacaccacctctcttcctgtcagcgacacttcctcagcatccacaggtcaggccacccctcttcctgtcaccagcctttcctcagtatccacaggtgacaccacccctcttcttgtcaccgacgcttcctcagtatccacaggtcacgccacccctcttcctgtcaccgacacttcctcagcatccacaggtgacaccacccgtcttcctgtcacggacacttcctcagcatccacaggtcaggccacccctcttcctgtcaccagcctttcctcagtatccacaggtgacaccacccctcttcttgtcaccaacacttcctcagtatccacaggtcacgccacctctcttcctgtcaccatcccttcctcatcatcctcaggtcacaccacccctcttcctgtcaccagcacttcctcagtatctacaggtcacgtcacccctcttcatgtcaccagcccttcctcatcatccacaggtcaggccacccctcttcctgtcaccagcacttcctcagtatctacaggtcacgtcacccctcttcatgtcaccagcccttcctcagcatccacaggtcacgccacccctcttcctgtcaccagcacttcctcagcatccacaggtcacgccacccctcttcctgtcaccgacgcttcctcagtgtccacaggtcacgccacgcctcttcctgtcaccgacacttcctcagcatccacaggtgacaccacccctcttcctgtcaccgacacttcctcagcatccacaggtcaggccacccctcttcctgtcaccagcctttcctcagtatccacaggtcacgccacccctcttgctgtcagcagtgctacctcagcttccacagtatcctcggactcccctctgaagatggaaacatcaggaatgacaacaccgtcactgaagacagacggtgggagacgcacagccacatcaccaccccccacaacctcccagaccatcatttccaccattcccagcactgccatgcacacccgctccacagctgcccccatccccatcctgcctgagagaggagtttccctcttcccctatggggcagacgccggggacctggagttcgtcaggaggaccgtggacttcacctccccactcttcaagccggcgactggcttcccccttggctcctctctccgtgattccctctacttcacagacaatggccagatcatcttcccagagtcagactaccagattttctcctaccccaacccactcccaacaggcttcacaggccgggaccctgtggccctggtggctccgttctgggacgatgctgacttctccactggtcgggggaccacattttatcaggaatacgagacgttctatggtgaacacagcctgctagtccagcaggccgagtcttggattagaaagatgacaaacaacgggggctacaaggccaggtgggccctaaaggtcacgtgggtcaatgcccacgcctatcctgcccagtggaccctcgggagcaacacctaccaagccatcctctccacggacgggagcaggtcctatgccctgtttctctaccagagcggtgggatgcagtgggacgtggcccagcgctcagtggagatggctatttcgaaaacagcccactgatgtcccagccagtgtgggagaggtatcgccctgatagattcctgaattccaactcaggcctccaagggctgcagttctacaggctacaccgggaagaaaggcccaactaccgtctcgagtgcctgcagtggctgaagagccagcctcggtggcccagctggggctggaaccaggtctcctgcccttgttcctggcagcagggacgacgggacttacgattccaacccgtcagcataggtcgctggggcctcggcagtaggcagctgtgcagcttcacctcttggcgaggaggcgtgtgctgcagctacgggccctggggagagtttcgtgaaggctggcacgtgcagcgtccttggcagttggcccaggaactggagccacagagctggtgctgccgctggaatgacaagccctacctctgtgccctgtaccagcagaggcggccccacgtgggctgtgctacatacaggcccccacagcccgcctggatgttcggggacccccacatcaccaccttggatggtgtcagttacaccttcaatgggctgggggacttcctgctggtcggggcccaagacgggaactcctccttcctgcttcagggccgcaccgcccagactggctcagcccaggccaccaacttcatcgcctttgcggctcagtaccgctccagcagcctgggccccgtcacggtccaatggctccttgagcctcacgacgcaatccgtgtcctgctggataaccagactgtgacatttcagcctgaccatgaagacggcggaggccaggagacgttcaacgccaccggagtcctcctgagccgcaacggctctgaggtctcggccagcttcgacggctgggccaccgtctcggtgatcgcgctctccaacatcctccacgcctccgccagcctcccgcccgagtaccagaaccgcacggaggggctcctgggggtctggaataacaatccagaggacgacttcaggatgcccaatggctccaccattcccccagggagccctgaggagatgcttttccactttggaatgacctggcagatcaacgggacaggcctccttggcaagaggaatgaccagctgccttccaacttcacccctgttttctactcacaactgcaaaaaaacagctcctgggctgaacatttgatctccaactgtgacggagatagctcatgcatctatgacaccctggccctgcgcaacgcaagcatcggacttcacacgagggaagtcagtaaaaactacgagcaggcgaacgccaccctcaatcagtacccgccctccatcaatggtggtcgtgtgattgaagcctacaaggggcagaccacgctgattcagtacaccagcaatgctgaggatgccaacttcacgctcagagacagctgcaccgacttggagctctttgagaatgggacgttgctgtggacacccaagtcgctggagccattcactctggagattctagcaagaagtgccaagattggcttggcatctgcactccagcccaggactgtggtctgccattgcaatgcagagagccagtgtttgtacaatcagaccagcagggtgggcaactcctccctggaggtggctggctgcaagtgtgacgggggcaccttcggccgctactgcgagggctccgaggatgcctgtgaggagccgtgcttcccgagtgtccactgcgttcctgggaagggctgcgaggcctgccctccaaacctgactggggatgggcggcactgtgcggctctggggagctctttcctgtgtcagaaccagtcctgccctgtgaattactgctacaatcaaggccactgctacatctcccagactctgggctgtcagcccatgtgcacctgccccccagccttcactgacagccgctgcttcctggctgggaacaacttcagtccaactgtcaacctagaacttcccttaagagtcatccagctcttgctcagtgaagaggaaaatgcctccatggcagaagtcaacgcctcggtggcatacagactggggaccctggacatgcgggcctttctccgcaacagccaagtggaacgaatcgattctgcagcaccggcctcgggaagccccatccaacactggatggtcatctcggagttccagtaccgccctcggggcccggtcattgacttcctgaacaaccagctgctggccgcggtggtggaggcgttcttataccacgttccacggaggagtgaggagcccaggaacgacgtggtcttccagcccatctccggggaagacgtgcgcgatgtgacagccctgaacgtgagcacgctgaaggcttacttcagatgcgatggctacaagggctacgacctggtctacagcccccagagcggcttcacctgcgtgtccccgtgcagtaggggctactgtgaccatggaggccagtgccagcacctgcccagtgggccccgctgcagctgtgtgtccttctccatctacacggcctggggcgagcactgtgagcacctgagcatgaaactcgacgcgttcttcggcatcttctttggggccctgggcggcctcttgctgctgggggtcgggacgttcgtggtcctgcgcttctggggttgctccggggccaggttctcctatttcctgaactcagctgaggccttgccttgaaggggcagctgtggcctaggctacctcaagactcacctcatccttaccgcacatttaaggcgccattgcttttgggagactggaaaagggaaggtgactgaaggctgtcaggattctt

SEQ ID NO: 155686 - DNA, 16493 bp, Homo sapiens
  Payload ID: 10597
  Gene Symbol: MUC4
  Gene Name: mucin 4, cell surface associated
  ENST ID: ENST00000628931
  CDS Start-End: 1-13211
gaaccacagaggacacattaataactggaagtaaaactgctgccccagtcacctcaacaggctcaacaacagcgacactagagggacaatcaactgcagcttcttcaaggacctctaatcaggacatatcagcttcatctcagaaccaccagactaagagcacggagaccaccagcaaagctcaaaccgacaccctcacgcagatgatgacatcaactcttttttcttccccaagtgtacacaatgtgatggagacagctcctccagatgaaatgaccacatcatttccctccagtgtcaccaacacactcatgatgacatcaaagactataacaatgacaacctccacagactccactcttggaaacacagaagagacatcaacagcaggaactgaaagttctaccccagtgacctcagcagtctcaataacagctggacaggaaggacaatcacgaacaacttcctggaggacctctatccaagacacatcagcttcttctcagaaccactggactcggagcacgcagaccaccagggaatctcaaaccagcaccctaacacacagaaccacttcaactccttctttctctccaagtgtacacaatgtgacagggactgtttctcagaagacatctccttcaggtgaaacagctacctcatccctctgtagtgtcacaaacacatccatgatgacatcagagaagataacagtgacaacctccacaggctccactcttggaaacccaggggagacatcatcagtacctgttactggaagtcttatgccagtcacctcagcagccttagtaacatttgatccagaaggacaatcaccagcaactttctcaaggacttctactcaggacacaacagctttttctaagaaccaccagactcagagcgtggagaccaccagagtatctcaaatcaacaccctcaacaccctcacaccggttacaacatcaactgttttatcctcaccaagtggattcaacccaagtggaacagtttctcaggagacattcccttctggtgaaacaaccacctcatccccttccagtgtcagcaatacattcctggtaacatcaaaggtgttcagaatgccaacctccagagactctactcttggaaacacagaggagacatcactatctgtaagtggaaccatttctgcaatcacttccaaagtttcaaccatatggtggtcagacactctgtcaacagcactctcccccagttctctacctccaaaaatatccacagctttccacacccagcagagtgaaggtgcagagaccacaggacggcctcatgagaggagctcattctctccaggtgtgtctcaagaaatatttactctacatgaaacaacaacatggccttcctcattctccagcaaaggccacacaacttggtcacaaacagaactgccctcaacatcaacaggtgctgccactaggcttgtcacaggaaatccatctacagggacagctggcactattccaagggtcccctctaaggtctcagcaataggggaaccaggagagcccaccacatactcctcccacagcacaactctcccaaaaacaacaggggcaggcgcccagacacaatggacacaagaaacggggaccactggagaggctcttctcagcagcccaagctacagtgtgactcagatgataaaaacggccacatccccatcttcttcacctatgctggatagacacacatcccaacaaattacaacggcaccatcaacaaatcattcaacaatacattccacaagcacctctcctcaggaatcaccagctgtttcccaaaggggtcacactcaagccccgcagaccacacaagaatcacaaaccacgaggtccgtctcccccatgactgacaccaagacagtcaccaccccaggttcttccttcacagccagtgggcactcgccctcagaaattgttcctcaggacgcacccaccataagtgcagcaacaacctttgccccagctcccaccggggatggtcacacaacccaggccccgaccacagcactgcaggcagcacccagcagccatgatgccaccctggggccctcaggaggcacgtcactttccaaaacaggtgcccttactctggccaactctgtagtgtcaacaccagggggcccagaaggacaatggacatcagcctctgccagcacctcacctgacacagcagcagccatgacccatacccaccaggctgagagcacagaggcctctggacaaacacagaccagcgaaccggcctcctcagggtcacgaaccacctcagcgggcacagctaccccttcctcatccggggcgagtggcacaacaccttcaggaagcgaaggaatatccacctcaggagagacgacaaggttttcatcaaacccctccagggacagtcacacaacccagtcaacaaccgaattgctgtccgcctcagccagtcatggtgccatcccagtaagcacaggaatggcgtcttcgatcgtccccggcacctttcatcccaccctctctgaggcctccactgcagggagaccgacaggacagtcaagcccaacttctcccagtgcctctcctcaggagacagccgccatttcccggatggcccagactcagaggacaagaaccagcagagggtctgacactatcagcctggcgtcccaggcaaccgacaccttctcaacagtcccacccacacctccatcgatcacatccactgggcttacatctccacaaaccgagacccacactctgtcaccttcagggtctggtaaaaccttcaccacggccctcatcagcaacgccacccctcttcctgtcacctacgcttcctcggcatccacaggtcacaccacccctcttcatgtcaccgatgcttcctcagtatccacaggtcacgccacccctcttcctgtcaccagcccttcctcagtatccacaggtcacaccacccctcttcctgtcaccgacacttcctcagaatccacaggtcacgtcacccctcttcctgtcaccagcttttcctcagcatccacaggtgacagcacccctcttcctgtcactgacacttcctcagcatccacaggtcacgtcacccctcttcctgtcaccagcctttcctcagcatccacaggtgacaccacccctcttcctgtcactgacacttcctcagcatccacaggtcacgccacctctcttcctgtcaccgacacttcctcagtatccacaggtcacaccacccctcttcctgtcaccgacacttcctcagcatccacaggtcacgccacctctcttcctgtcaccgacacttcctcagtatccacaggtcacaccacccctcttcatgtcactgatgcttcctcagcatccacaggtcaggccacccctcttcctgtcaccagcctttcctcagtatccacaggtgacaccacgcctcttcctgtcactagcccttcctcagcatccacaggtcacgccacccctcttcttgtcaccgacacttcctcagcatccacaggacacgccacccctcttcctgtcaccgacgcttcctcagtgtccacagatcacgccacctctcttcctgtaaccatcccttccgcagcatccacaggtcacaccacccctcttcctgtcaccgacacttcctcagcatccacaggtcaggccacctctcttcttgtcaccgacacttcctcagtatccacaggtgacaccacgcctcttcctgtcactagcacttcctcagcatccacaggtcacgtcactcctcttcatgtcaccagcccttcctcagcatccacaggtcacgccacccctcttcctgtcaccagcctttcctcagcatccacaggtgacaccatgcctcttcctgtcactagcccttcctcagcatccacaggtgacaccacccctcttcctgtcaccgacgcttcctcagtatccacaggtcacaccacccctcttcatgtcactgatgcttcctcagcatccacaggtcaggccacccctcttcctgtcaccagcctttcctcagtatccacaggtgacaccacgcctcttcctgtcactagcccttcctcagcatccacaggtcacgccacccctcttcttgtcaccgacacttcctcagcatccacaggacacgccacccctcttcctgtcaccgacgcttcctcagtgtccacagatcacgccacctctcttcctgtaaccatcccttccgcagcatccacaggtcacaccacccctcttcctgtcaccgacacttcctcagcatccacaggtcaggccacctctcttcttgtcaccgacacttcctcagtatccacaggtgacaccacgcctcttcctgtcactagcacttcctcagcatccacaggtcacgtcactcctcttcatgtcaccagcccttcctcagcatccacaggtcacgccacccctcttcctgtcaccagcctttcctcagcatccacaggtgacaccatgcctcttcctgtcactagcccttcctcagcatccacaggtgacaccacccctcttcctgtcaccgacgcttcctcagtatccacaggtcacaccacccctcttcctgtcaccagcccttcctcagcatctacaggtcacaccacccctcttcctgtcaccgacacttcctcagcatccaaaggtgacaccacccctcttcctgtcaccagcccttcctcagcatctacaggtcacaccacccctcttcctgtcaccgacacttcctcagcatccacaggtgacaccacccctcttcctgtcaccaatgcttcctcattatccacaggtcacgccacccctcttcatgtcaccagcccttcctcagcatccacaggtcacgccacccctcttcctgtcaccagcacttcctcagcatccaccggtcacgccacccctcttcctgtcaccggcctttcctcagctaccacagatgacaccacccgtcttcctgtcaccgacgtttcctcggcatccacaggtcaggccacccctcttcctgtcaccagcctttcctcagtatccacaggtgacaccacgcctcttcctgtcactagcccttcctcagcatccacaggtcacgccagccctcttcttgtcactgacgcttcctcagcatccacaggtcaggccacccctcttcctgtcaccgacacttcctcagtatccacagctcacgccaccccacttcctgtcaccggcctttcttcagcttccacagatgacaccacccgtcttcctgtcaccgacgtttcctcggcatccacaggtcaggccatccctcttcctgtcaccagcccttcctcagcatccacaggtgacaccacccctcttcctgtcaccgacgcttcctcagcatccacaggtgacaccacctctcttcctgtcaccatcccttcctcagcatcttcaggtcacaccacctctcttcctgtcaccgacgcttcctcagtgtccacaggtcacgccacctctcttcttgtcaccgacgcttcctcagtatccacaggtgacaccacccctcttcctgtcaccgacactaactcagcatccacaggtgacaccacccctcttcatgtcaccgacgcttcctcagtatccacaggtcacgccacctctcttcctgtcaccagcctttcctcagcatccacaggtgacaccacgcctcttcctgtcactagcccttcctcagcatcctcaggtcacaccacccctcttcctgtcaccgacgcttcctcagtacccacaggtcacgccacctctcttcctgtcaccgacgcttcctcagtgtccacaggtcacgccacccctcttcctgtcaccgacgcttcctcagtgtccacaggtcatgccacccctcttccggtcaccgacacttcctcagtatctacaggacaggccacccctcttcctgtcaccagcctttcctcagcatccactggtgacaccacgccgcttcctgtcaccgatacttcctcagcatccacaggtcaggacacccctcttcctgtcaccagcctttcctcagtatccacaggtgacaccacgcctcttcctgtcactaacccttcctcagcatccacaggtcacgccacccctcttcttgtcaccgacgcttcctcaatatccacaggtcacgccacctctcttcttgtcaccgacgcttcctcagtatccacaggtcacgccaccgctcttcatgacaccgatgcttcctcattatccacaggggacaccacccctcttcctgtcaccagcccttcctcaacatccacaggtgacaccacccctcttcctgtcaccgaaacttcctcagtatccacaggtcacgccacctctcttcctgtcaccgacacttcctcagcatccacaggtcacgccacctctcttcctgtcaccgacacttcctcagcatccacaggtcacgccacccctcttcctgtcaccgacacttcctcagcatccacaggtcaggccacccctcttcctgtcaccagcccttcctcagcatccacaggtcacgccatccctcttcttgtcaccgacacttcctcagcatccacaggacaggccacccctcttcctgtcaccagcctttcctcagcatccacaggtgacaccacccctcttcctgtcaccgacgcttcctcagtgtccacaggtcacgccacctctcttcctgtcaccagcctttcctcagtatccacaggtgacaccactcctcttcctgtcactagcccttcctcagcatccacaggtcacgccacccctcttcatgtcaccgacgcttcctcagcatccacaggtcacgccacccctcttcctgtcaccagcctttcctcagcatccacaggtgacaccacgcctcttcctgtcactagcccttcctcagcatccacaggtcacgccacccctcttcatgtcaccgacgcttcctcagtatccacaggtgacaccacccctcttcctgtcaccagctcttcctcagcatcctcaggtcacaccacccctcttcctgtcaccgacgcttcctcagcatccacaggtgacaccacccctcttcctgtcaccgacacttcctcagcatccacaggtcacgccacccatcttcctgtcaccggcctttcctcagcttccacaggtgacaccacccgtcttcctgtcaccaacgtttcctcggcatccacaggtcatgccacccctcttcctgtcaccagcacttcctcagcatccacaggtgacaccacccctcttcctggcaccgacacttcctcagtatccacaggtcacaccacccctcttcttgtcaccgacgcttcgtcagtatccacaggtgacaccacccgtcttcctgtcaccagcccttcctcagcatctacaggtcacaccacccctctacctgtcaccgacactccctcagcatccacaggtgacaccacccctcttcctgtcaccaatgcttcctcattatccacacgtcacgccacctctcttcatgtcaccagcccttcctcagcatccacaggtcacgccacctctcttcctgtcaccgacacttccgcagcatccacaggtcacgccacccctcttcctgtcaccagcacttcctcagcatccacaggtgacaccacccctcttcctgtcaccgacacttactcagcatccacaggtcaggccacccctcttcctgtcaccagcctttcctcagtatccacaggtgacaccacgcctcttcctgtcactagcccttcctcagcatccacaggtcacgccactcctcttcttgtcaccgacgcttcctcagcatccacaggtcaggccacccctcttcctgtcaccagcctttcctcagtatccacaggtgacaccacgcctcttcctgtcactagcccttcctcagcatccaccggtcatgccacctctcttcctgtcaccgacacttcctcagcatccacaggtgacaccacctctcttcctgtcaccgacacttcctcagcatacacaggtgacaccacctctcttcctgtcaccgacacttcctcatcatccacaggtgacaccacccctcttcttgtcaccgagacttcctcagtatccacaggtgacaccacccctcttcctgtcaccgacacttcctcagcatccacaggtcacgccacccctcttcctgtcaccaacacttcctcagtatccacaggtcacgccacccctcttcatgtcaccagcccttcctcagcatccacaggtcacaccacccctcttcctgtcaccgacgcttcgtcagtgtccacaggtcacgccacctctcttcctgtcaccgacgcttcctcagtgttcacaggtcatgccacctctcttcctgtcaccatcccttcctcagcatcctcaggtcacaccacccctcttcctgtcaccgacgcttcctcagtgtccacaggtcacgccacctctcttcctgtcaccgacgcttcctcagtgtccacaggtcatgccacccctcttcctgtcaccgacgcttcctcagtgtccacaggtcacgctacccctcttcctctcaccagcctttcctcagtatccacaggtgacaccacgcctcttcctgtcaccgacacttcctcagcatccacaggtcaggccacccctcttcctgtcaccagcctttcctcagtatccacaggtgacaccacccctcttcctgtcaccgacacttcctcagcatccacaggtcacgccacctctcttcctgtcaccgacacttcctcagcatccacaggtcacgccacccctcttcctgacaccgacacttcctcagcatccacaggtcacgccacccttcttcctgtcaccgacacttcctcagcatccataggtcacgccacctctcttcctgtcaccgacacttcctcaatatccacaggtcacgccacccctcttcatgtcaccagcccttcctcagcatccaccggtcacgccaccccgcttcctgtcaccgacacttcctcagcatccacaggtcacgccaaccctcttcatgtcaccagcccttcctcagcatccaccggtcacgccaccccgcttcctgtcaccgacacttcctcagcatccacaggtcacgccacccctcttcctgtcaccagcctttcctcagtatccacaggtgacaccacgcctcttcctgtcactagcccttcctcagcatccacaggtcacaccacccctcttcctgtcaccgacacttcctcagcatccacaggtcaggccaccgctcttcctgtcaccagcacttcctcagcatccacaggtgacaccacccctcttcctgtcaccgacacttcctcagcatccacaggtcaggccacccctcttcctgtcaccagcctttcctcagtatccacaggtgacaccacgcctcttcctgtcactagcccttcctcagcatccacaggtcacgccactcctcttcttgtcaccgacgcttcctcagcatccacaggtcaggccacccctcttcctgtcaccagcctttcctcagtatccacaggtgacaccacgcctcttcctgtcactagcccttcctcagcatccaccggtcatgccacctctcttcctgtcaccgacacttcctcagcatccacaggtgacaccacctctcttcctgtcaccgacacttcctcagcatacacaggtgacaccacctctcttcctgtcaccgacacttcctcatcatccacaggtgacaccacccctcttcttgtcaccgagacttcctcagtatccacaggtcacgccactcctcttcttgtcaccgacgcttcctcagcatccacaggtcacgccacccctcttcatgtcaccagcccttcctcagcatccacaggtgacaccacccctgtgcctgtcaccgacacttcctcagtatccacaggtcacgccacccctcttcctgtcaccggcctttcctcagcttccacaggtgacaccacccgtcttcctgtcaccgacatttcctcggcatccacaggtcaggccacccctcttcctgtcaccaacacttcctcagtatccacaggtgacaccatgcctcttcctgtcactagcccttcctcagcatccacaggtcacgccacccctcttcctgtcaccagcacttcctcagcatccaccggtcacgccacccctgttcctgtcaccagcacttcctcagcatctacaggtcacaccacccctcttcctgtcaccgacacttcctcagcatccacaggtgacaccacccctcttcctgtcaccagcccttcctcagcatctacaggtcacaccacccctcttcatgtcaccatcccttcctcagcatccacaggtgacaccagcactcttcctgtcaccggcgcttcctcagcatccaccggtcacgccacccctcttcctgtcaccgacacttcctcagtatccaccggtcacgccacgcctcttcctgtcaccagcctttcctcagtatccacaggtgacaccacccctcttcctgtcaccgacgcttcctcggcatccacaggtcaggccacccctcttcctgtcaccagcctttcctcagtatccacaggtgacaccacccctcttcttgtcaccgacgcttcctcagtatccacaggtcacgccacccctcttcctgtcaccgacacttcctcagcatccacaggtgacaccacccgtcttcctgtcacggacacttcctcagcatccacaggtcaggccacccctcttcctgtcaccagcctttcctcagtatccacaggtgacaccacccctcttcttgtcaccgacgcttcctcagtatccacaggtcacgccacccctcttcctgtcaccgacacttcctcagcatccacaggtgacaccacccgtcttcctgtcacggacacttcctcagcatccacaggtcaggccacccctcttcctgtcaccatcccttcctcatcatcctcaggtcacaccacccctcttcctgtcaccagcacttcctcagtatctacaggtcacgtcacccctcttcatgtcaccagcccttcctcagcatccacaggtcacgtcacccctcttcctgtcaccagcacttcctcagcatccacaggtcacgccacccctcttcttgtcaccgacgcttcctcagtgtccacaggtcacgccacgcctcttcctgtcaccgacgcttcctcagcatccacaggtgacaccacccctcttcctgtcaccgacacttcctcagcatccacaggtcaggccacccctcttcctgtcaccagcctttcctcagtatccacaggtgacaccacccctcttcctgtcaccgacgcttcctcagcatccacaggtcacgccacccctcttcctgtcaccatcccttcctcagtatccacaggtgacaccatgcctcttcctgtcactagcccttcctcagcatccacaggtcacgccacccctcttcctgttaccggcctttcctcagcttccacaggtgacaccacccctcttcctgtcaccgacacttcctcagcatccacacgtcacgccacccctcttcctgtcaccgacacttcctcagcttccacagatgacaccacccgtcttcctgtcaccgacgtttcctcggcatccacaggacatgccacccctcttcctgtcaccagcacttcctcagcatccacaggtgacaccacccctcttcctgtcaccgacacttcctcagtatccacaggtcacgccacctctcttcctgtcaccagccgttcctcagcatccacaggtcacgccaccccccttcctgtcaccgacacttcctcagtatccacaggtcacgccacccctcttcctgtcaccagcacttcctcagtatctacaggtcacgccacccctcttcctgtcaccagcccttcctcagcatccacaggtcacgccacccctgttcctgtcaccagcacttcctcagcatccacaggtgacaccacccctcttcctgtcaccaatgcttcctcattatccacaggtcacgccacccctcttcatgtcaccagcccttcctcagcatccagaggtgacaccagcactcttcctgtcaccgatgcttcctcagcatccaccggtcacgccacccctcttcctctcaccagcctttcctcagtatccacaggtgacaccacgcctcttcctgtcaccgacacttcctctgcatccacaggtcaggccacccctcttcctgtcaccagcctttcctcagtatccacaggtgacaccacgcctcttcctgtcaccatcccttcctcagcatcctcaggtcacaccacctctcttcctgtcaccgacgcttcctcagtgtccacaggtcacggcacccctcttcctgtcaccagcacttcctcagcatccacaggtgacaccacccctcttcctgtcaccgacacttcctcagcatccacaggtcacgccacccctcttcctgtcaccgacacttcctcagcatccacaggtcacgccacccctcttcctgtcaccagcctttcctcagtatccacaggtcacgccacccctcttgctgtcagcagtgctacctcagcttccacagtatcctcggactcccctctgaagatggaaacaccaggaatgacaacaccgtcactgaagacagacggtgggagacgcacagccacatcaccaccccccacaacctcccagaccatcatttccaccattcccagcactgccatgcacacccgctccacagctgcccccatccccatcctgcctgagagaggtgaggccatacaggagtttccctcttcccctatggggcaggcgccggggacctggagttcgtcaggaggaccgtggacttcacctccccactcttcaagccggcgactggcttcccccttggctcctctctccgtgattccctctacttcacagacaatggccagatcatcttcccagagtcagactaccagattttctcctaccccaacccactcccaacaggcttcacaggccgggaccctgtggccctggtggctccgttctgggacgatgctgacttctccactggtcgggggaccacattttatcaggaatacgagacgttctatggtgaacacagcctgctagtccagcaggccgagtcttggattagaaagatgacaaacaacgggggctacaaggccaggtgggccctaaaggtcacgtgggtcaatgcccacgcctatcctgcccagtggaccctcgggagcaacacctaccaagccatcctctccacggacgggagcaggtcctatgccctgtttctctaccagagcggtgggatgcagtgggacgtggcccagcgctcaggcaacccggtgctcatgggcttctctaggcctccaagggctgcagttctacaggctacaccgggaagaaaggcccaactaccgtctcgagtgcctgcagtggctgaagagccagcctcggtggcccagctggggctggaaccaggtctcctgcccttgttcctggcagcagggacgacgggacttacgattccaacccgtcagcataggtcgctggggcctcggcagtaggcagctgtgcagcttcacctcttggcgaggaggcgtgtgctgcagctacgggccctggggagagtttcgtgaaggctggcacgtgcagcgtccttggcagttggcccaggaactggagccacagagctggtgctgccgctggaatgacaagccctacctctgtgccctgtaccagcagaggcggccccacgtgggctgtgctacatacaggcccccacagcccgcctggatgttcggggacccccacatcaccaccttggatggtgtcagttacaccttcaatgggctgggggacttcctgctggtcggggcccaagacgggaactcctccttcctgcttcagggccgcaccgcccagactggctcagcccaggccaccaacttcatcgcctttgcggctcagtaccgctccagcagcctgggccccgtcacggtccaatggctccttgagcctcacgacgcaatccgtgtcctgctggataaccagactgtgacatttcagcctgaccatgaagacggcggaggccaggagacgttcaacgccaccggagtcctcctgagccgcaacggctctgaggtctcggccagcttcgacggctgggccaccgtctcggtgatcgcgctctccaacatcctccacgcctccgccagcctcccgcccgagtaccagaaccgcacggaggggctcctgggggtctggaataacaatccagaggacgacttcaggatgcccaatggctccaccattcccccagggagccctgaggagatgcttttccactttggaatgacctggcagatcaacgggacaggcctccttggcaagaggaatgaccagctgccttccaacttcacccctgttttctactcacaactgcaaaaaaacagctcctgggctgaacatttgatctccaactgtgacggagatagctcatgcatctatgacaccctggccctgcgcaacgcaagcatcggacttcacacgagggaagtcagtaaaaactacgagcaggcgaacgccaccctcaatcagtacccgccctccatcaatggtggtcgtgtgattgaagcctacaaggggcagaccacgctgattcagtacaccagcaatgctgaggatgccaacttcacgctcagagacagctgcaccgacttggagctctttgagaatgggacgttgctgtggacacccaagtcgctggagccattcactctggagattctagcaagaagtgccaagattggcttggcatctgcactccagcccaggactgtggtctgccattgcaatgcagagagccagtgtttgtacaatcagaccagcagggtgggcaactcctccctggaggtggctggctgcaagtgtgacgggggcaccttcggccgctactgcgagggctccgaggatgcctgtgaggagccgtgcttcccgagtgtccactgcgttcctgggaagggctgcgaggcctgccctccaaacctgactggggatgggcggcactgtgcggctctggggagctctttcctgtgtcagaaccagtcctgccctgtgaattactgctacaatcaaggccactgctacatctcccagactctgggctgtcagcccatgtgcacctgccccccagccttcactgacagccgctgcttcctggctgggaacaacttcagtccaactgtcaacctagaacttcccttaagagtcatccagctcttgctcagtgaagaggaaaatgcctccatggcagaagtcaacgcctcggtggcatacagactggggaccctggacatgcgggcctttctccgcaacagccaagtggaacgaatcgattctgcagcaccggcctcgggaagccccatccaacactggatggtcatctcggagttccagtaccgccctcggggcccggtcattgacttcctgaacaaccagctgctggccgcggtggtggaggcgttcttataccacgttccacggaggagtgaggagcccaggaacgacgtggtcttccagcccatctccggggaagacgtgcgcgatgtgacagccctgaacgtgagcacgctgaaggcttacttcagatgcgatggctacaagggctacgacctggtctacagcccccagagcggcttcacctgcgtgtccccgtgcagtaggggctactgtgaccatggaggccagtgccagcacctgcccagtgggccccgctgcagctgtgtgtccttctccatctacacggcctggggcgagcactgtgagcacctgagcatgaaactcgacgcgttcttcggcatcttctttggggccctgggcggcctcttgctgctgggggtcgggacgttcgtggtcctgcgcttctggggttgctccggggccaggttctcctatttcctgaactcagctgaggccttgccttgaaggggcagctgtggcctaggctacctcaagactcacctcatccttaccgcacatttaaggcgccattgcttttgggagactggaaaagggaaggtgactgaaggctgtcaggattcttcaaggagaatgaatactgggaatcaagacaagactataccttatccataggcgcaggtgcacagggggaggccataaagatcaaacatgcatggatgggtcctcacgcagacacacccacagaaggacactagcctgtgcacgcgcgcgtgcacacacacacacacacacacgagttcataatgtggtgatggccctaagttaagcaaaatgcttctgcacacaaaactctctggtttacttcaaattaactctatttaaataaagtctctctgactttttgtgtctccaaaa

SEQ ID NO: 155687 - DNA, 3858 bp, Homo sapiens
  Payload ID: 10597
  Gene Symbol: MUC4
  Gene Name: mucin 4, cell surface associated
  ENST ID: ENST00000629001
  CDS Start-End: 1-3449
gaatgacaacaccgtcactgaagacagacggtgggagacgcacagccacatcaccaccccccacaacctcccagaccatcatttccaccattcccagcactgccatgcacacccgctccacagctgcccccatccccatcctgcctgagagaggagtttccctcttcccctatggggcagacgccggggacctggagttcgtcaggaggaccgtggacttcacctccccactcttcaagccggcgactggcttcccccttggctcctctctccgtgattccctctacttcacagacaatggccagatcatcttcccagagtcagactaccagattttctcctaccccaacccactcccaacaggcttcacaggccgggaccctgtggccctggtggctccgttctgggacgatgctgacttctccactggtcgggggaccacattttatcaggaatacgagacgttctatggtgaacacagcctgctagtccagcaggccgagtcttggattagaaagatcacaaacaacgggggctacaaggccaggtgggccctaaaggtcacgtgggtcaatgcccacgcctatcctgcccagtggaccctcgggagcaacacctaccaagccatcctctccacggacgggagcaggtcctatgccctgtttctctaccagagcggtgggatgcagtgggacgtggcccagcgctcaggcaagccggtgctcatgggcttctctagtggagatggctatttcgaaaacagcccactgatgtcccagccagtgtgggagaggtatcgccctgatagattcctgaattccaactcaggcctccaagggctgcagttctacaggctacaccgggaagaaaggcccaactaccgtctcgagtgcctgcagtggctgaagagccagcctcggtggcccagctggggctggaaccaggtctcctgcccttgttcctggcagcagggacgacgggacttacgattccaacccgtcagcataggtcgctggggcctcggcagtaggcagctgtgcagcttcacctcttggcgaggaggcgtgtgctgcagctacgggccctggggagagtttcgtgaaggctggcacgtgcagcgtccttggcagttggcccaggaactggagccacagagctggtgctgccgctggaatgacaagccctacctctgtgccctgtaccagcagaggcggccccacgtgggctgtgctacatacaggcccccacagcccgcctggatgttcggggacccccacatcaccaccttggatggtgtcagttacaccttcaatgggctgggggacttcctgctggtcggggcccaagacgggaactcctccttcctgcttcagggccgcaccgcccagactggctcagcccaggccaccaacttcatcgcctttgcggctcagtaccgctccagcagcctgggccccgtcacggtccaatggctccttgagcctcacgacgcaatccgtgtcctgctggataaccagactgtgacatttcagcctgaccatgaagacggcggaggccaggagacgttcaacgccaccggagtcctcctgagccgcaacggctctgaggtctccgccagcttcgacggctgggccaccgtctcggtgatcgcgctctccaacatcctccactcctccgccagcctcccgcccgagtaccagaaccgcacggaggggctcctgggggtctggaataacaatccagaggacgacttcaggatgcccaatggctccaccattcccccagggagccctgaggagatgcttttccactttggaatgacctggcagatcaacgggacaggcctccttggcaagaggaatgaccagctgccttccaacttcacccctgttttctactcacaactgcaaaaaaacagctcctgggctgaacatttgatctccaactgtgacggagatagctcatgcatctatgacaccctggccctgcgcaacgcaagcatcggacttcacacgagggaagtcagtaaaaactacgagcaggcgaacgccaccctcaatcagtacccgccctccatcaatggtggtcgtgtgattgaagcctacaaggggcagaccacgctgattcagtacaccagcaatgctgaggatgccaacttcacgctcagagacagctgcaccgacttggagctctttgagaatgggacgttgctgtggacacccaagtcgctggagccattcactctggagattctagcaagaagtgccaagattggcttggcatctgcactccagcccaggactgtggtctgccattgcaatgcagagagccagtgtttgtacaatcagaccagcagggtgggcaactcctccctggaggtggctggctgcaagtgtgacgggggcaccttcggccgctactgcgagggctccgaggatgcctgtgaggagccgtgcttcccgagtgtccactgcgttcctgggaagggctgcgaggcctgccctccaaacctgactggggatgggcggcactgtgcggctctggggagctctttcctgtgtcagaaccagtcctgccctgtgaattactgctacaatcaaggccactgctacatctcccagactctgggctgtcagcccatgtgcacctgccccccagccttcactgacagccgctgcttcctggctgggaacaacttcagtccaactgtcaacctagaacttcccttaagagtcatccagctcttgctcagtgaagaggaaaatgcctccatggcagaggtcaacgcctcggtggcatacagactggggaccctggacatgcgggcctttctccgcaacagccaagtggaacgaatcgattctgcagcaccggcctcgggaagccccatccaacactggatggtcatctcggagttccagtaccgccctcggggcccggtcattgacttcctgaacaaccagctgctggccgcggtggtggaggcgttcttataccacgttccacggaggagtgaggagcccaggaacgacgtggtcttccagcccatctccggggaagacgtgcgcgatgtgacagccctgaacgtgagcacgctgaaggcttacttcagatgcgatggctacaagggctacgacctggtctacagcccccagagcggcttcacctgcgtgtccccgtgcagtaggggctactgtgaccatggaggccagtgccagcacctgcccagtgggccccgctgcagctgtgtgtccttctccatctacacggcctggggcgagcactgtgagcacctgagcatgaaactcgacgcgttcttcggcatcttctttggggccctgggcggcctcttgctgctgggggtcgggacgttcgtggtcctgcgcttctggggttgctccggggccaggttctcctatttcctgaactcagctgaggccttgccttgaaggggcagctgtggcctaggctacctcaagactcacctcatccttaccgcacatttaaggcgccattgcttttgggagactggaaaagggaaggtgactgaaggctgtcaggattcttcaaggagaatgaatactgggaatcaagacaagactataccttatccataggcgcaggtgcacagggggaggccataaagatcaaacatgcatggatgggtcctcacgcagacacacccacagaaggacactagcctgtgcacgcgcgcgtgcacacacacacacacacaagagttcataatgtggtgatggccctaagttaagcaaaatgcttctgcacacaaaactctctggtttacttcaaattaactctatttaaataaagtctctctgactttttgtgtcttcaaaa

SEQ ID NO: 155688 - DNA, 22580 bp, Homo sapiens
  Payload ID: 10597
  Gene Symbol: MUC4
  Gene Name: mucin 4, cell surface associated
  ENST ID: ENST00000627146
  CDS Start-End: 73-21303
gtctgctcctcacactgcagctgctgggccgtggagcttccccagggagccagggggacttttgccgcagccatgaagggggcacgctggaggagggtcccctgggtgtccctgagctgcctgtgtctctgcctccttccgcatgtggtcccaggaaccacagaggacacattaataactggaagtaaaactcctgccccagtcacctcaacaggctcaacaacagcgacactagagggacaatcaactgcagcttcttcaaggacctctaatcaggacatatcagcttcatctcagaaccaccagactaagagcacggagaccaccagcaaagctcaaaccgacaccctcacgcagatgatgacatcaactcttttttcttccccaagtgtacacaatgtgatggagactgttacgcaggagacagctcctccagatgaaatgaccacatcatttccctccagtgtcaccaacacactcatgatgacatcaaagactataacaatgacaacctccacagactccactcttggaaacacagaagagacatcaacagcaggaactgaaagttctaccccagtgacctcagcagtctcaataacagctggacaggaaggacaatcacgaacaacttcctggaggacctctatccaagacacatcagcttcttctcagaaccactggactcggagcacgcagaccaccagggaatctcaaaccagcaccctaacacacagaaccacttcaactccttctttctctccaagtgtacacaatgtgacagggactgtttctcagaagacatctccttcaggtgaaacagctacctcatccctctgtagtgtcacaaacacatccatgatgacatcagagaagataacagtgacaacctccacaggctccactcttggaaacccaggggagacatcatcagtacctgttactggaagtcttatgccagtcacctcagcagccttagtaacagttgatccagaaggacaatcaccagtaactttctcaaggacttctactcaggacacaacagctttttctaagaaccaccagactcagagcgtggagaccaccagagtatctcaaatcaacaccctcaacaccctcacaccggttacaacatcaactgttttatcctcaccaagtggattcaacccaagtggaacagtttctcaggagacattcccttctggtgaaacaaccatctcatccccttccagtgtcagcaatacattcctggtaacatcaaaggtgttcagaatgccaatctccagagactctactcttggaaacacagaggagacatcactatctgtaagtggaaccatttctgcaatcacttccaaagtttcaaccatatggtggtcagacactctgtcaacagcactctcccccagttctctacctccaaaaatatccacagctttccacacccagcagagtgaaggtgcagagaccacaggacggcctcatgagaggagctcattctctccaggtgtgtctcaagaaatatttactctacatgaaacaacaacatggccttcctcattctccagcaaaggccacacaacttggtcacaaacagaactgccctcaacatcaacaggtgctgccactaggcttgtcacaggaaatccatctacaggggcagctggcactattccaagggtcccctctaaggtctcagcaataggggaaccaggagagcccaccacatactcctcccacagcacaactctcccaaaaacaacaggggcaggcgcccagacacaatggacacaagaaacggggaccactggagaggctcttctcagcagcccaagctacagtgtgactcagatgataaaaacggccacatccccatcttcttcacctatgctggatagacacacatcacaacaaattacaacggcaccatcaacaaatcattcaacaatacattccacaagcacctctcctcaggaatcaccagctgtttcccaaaggggtcacactcaagccccgcagaccacacaagaatcacaaaccacgaggtccgtctcccccatgactgacaccaagacagtcaccaccccaggttcttccttcacagccagtgggcactcgccctcagaaattgttcctcaggacgcacccaccataagtgcagcaacaacctttgccccagctcccaccggggatggtcacacaacccaggccccgaccacagcactgcaggcagcacccagcagccatgatgccaccctggggccctcaggaggcacgtcactttccaaaacaggtgcccttactctggccaactctgtagtgtcaacaccagggggcccagaaggacaatggacatcagcctctgccagcacctcacctgacacagcagcagccatgacccatacccaccaggctgagagcacagaggcctctggacaaacacagaccagcgaaccggcctcctcagggtcacgaaccacctcagcgggcacagctaccccttcctcatccggggcgagtggcacaacaccttcaggaagcgaaggaatatccacctcaggagagacgacaaggttttcatcaaacccctccagggacagtcacacaacccagtcaacaaccgaattgctgtccgcctcagccagtcatggtgccatcccagtaagcacaggaatggcgtcttcgatcgtccccggcacctttcatcccaccctctctgaggcctccactgcagggagaccgacaggacagtcaagcccaacttctcccagtgcctctcctcaggagacagccgccatttcccggatggcccagactcagaggacaagaaccagcagagggtctgacactatcagcctggcgtcccaggcaaccgacaccttctcaacagtcccacccacacctccatcgatcacatccagtgggcttacatctccacaaacccagacccacactctgtcaccttcagggtctggtaaaaccttcaccacggccctcatcagcaacgccacccctcttcctgtcacctacgcttcctcggcatccacaggtcacaccacccctcttcatgtcaccgatgcttcctcagtatccacaggtcacgccacccctcttcctgtcaccgacacttcctcagaatccacaggtcacgccacccctcttcctgtcaccagcccttcctcagtatccacaggtcacaccacccctcttcctgtcaccgacacttcctcagaatccacaggtcatgtcacccctcttcctgtcaccagcctttcctcagcatccacaggtgacagcacccctcttcctgtcactgacacttcctcagcatccacaggtcacgtcacccctcttcctgtcaccagcctttcctcagcatccacaggtgacaccacccctcttcctgtcactgacacttcctcagcatccacaggtcacgccacctctcttcctgtcaccgacacttcctcagtatccacaggtcacaccacccctcttcctgtcaccgacacttcctcagcatccacaggtcacgccacctctcttcctgtcaccgacacttcctcagtatccacagctcacgccaccccacttcctgtcaccggcctttcttcagcttccacagatgacaccacccgtcttcctgtcaccgacgtttcctcggcatccacaggtcaggccatccctcttcctgtcaccagcccttcctcagcatccacaggtgacaccacccctcttcctgtcaccgacgcttcctcagcatccacaggtgacaccacctctcttcctgtcaccatcccttcctcagcatcttcaggtcacaccacctctcttcctgtcaccgacgcttcctcagtgtccacaggtcacgccacctctcttcttgtcaccgacgcttcctcagtatccacaggtgacaccacccctcttcctgtcaccgacactaactcagcatccacaggtgacaccacccctcttcatgtcaccgacgcttcctcagtatccacaggtcacgccacctctcttcctgtcaccagcctttcctcagcatccacaggtgacaccacgcctcttcctgtcactagcccttcctcagcatcctcaggtcacaccacccctcttcctgtcaccgacgcttcctcagtacccacaggtcacgccacctctcttcctgtcaccgacgcttcctcagtgtccacaggtcacgccacccctcttcctgtcaccgacgcttcctcagtgtccacaggtcatgccacccctcttccggtcaccgacacttcctcagtatctacaggacaggccacccctcttcctgtcaccagcctttcctcagcatccactggtgacaccacgccgcttcctgtcaccgatacttcctcagcatccacaggtcaggacacccctcttcctgtcaccagcctttcctcagtatccacaggtgacaccacgcctcttcctgtcactagcccttcctcagcatccacaggtcacgccacccctcttcttgtcaccgacgcttcctcagtatccacaggtcacgccacctctcttcttgtcaccgacgcttcctcagtatccacaggtcacgccaccgctcttcatgtcaccgatgcttcctcattatccacaggggacaccacccctcttcctgtcaccagcccttcctcagcatccacaggtgacaccacccctcttcctgtcaccgacacttcctcagcatccacaggtcacgccacctctcttcctgtcaccgacacttcctcagcatccacaggtcacgccacccctcttcctgtcaccgacacttcctcagcatccacaggtcaggccacccctcttcctgtcaccggcccttcctcagcatccacaggtcacgccatccctcttcttgtcaccgacacttcctcagcatccacaggacaggccacccctcttcctgtcaccagcctttcctcagcatccacaggtgacaccacccctcttcctgtcaccgacgcttcctcagtgtccacaggtcacgccacctctcttcctgtcaccagcctttcctcagtatccacaggtgacaccacccctcttcctgtcaccagcccttcctcagcatcctcaggtcacaccacccctcttcctgtcaccgacgcttcctcagtatccacaggtgacaccacccctcttcctgtcaccagcccttcctcagcatcctcaggtcacaccacccctcttcctgtcaccagcccttcctcagcatcctcaggtcacaccacccctcttcctgtcaccgacgcttcctcagcatccacaggtgacaccacccctcttcctgtcaccgacacttcctcagcatccacaggtcacgccacccatcttcctgtcaccggcctttcctcagcttccacaggtgacaccacccgtcttcctgtcaccaacgtttcctcggcatccacaggtcatgccacccctcttcctgtcaccagcacttcctcagcatccacaggtgacaccacccctcttcctggcaccgacacttcctcagtatccacaggtcacaccacccctcttcttgtcaccgacgcttcgtcagtatccacaggtgacaccacccgtcttcctgtcaccagcccttcctcagcatctacaggtcacaccacccctctacctgtcaccgacactccctcagcatccacaggtgacaccacccctcttcctgtcaccaatgcttcctcattatccacacgtcacaccacctctcttcatgtcaccagcccttcctcagcatccacaggtcacgccacctctcttcctgtcaccgacacttcctcagtatccacaggtcatgccacccctcttcatgtcaccagcccttcctcagcatccacaggtgacaccacccctcttcctgtcaccgacacttactcagcatccacaggtcaggccacccctcttcctgtcaccgacacttcctcagcatccacaggtgacaccacccctcttcctgtcaccgacacttcctcagcatccacaggtcacgccacccctcttcctgtcaccaacacttcctcagtatccacaggtcacgccacccctcttcatgtcaccagcccttcctcagcatccacaggtcacaccacccctcttcctgtcaccgacgcttcgtcagtgtccacaggtcacgccacctctcttcctgtcaccgacgcttcctcagtgttcacaggtcacgccacctcgcttcctgtcaccatcccttcctcagcatcctcaggtcacaccacccctcttcctgtcaccgacgcttcctcagtgtccacaggtcacgccacctctcttcctgtcaccgacgcttcctcagtgtccacaggtcacgccacccctcttcctgtcaccgacgcttcctcagtgtccacaggtcacgctacccctcttcctgtcaccgacacttcctcagtatccacaggtcacgccacccctcttcctctcaccagcctttcctcagtatccacaggtgacaccacgcctcttcctgtcaccgacacttcctcagcatccacaggtcaggccacccctcttcctgtcaccagcctttcctcagtatccacaggtgacaccacccctcttcctgtcaccgacacttcctcagcatccacaggtcacgccacctctcttcctgtcaccgacacttcctcagcatccacaggtcacgccacccctcttcctgacaccgacacttcctcagcatccacaggtcacgccacccctcttcctgtcaccgacacttcctcagcatccacaggtcacgccacccttcttcctgtcaccgacacttcctcagcatccataggtcacgccacccctcttcctgtcaccgacacttcctcaatatccacaggtcacgccacccctcttcatgtcaccagcccttcctcagcatccaccggtcacgccaccccgcttcctgtcaccgacacttcctcagcatccacaggtcacgccaaccctcttcatgtcaccagcccttcctcagcatccaccggtcacgccaccccgcttcctgtcaccgacacttcctcagcatccacaggtcacgccacccctcttcctgtcaccagcctttcctcagtatccacaggtgacaccacgcctcttcctgtcactagcccttcctcagcatccacaggtcacaccacccctcttcctgtcaccgacacttcctcagcatccacaggtcaggccaccgctcttcctgtcaccagcacttcctcagcatccacaggtgacaccacccctcttcctgttaccgacacttcctcagcatccacaggtcaggccacccctcttcctgtcaccagcctttcctcagtatccacaggtgacaccacgcctcttcctgtcactagcccttcctcagcatccacaggtcacgccactcctcttcttgtcaccgacgcttcctcagcatccacaggtcaggccacccctcttcctgtcaccgacacttcctcagcatacacaggtgacaccacctctcttcctgtcaccgacacttcctcatcatccacaggtgacaccacccctcttcttgtcaccgagacttcctcagcatccacaggtcacgccacccctcttcatgtcaccagcccttcctcagcatccacaggtgacaccacccctgtgcctgtcaccgacacttcctcagtatccacaggtcacgccacccctcttcctgtcaccggcctttcctcagcttccacaggtgacaccacccgtcttcctgtcaccgacatttcctcggcatccacaggtcaggccacccctcttcctgtcaccaacacttcctcagcatccacaggtcacgccacccctcttcctgtcaccggcctttcctcagcttccacaggtgacaccacccgtcttcctgtcaccgacatttcctcggcatccacaggtcaggccacccctcttcctgtcaccaacacttcctcagtatccacaggtgacaccatgcctcttcctgtcactagcccttcctcagcatccacaggtcacgccacccctcttcctgtcaccagcacttcctcagcatccaccggtcacgccacccctgttcctgtcaccagcacttcctcagcatctacaggtcacaccacccctcttcctgtcaccgacacttcctcagcatccacaggtgacaccacccctcttcctgtcaccagcccttcctcagcatctacaggtcacaccacccctcttcatgtcaccatcccttcctcagcatccacaggtgacaccagcactcttcctgtcaccggcgcttcctcagcatccaccggtcacgccacccctcttcctgtcaccgacacttcctcagtatccacaggtcacgccacccctcttcctgtcaccagcttttcctcagtatccacaggtgacaccacgcctcttcctgtcaccgacacttcctcagtatccacaggtcacgccacccctcttcctgtcaccagcttttcctcagtatccacaggtgacaccacccctcttcctgtcaccgacgcttcctcggcatccaccggtcacgccacccctcttcctgtcaccgacacttcctcagtatccacaggtcacgccacccctcttcctctcaccagcctttcctcagtatccacaggtgacaccacgactcttcctgtcaccgacacttcctcagtatccacaggtcacgccacccctcttcctgtcaccagcttttcctcagtatccacaggtgacaccacccctcttcctgtcaccgacgcttcctcggcatccaccggtcacgccacccctcttcctgtcaccgacacttcctcagtatccaccggtcacgccacgcctcttcctgtcaccagcctttcctcagtatccacaggtgacaccacccctcttcctgtcaccgacgcttcctcggcatccacaggtcaggccacccctcttcctgtcaccagcctttcctcagtatcaacaggtgacaccacgcctcttcctgtcaccatcccttcctcagcatcctcaggtcacaccacctctcttcctgtcaccgacacttcctcagcatccacaggtcaggccacccctcttcctgtcaccagcctttcctcagtatccacaggtgacaccacccctcttcttgtcaccgacgcttcctcagtatccacaggtcacgccacccctcttcctgtcaccgacacttcctcagcatccacaggtgacaccacccgtcttcctgtcacagacacttcctcagcatccacaggtcaggccacccctcttcctgtcaccagcctttcctcagtatccacaggtgacaccacccctcttcttgtcaccaacacttcctcagtatccagaggtcacgccacctctcttcctgtcaccatcccttcctcatcatcctcaggtcacaccacccctcttcctgtcaccagcacttcctcagtatctacaggtcacgtcacccctcttcctgtcaccagcacttcctcagcatccacaggtcacgccacctctcttcctgtcaccgacacttcctcagtatccacaggtcacgccacctctcttcctgtcaccgacacttcctcagtatccacaggtcacgccacccctcttcctgtcaccgacgcttcctcagtgtccacaggtcacgccacgcctcttcctgtcaccgacgcttcctcagcatccacaggtgacaccacccctcttcctgtcaccaacacttcctcagcatccacaggtcaggccacccctcttcctgtcaccagcctttcctcagtatccacaggtgacaccatgcctcttcctgtcactagcccttcctcagcatccacaggtcacgccacccctcttcctgttaccggcctttcctcagcttccacaggtgacaccacccctcttcctgtcactgacacttcctcagcatccacaggtcacgtcacccctcttcctgtcaccagcctttcctcagcatccacaggtgacagcacccctcttcctgtcactgacacttcctcagcatccacaggtcacgtcacccctcttcctgtcaccagcctttcctcagcatccacaggtgacaccacccctcttcctgtcactgacacttcctcagcatccacaggtcacgccacccctcttcatgtcactgatgcttcctcagcatccacaggtcaggccacccttcttcctgtcaccagcctttcctcagtatccacaggtgacaccacgcctcttcctgtcactagcccttcctcagcatccacaggtcacgccacccctcttcttgtcaccgacacttcctcagcatccacaggacacgccacccctcttcctgtcacggacgcttcctcagtgtccacaggtcacgccacctctcttcctgtaaccatccgttcctcaggttccacaggtcacaccacccctcttcctgtcaccgacacttcctcagcatccacaggtcaggccacctctcttcttgtcaccgacacttcctcagtatccacaggtgacaccacgcctcttcctgtcactagcacttcctcagcatccacaggtcacgtcactcctcttcatgtcaccagcccttcctcagcatccacaggtcacgccacccctcttcctgtcaccagcctttcctcagcatccacaggtgacaccatgcctcttcctgtcactagcccttcctcagcatccacaggtgacaccacccctcttcctgtcaccgacgcttcctcagtatccacaggtcacaccacccctcttcctgtcaccagcccttcctcagcatctacaggtcacaccacccctcttcctgtcaccgacactacctcagcatccaaaggtgacaccacccctcttcctgtcaccagcccttcctcagcatctacaggtcacaccacccctcttcctgtcaccgacacttcctcagcatccacaggtgacaccacccctcttcctgtcaccagcccttcctcagcatccacaggtcacgccacccctcttcctgtcaccaatgcttcctcattatccacaggtcacgccacccctcttcatgtcaccagcccttcctcagcatccacaggtcacgccacccctcttcctgtcaccagcacttcctcagcatccaccggtcacgccacctctcttcctgtcaccagcacttcctcagcatccaccggtcacgccacccctcttcctgtcaccgacaattcctcagtatccacaggtcacgccacccctcttcctgtcaccggcctttcctcagctaccacagatgacaccacccgtcttcctgtcaccgacgtttcctcggcatccacaggtcaggccacccctcttcctgtcaccagcctttcctcagtatccacaggtgacaccacgcctcttcctgtcactagcccttcctcagcatccacaggtcacgccagccctcttcttgtcactgacgcttcctcagcatccacaggtcaggccacccctcttcctgtcaccgacacttcctcagtatccacagctcacgccaccccacttcctgtcaccggcctttcttcagcttccacagatgacaccacccgtcttcctgtcaccgacgtttcctcggcatccacaggtcaggccatccctcttcctgtcaccagcccttcctcagcatccacaggtgacaccacccctcttcctgtcaccgacgcttcctcagcatccacaggtgacaccacctctcttcctgtcaccatcccttcctcagcatcttcaggtcacaccacctctcttcctgtcaccgacgcttcctcagtgtccacaggtcacgccacctctcttcttgtcaccgacgcttcctcagtatccacaggtgacaccacccctcttcctgtcaccgacactaactcagcatccacaggtgacaccacccctcttcatgtcaccgacgcttcctcagtatccacaggtcacgccacctctcttcctgtcaccagcctttcctcagcatccacaggtgacaccacgcctcttcctgtcactagcccttcctcagcatcctcaggtgacaccacccctcttcctgtcaccgacacttcctcagcatccacaggtcacgccacccatcttcctgtcaccggcctttcctcagcttccacaggtgacaccacccgtcttcctgtcaccaacgtttcctcggcatccacaggtcatgccacccctcttcctgtcaccagcacttcctcagcatccacaggtgacaccacccctcttcctggcaccgacacttcctcagtatccacaggtcacaccacccctcttcttgtcaccgacgcttcgtcagtatccacaggtgacaccacccgtcttcctgtcaccagcccttcctcagcatctacaggtcacaccacccctcttcatgtcaccgatgcttcctcagtatccacaggtcacaccacccctcttcctgtcaccgacacttcctcagcatccacaggtcaggccacctctcttcttgtcaccgacacttcctcagtatccacaggtgacaccacgcctcttcctgtcactagcacttcctcagcatccacaggtcacgtcactcctcttcatgtcaccagcccttcctcagcatccacaggtcacgccacccctcttcctgtcaccagcctttcctcagcatccacaggtgacaccacccctcttcctgtcaccgacacttcctcagtatccacaggtcacaccacccctcttcctgtcaccagcccttcctcagcatctacaggtcacaccacccctcttcctgtcaccgacacttcctcagcatccaaaggtgacaccacccctcttcctgtcaccagcccttcctcagcatctacaggtcacaccacccctcttcctgtcaccgacacttcctcagcatccacaggtgacaccacccctcttcctgtcaccaatgcttcctcattatccacaggtcacgccacccctcttcatgtcaccagcccttcctcagcatccacaggtcacgccacccctcttcctgtcaccagcacttcctcagcatccaccggtcacgccacccctcttcctgtcaccagcacttcctcagcatccaccggtcacgccacccctcttcctgtcaccgacaattcctcagtatccacaggtcatgccacccctcttcctgtcaccggcctttcctcagctaccacagatgacaccacccgtcttcctgtcaccgacgtgtcctcggcatccacaggtcaggccacccctcttcctgtcaccagcctttcctcagtatccacaggtgacaccacgcctcttcctgtcactagcccttcctcagcatccacaggtcacgccagccctcttcttgtcactgacgcttcctcagcatccacaggtcaggccacccctcttcctgtcaccgacacttcctcagtatccacagctcacgccaccccacttcctgtcaccggcctttcctcagcttccacagatgacaccacccgtcttcctgtcaccgacgtttcctcggcatccacaggtcaggccatccctcttcctgtcaccagcccttcctcagcatccacaggtgacaccacccctcttcctgtcaccgacgcttcctcagcatccacaggtgacaccacctctcttcctgtcaccatcccttcctcagcatcttcaggtcacaccacctctcttcctgtcaccgacgcttcctcagtgtccacaggtcacgccacctctcttcttgtcaccgacgcttcctcagtatccacaggtgacaccacccctcttcctgtcaccgacactaactcagcatccacaggtgacaccacccctcttcatgtcaccgacgcttcctcagtatccacaggtcacgccacctctcttcctgtcaccagcctttcctcagcatccacaggtgacaccacgcctcttcctgtcactagcccttcctcagcatcctcaggtcacaccacctctcttcctgtcaccgacgcttcctcagtgtccacaggtcacgccacctctcttcctgtcaccatcccttcctcagcatcctcaggtcacaccacccctcttcctgtcaccgacgcttcctcagtacccacaggtcacgccacctctcttcctgtcaccgacgcttcctcagtgtccacaggtcacgccacccctcttcctgtcaccgacgcttcctcagtgtccacaggtcatgccacccctcttccggtcaccgacacttcctcagtatctacaggacaggccacccctcttcctgtcaccagcctttcctcagcatcatccactggtgacaccacgccgcttcctgtcactgatacttcctcagcatccacaggtcaggacacccctcttcctgtcaccagccttttctcagtatccacaggtgacaccacgcctcttcctgtcactagcccttcctcagcatccacaggtcacgccacccatcttcttgtcaccgacgcttcctcagtatccacaggtcacgccacctctcttcttgtcaccgacgcttcctcagtatccacaggtcacgccaccgctcttcatgtcaccgatgcttcctcattatccacaggggacaccacccctcttcctgtcaccagcccttcctcagcatccacaggtgacaccacccctcttcctgtcaccgacacttcctcagtatccacaggtcacgccacctctcttcctgtcactgacacttcctcagcatccacaggtcacgccacctctcttcctgtcaccgacacttcctcagcatccacaggtcaggccacccctcttcctgtcaccagcccttcctcagcatccacaggtcacgccatccctcttcttgtcaccgacacttcctcagcatccacaggacaggccacccctcttcctgtcaccagcctttcctcagcatccacaggtgacaccacccctcttcctgtcaccgatgcttcctcagtgtccacaggtcacgccacctctcttcctgtcaccagcctttcctcagtatccacaggtgacaccacccctcttcctgtcactagcccttcctcagcatccacaggtcacgccacccctcttcatgtcaccagcccttcctcagcatccacaggtcacgccacccctcttcctgtcaccagcctttcctcagcatccacaggtgacaccacgcctcttcctgtcactagcccttcctcagcatccacaggtcacgccacccctcttcatgtcaccgacgcttcctcagtatccacaggtgacaccacccctcttcctgtcaccagcccttcctcagcatcctcaggtcacaccacccctcttcctgtcaccgacgcttcctcagcatccacaggtgacaccacccctcttcctgtcaccgacacttcctcagcatccacaggtcacgccacccatcttcctgtcaccggcctttcctcagcttccacaggtgacaccacccgtcttcctgtcaccgacgtttcctcggcatccacaggtcatgccacccctcttcctgtcaccagcacttcctcagcatccacaggtgacaccacccctcttcctggcaccgacacttcctcagtatccacaggtcacaccacccctcttcttgtcaccgacgcttcgtcagtatccacaggtgacaccacccgtcttcctgtcaccagcccttcctcagcatctacaggtcacaccacccctctacctgtcaccgacactccctcagcatccacaggtgacaccacccctcttcctgtcaccaatgcttcctcattatccacacgtcacgccacctctcttcatgtcaccagcccttcctcagcatccaccggtcacgccacccctcttcctgttaccgacacttccgcagcatccacaggtcacgccacccctcttcctgtcaccagcacttcctcagcatccacaggtgacaccacccctcttcctgtcaccgacacttcctcagcatccacaggtcacgccacccctcttcctgtcaccaacacttcctcagtatccacaggtcacgccacccctcttcatgtcaccagcccttcctcagcatccacaggtcacaccacccctcttcctgtcaccgacgcttcgtcagtgtccacaggtcacgccacctctcttcctgtcaccgacgcttcctcagtgtccacaggtcacgccacccctcttcctgtcaccgacgcttcctcagtgtccacaggtcacgctacccctcttcctctcaccagcctttcctcagtatccacaggtgacaccacgcctcttcctgtcaccgacacttcctcagcatccacaggtcaggccacccctcttcctgtcaccagcctttcctcagtatccacaggtgacaccacccctcttcctgtcaccgacacttcctcagcatccacaggtcacgccacctctcttcctgtcaccgacacttcctcagcatccacaggtcacgccacccctcttcctgtcaccgacacttcctcaatatccacaggtcacgccacccctcttcatgtcaccagcccttcctcagcatccaccggtcacgccaccccgcttcctgtcaccgacacttcctcagcatccacaggtcacgccacccctcttcctgtcaccagcctttcctcagtatccacaggtgacaccacgcctcttcctgtcactagcccttcctcagcatccacaggtcacgccactcctcttcttgtcaccgacgcttcctcagcatccacaggtcaggccacccctcttcctgtcaccagcctttcctcagtatccacaggtgacaccacgcctcttcctgtcactagcccttcctcagcatccaccggtcatgccacctctcttcctgtcaccgacacttcctcagcatccacaggtgacaccacctctcttcctgtcaccgacacttcctcagcatacacaggtgacaccacctctcttcctgtcaccgacacttcctcatcatccacaggtgacaccacccctcttcttgtcaccgagacttcctcagcatccacaggtgacaccacccctgtgcctgtcaccgacacttcctcagtatccacaggtcacgccacccctcttcctgtcaccggcctttcctcagcttccacaggtgacaccacccgtcttcctgtcaccgacatttcctcggcatccacaggtcaggccacccctcttcctgtcaccaacacttcctcagtatccacaggtgacaccatgcctcttcctgtcactagcccttcctcagcatccacaggtcacgccacccctcttcctgtcaccagcacttcctcagcatccaccggtcacgccacccctgttcctgtcaccagcacttccttagcatccacaggtcacaccacccctcttcctgtcaccagcccttcctcagcatctacaggtcacaccacccctcttcctgtcaccgacacttcctcagcatccacaggtgacaccacccctcttcctgtcaccaatgcttcctcattatccacaggacacaccacccctcttcatgtcaccatcccttcctcagcatccacaggtgacaccagcactcttcctgtcaccggcgcttcctcagcatccaccggtcacgccacccctcttcctgtcaccgacacttcctcagtatccacaggtcacgccacccctcttcctgtcaccagcttttcctcagtatccacaggtgacaccacccctcttcctgtcaccgacgcttcctcggcatccaccggtcacgccacccctcttcctgtcaccgacacttcctcagcatccacaggtgacaccacccctcttcctgtcaccgacgcttcctcggcatccacaggtcaggccacccctcttcctgtcaccagcctttcctcagtatcaacaggtgacaccacgcctcttcctgtcaccatcccttcctcagcatcctcaggtcacaccacctctcttcctgtcagcgacacttcctcagcatccacaggtcaggccacccctcttcctgtcaccagcctttcctcagtatccacaggtgacaccacccctcttcttgtcaccgacgcttcctcagtatccacaggtcacgccacccctcttcctgtcaccgacacttcctcagcatccacaggtgacaccacccgtcttcctgtcacggacacttcctcagcatccacaggtcaggccacccctcttcctgtcaccagcctttcctcagtatccacaggtgacaccacccctcttcttgtcaccaacacttcctcagtatccacaggtcacgccacctctcttcctgtcaccatcccttcctcatcatcctcaggtcacaccacccctcttcctgtcaccagcacttcctcagtatctacaggtcacgtcacccctcttcatgtcaccagcccttcctcatcatccacaggtcaggccacccctcttcctgtcaccagcacttcctcagtatctacaggtcacgtcacccctcttcatgtcaccagcccttcctcagcatccacaggtcacgccacccctcttcctgtcaccagcacttcctcagcatccacaggtcacgccacccctcttcctgtcaccgacgcttcctcagtgtccacaggtcacgccacgcctcttcctgtcaccgacacttcctcagcatccacaggtgacaccacccctcttcctgtcaccgacacttcctcagcatccacaggtcaggccacccctcttcctgtcaccagcctttcctcagtatccacaggtcacgccacccctcttgctgtcagcagtgctacctcagcttccacagtatcctcggactcccctctgaagatggaaacatcaggaatgacaacaccgtcactgaagacagacggtgggagacgcacagccacatcaccaccccccacaacctcccagaccatcatttccaccattcccagcactgccatgcacacccgctccacagctgcccccatccccatcctgcctgagagaggagtttccctcttcccctatggggcagacgccggggacctggagttcgtcaggaggaccgtggacttcacctccccactcttcaagccggcgactggcttcccccttggctcctctctccgtgattccctctacttcacagacaatggccagatcatcttcccagagtcagactaccagattttctcctaccccaacccactcccaacaggcttcacaggccgggaccctgtggccctggtggctccgttctgggacgatgctgacttctccactggtcgggggaccacattttatcaggaatacgagacgttctatggtgaacacagcctgctagtccagcaggccgagtcttggattagaaagatgacaaacaacgggggctacaaggccaggtgggccctaaaggtcacgtgggtcaatgcccacgcctatcctgcccagtggaccctcgggagcaacacctaccaagccatcctctccacggacgggagcaggtcctatgccctgtttctctaccagagcggtgggatgcagtgggacgtggcccagcgctcaggcaacccggtgctcatgggcttctctagtggagatggctatttcgaaaacagcccactgatgtcccagccagtgtgggagaggtatcgccctgatagattcctgaattccaactcaggcctccaagggctgcagttctacaggctacaccgggaagaaaggcccaactaccgtctcgagtgcctgcagtggctgaagagccagcctcggtggcccagctggggctggaaccaggtctcctgcccttgttcctggcagcagggacgacgggacttacgattccaacccgtcagcataggtcgctggggcctcggcagtaggcagctgtgcagcttcacctcttggcgaggaggcgtgtgctgcagctacgggccctggggagagtttcgtgaaggctggcacgtgcagcgtccttggcagttggcccaggaactggagccacagagctggtgctgccgctggaatgacaagccctacctctgtgccctgtaccagcagaggcggccccacgtgggctgtgctacatacaggcccccacagcccgcctggatgttcggggacccccacatcaccaccttggatggtgtcagttacaccttcaatgggctgggggacttcctgctggtcggggcccaagacgggaactcctccttcctgcttcagggccgcaccgcccagactggctcagcccaggccaccaacttcatcgcctttgcggctcagtaccgctccagcagcctgggccccgtcacggtccaatggctccttgagcctcacgacgcaatccgtgtcctgctggataaccagactgtgacatttcagcctgaccatgaagacggcggaggccaggagacgttcaacgccaccggagtcctcctgagccgcaacggctctgaggtctcggccagcttcgacggctgggccaccgtctcggtgatcgcgctctccaacatcctccacgcctccgccagcctcccgcccgagtaccagaaccgcacggaggggctcctgggggtctggaataacaatccagaggacgacttcaggatgcccaatggctccaccattcccccagggagccctgaggagatgcttttccactttggaatgacctggcagatcaacgggacaggcctccttggcaagaggaatgaccagctgccttccaacttcacccctgttttctactcacaactgcaaaaaaacagctcctgggctgaacatttgatctccaactgtgacggagatagctcatgcatctatgacaccctggccctgcgcaacgcaagcatcggacttcacacgagggaagtcagtaaaaactacgagcaggcgaacgccaccctcaatcagtacccgccctccatcaatggtggtcgtgtgattgaagcctacaaggggcagaccacgctgattcagtacaccagcaatgctgaggatgccaacttcacgctcagagacagctgcaccgacttggagctctttgagaatgggacgttgctgtggacacccaagtcgctggagccattcactctggagattctagcaagaagtgccaagattggcttggcatctgcactccagcccaggactgtggtctgccattgcaatgcagagagccagtgtttgtacaatcagaccagcagggtgggcaactcctccctggagctctggggagctctttcctgtgtcagaaccagtcctgccctgtgaattactgctacaatcaaggccactgctacatctcccagactctgggctgtcagcccatgtgcacctgccccccagccttcactgacagccgctgcttcctggctgggaacaacttcagtccaactgtcaacctagaacttcccttaagagtcatccagctcttgctcagtgaagaggaaaatgcctccatggcagaagtcaacgcctcggtggcatacagactggggaccctggacatgcgggcctttctccgcaacagccaagtggaacgaatcgattctgcagcaccggcctcgggaagccccatccaacactggatggtcatctcggagttccagtaccgccctcggggcccggtcattgacttcctgaacaaccagctgctggccgcggtggtggaggcgttcttataccacgttccacggaggagtgaggagcccaggaacgacgtggtcttccagcccatctccggggaagacgtgcgcgatgtgacagccctgaacgtgagcacgctgaaggcttacttcagatgcgatggctacaagggctacgacctggtctacagcccccagagcggcttcacctgcgtgtccccgtgcagtaggggctactgtgaccatggaggccagtgccagcacctgcccagtgggccccgctgcagctgtgtgtccttctccatctacacggcctggggcgagcactgtgagcacctgagcatgaaactcgacgcgttcttcggcatcttctttggggccctgggcggcctcttgctgctgggggtcgggacgttcgtggtcctgcgcttctggggttgctccggggccaggttctcctatttcctgaactcagctgaggccttgccttgaaggggcagctgtggcctaggctacctcaagactcacctcatccttaccgcacatttaaggcgccattgcttttgggagactggaaaagggaaggtgactgaaggctgtcaggattcttcaaggagaatgaatactgggaatcaagacaagactataccttatccataggcgcaggtgcacagggggaggccataaagatcaaacatgcatggatgggtcctcacgcagacacacccacagaaggacactagcctgtgcacgcgcgcgtgcacacacacacacacacacacgagttcataatgtggtgatggccctaagttaagcaaaatgcttctgcacacaaaactctctggtttacttcaaattaactctatttaaataaagtctctctgactttttgtgtctccaaaa

SEQ ID NO: 155689 - DNA, 16289 bp, Homo sapiens
  Payload ID: 10597
  Gene Symbol: MUC4
  Gene Name: mucin 4, cell surface associated
  ENST ID: ENST00000630127
  CDS Start-End: 1-13211
gaaccacagaggacacattaataactggaagtaaaactgctgccccagtcacctcaacaggctcaacaacagcgacactagagggacaatcaactgcagcttcttcaaggacctctaatcaggacatatcagcttcatctcagaaccaccagactaagagcacggagaccaccagcaaagctcaaaccgacaccctcacgcagatgatgacatcaactcttttttcttccccaagtgtacacaatgtgatggagacagctcctccagatgaaatgaccacatcatttccctccagtgtcaccaacacactcatgatgacatcaaagactataacaatgacaacctccacagactccactcttggaaacacagaagagacatcaacagcaggaactgaaagttctaccccagtgacctcagcagtctcaataacagctggacaggaaggacaatcacgaacaacttcctggaggacctctatccaagacacatcagcttcttctcagaaccactggactcggagcacgcagaccaccagggaatctcaaaccagcaccctaacacacagaaccacttcaactccttctttctctccaagtgtacacaatgtgacagggactgtttctcagaagacatctccttcaggtgaaacagctacctcatccctctgtagtgtcacaaacacatccatgatgacatcagagaagataacagtgacaacctccacaggctccactcttggaaacccaggggagacatcatcagtacctgttactggaagtcttatgccagtcacctcagcagccttagtaacatttgatccagaaggacaatcaccagcaactttctcaaggacttctactcaggacacaacagctttttctaagaaccaccagactcagagcgtggagaccaccagagtatctcaaatcaacaccctcaacaccctcacaccggttacaacatcaactgttttatcctcaccaagtggattcaacccaagtggaacagtttctcaggagacattcccttctggtgaaacaaccacctcatccccttccagtgtcagcaatacattcctggtaacatcaaaggtgttcagaatgccaacctccagagactctactcttggaaacacagaggagacatcactatctgtaagtggaaccatttctgcaatcacttccaaagtttcaaccatatggtggtcagacactctgtcaacagcactctcccccagttctctacctccaaaaatatccacagctttccacacccagcagagtgaaggtgcagagaccacaggacggcctcatgagaggagctcattctctccaggtgtgtctcaagaaatatttactctacatgaaacaacaacatggccttcctcattctccagcaaaggccacacaacttggtcacaaacagaactgccctcaacatcaacaggtgctgccactaggcttgtcacaggaaatccatctacagggacagctggcactattccaagggtcccctctaaggtctcagcaataggggaaccaggagagcccaccacatactcctcccacagcacaactctcccaaaaacaacaggggcaggcgcccagacacaatggacacaagaaacggggaccactggagaggctcttctcagcagcccaagctacagtgtgactcagatgataaaaacggccacatccccatcttcttcacctatgctggatagacacacatcccaacaaattacaacggcaccatcaacaaatcattcaacaatacattccacaagcacctctcctcaggaatcaccagctgtttcccaaaggggtcacactcaagccccgcagaccacacaagaatcacaaaccacgaggtccgtctcccccatgactgacaccaagacagtcaccaccccaggttcttccttcacagccagtgggcactcgccctcagaaattgttcctcaggacgcacccaccataagtgcagcaacaacctttgccccagctcccaccggggatggtcacacaacccaggccccgaccacagcactgcaggcagcacccagcagccatgatgccaccctggggccctcaggaggcacgtcactttccaaaacaggtgcccttactctggccaactctgtagtgtcaacaccagggggcccagaaggacaatggacatcagcctctgccagcacctcacctgacacagcagcagccatgacccatacccaccaggctgagagcacagaggcctctggacaaacacagaccagcgaaccggcctcctcagggtcacgaaccacctcagcgggcacagctaccccttcctcatccggggcgagtggcacaacaccttcaggaagcgaaggaatatccacctcaggagagacgacaaggttttcatcaaacccctccagggacagtcacacaacccagtcaacaaccgaattgctgtccgcctcagccagtcatggtgccatcccagtaagcacaggaatggcgtcttcgatcgtccccggcacctttcatcccaccctctctgaggcctccactgcagggagaccgacaggacagtcaagcccaacttctcccagtgcctctcctcaggagacagccgccatttcccggatggcccagactcagaggacaagaaccagcagagggtctgacactatcagcctggcgtcccaggcaaccgacaccttctcaacagtcccacccacacctccatcgatcacatccactgggcttacatctccacaaaccgagacccacactctgtcaccttcagggtctggtaaaaccttcaccacggccctcatcagcaacgccacccctcttcctgtcacctacgcttcctcggcatccacaggtcacaccacccctcttcatgtcaccgatgcttcctcagtatccacaggtcacgccacccctcttcctgtcaccagcccttcctcagtatccacaggtcacaccacccctcttcctgtcaccgacacttcctcagaatccacaggtcacgtcacccctcttcctgtcaccagcttttcctcagcatccacaggtgacagcacccctcttcctgtcactgacacttcctcagcatccacaggtcacgtcacccctcttcctgtcaccagcctttcctcagcatccacaggtgacaccacccctcttcctgtcactgacacttcctcagcatccacaggtcacgccacctctcttcctgtcaccgacacttcctcagtatccacaggtcacaccacccctcttcctgtcaccgacacttcctcagcatccacaggtcacgccacctctcttcctgtcaccgacacttcctcagtatccacaggtcacaccacccctcttcatgtcactgatgcttcctcagcatccacaggtcaggccacccctcttcctgtcaccagcctttcctcagtatccacaggtgacaccacgcctcttcctgtcactagcccttcctcagcatccacaggtcacgccacccctcttcttgtcaccgacacttcctcagcatccacaggacacgccacccctcttcctgtcaccgacgcttcctcagtgtccacagatcacgccacctctcttcctgtaaccatcccttccgcagcatccacaggtcacaccacccctcttcctgtcaccgacacttcctcagcatccacaggtcaggccacctctcttcttgtcaccgacacttcctcagtatccacaggtgacaccacgcctcttcctgtcactagcacttcctcagcatccacaggtcacgtcactcctcttcatgtcaccagcccttcctcagcatccacaggtcacgccacccctcttcctgtcaccagcctttcctcagcatccacaggtgacaccatgcctcttcctgtcactagcccttcctcagcatccacaggtgacaccacccctcttcctgtcaccgacgcttcctcagtatccacaggtcacaccacccctcttcatgtcactgatgcttcctcagcatccacaggtcaggccacccctcttcctgtcaccagcctttcctcagtatccacaggtgacaccacgcctcttcctgtcactagcccttcctcagcatccacaggtcacgccacccctcttcttgtcaccgacacttcctcagcatccacaggacacgccacccctcttcctgtcaccgacgcttcctcagtgtccacagatcacgccacctctcttcctgtaaccatcccttccgcagcatccacaggtcacaccacccctcttcctgtcaccgacacttcctcagcatccacaggtcaggccacctctcttcttgtcaccgacacttcctcagtatccacaggtgacaccacgcctcttcctgtcactagcacttcctcagcatccacaggtcacgtcactcctcttcatgtcaccagcccttcctcagcatccacaggtcacgccacccctcttcctgtcaccagcctttcctcagcatccacaggtgacaccatgcctcttcctgtcactagcccttcctcagcatccacaggtgacaccacccctcttcctgtcaccgacgcttcctcagtatccacaggtcacaccacccctcttcctgtcaccagcccttcctcagcatctacaggtcacaccacccctcttcctgtcaccgacacttcctcagcatccaaaggtgacaccacccctcttcctgtcaccagcccttcctcagcatctacaggtcacaccacccctcttcctgtcaccgacacttcctcagcatccacaggtgacaccacccctcttcctgtcaccaatgcttcctcattatccacaggtcacgccacccctcttcatgtcaccagcccttcctcagcatccacaggtcacgccacccctcttcctgtcaccagcacttcctcagcatccaccggtcacgccacccctcttcctgtcaccggcctttcctcagctaccacagatgacaccacccgtcttcctgtcaccgacgtttcctcggcatccacaggtcaggccacccctcttcctgtcaccagcctttcctcagtatccacaggtgacaccacgcctcttcctgtcactagcccttcctcagcatccacaggtcacgccagccctcttcttgtcactgacgcttcctcagcatccacaggtcaggccacccctcttcctgtcaccgacacttcctcagtatccacagctcacgccaccccacttcctgtcaccggcctttcttcagcttccacagatgacaccacccgtcttcctgtcaccgacgtttcctcggcatccacaggtcaggccatccctcttcctgtcaccagcccttcctcagcatccacaggtgacaccacccctcttcctgtcaccgacgcttcctcagcatccacaggtgacaccacctctcttcctgtcaccatcccttcctcagcatcttcaggtcacaccacctctcttcctgtcaccgacgcttcctcagtgtccacaggtcacgccacctctcttcttgtcaccgacgcttcctcagtatccacaggtgacaccacccctcttcctgtcaccgacactaactcagcatccacaggtgacaccacccctcttcatgtcaccgacgcttcctcagtatccacaggtcacgccacctctcttcctgtcaccagcctttcctcagcatccacaggtgacaccacgcctcttcctgtcactagcccttcctcagcatcctcaggtcacaccacccctcttcctgtcaccgacgcttcctcagtacccacaggtcacgccacctctcttcctgtcaccgacgcttcctcagtgtccacaggtcacgccacccctcttcctgtcaccgacgcttcctcagtgtccacaggtcatgccacccctcttccggtcaccgacacttcctcagtatctacaggacaggccacccctcttcctgtcaccagcctttcctcagcatccactggtgacaccacgccgcttcctgtcaccgatacttcctcagcatccacaggtcaggacacccctcttcctgtcaccagcctttcctcagtatccacaggtgacaccacgcctcttcctgtcactaacccttcctcagcatccacaggtcacgccacccctcttcttgtcaccgacgcttcctcaatatccacaggtcacgccacctctcttcttgtcaccgacgcttcctcagtatccacaggtcacgccaccgctcttcatgacaccgatgcttcctcattatccacaggggacaccacccctcttcctgtcaccagcccttcctcaacatccacaggtgacaccacccctcttcctgtcaccgaaacttcctcagtatccacaggtcacgccacctctcttcctgtcaccgacacttcctcagcatccacaggtcacgccacctctcttcctgtcaccgacacttcctcagcatccacaggtcacgccacccctcttcctgtcaccgacacttcctcagcatccacaggtcaggccacccctcttcctgtcaccagcccttcctcagcatccacaggtcacgccatccctcttcttgtcaccgacacttcctcagcatccacaggacaggccacccctcttcctgtcaccagcctttcctcagcatccacaggtgacaccacccctcttcctgtcaccgacgcttcctcagtgtccacaggtcacgccacctctcttcctgtcaccagcctttcctcagtatccacaggtgacaccactcctcttcctgtcactagcccttcctcagcatccacaggtcacgccacccctcttcatgtcaccgacgcttcctcagcatccacaggtcacgccacccctcttcctgtcaccagcctttcctcagcatccacaggtgacaccacgcctcttcctgtcactagcccttcctcagcatccacaggtcacgccacccctcttcatgtcaccgacgcttcctcagtatccacaggtgacaccacccctcttcctgtcaccagctcttcctcagcatcctcaggtcacaccacccctcttcctgtcaccgacgcttcctcagcatccacaggtgacaccacccctcttcctgtcaccgacacttcctcagcatccacaggtcacgccacccatcttcctgtcaccggcctttcctcagcttccacaggtgacaccacccgtcttcctgtcaccaacgtttcctcggcatccacaggtcatgccacccctcttcctgtcaccagcacttcctcagcatccacaggtgacaccacccctcttcctggcaccgacacttcctcagtatccacaggtcacaccacccctcttcttgtcaccgacgcttcgtcagtatccacaggtgacaccacccgtcttcctgtcaccagcccttcctcagcatctacaggtcacaccacccctctacctgtcaccgacactccctcagcatccacaggtgacaccacccctcttcctgtcaccaatgcttcctcattatccacacgtcacgccacctctcttcatgtcaccagcccttcctcagcatccacaggtcacgccacctctcttcctgtcaccgacacttccgcagcatccacaggtcacgccacccctcttcctgtcaccagcacttcctcagcatccacaggtgacaccacccctcttcctgtcaccgacacttactcagcatccacaggtcaggccacccctcttcctgtcaccagcctttcctcagtatccacaggtgacaccacgcctcttcctgtcactagcccttcctcagcatccacaggtcacgccactcctcttcttgtcaccgacgcttcctcagcatccacaggtcaggccacccctcttcctgtcaccagcctttcctcagtatccacaggtgacaccacgcctcttcctgtcactagcccttcctcagcatccaccggtcatgccacctctcttcctgtcaccgacacttcctcagcatccacaggtgacaccacctctcttcctgtcaccgacacttcctcagcatacacaggtgacaccacctctcttcctgtcaccgacacttcctcatcatccacaggtgacaccacccctcttcttgtcaccgagacttcctcagtatccacaggtgacaccacccctcttcctgtcaccgacacttcctcagcatccacaggtcacgccacccctcttcctgtcaccaacacttcctcagtatccacaggtcacgccacccctcttcatgtcaccagcccttcctcagcatccacaggtcacaccacccctcttcctgtcaccgacgcttcgtcagtgtccacaggtcacgccacctctcttcctgtcaccgacgcttcctcagtgttcacaggtcatgccacctctcttcctgtcaccatcccttcctcagcatcctcaggtcacaccacccctcttcctgtcaccgacgcttcctcagtgtccacaggtcacgccacctctcttcctgtcaccgacgcttcctcagtgtccacaggtcatgccacccctcttcctgtcaccgacgcttcctcagtgtccacaggtcacgctacccctcttcctctcaccagcctttcctcagtatccacaggtgacaccacgcctcttcctgtcaccgacacttcctcagcatccacaggtcaggccacccctcttcctgtcaccagcctttcctcagtatccacaggtgacaccacccctcttcctgtcaccgacacttcctcagcatccacaggtcacgccacctctcttcctgtcaccgacacttcctcagcatccacaggtcacgccacccctcttcctgacaccgacacttcctcagcatccacaggtcacgccacccttcttcctgtcaccgacacttcctcagcatccataggtcacgccacctctcttcctgtcaccgacacttcctcaatatccacaggtcacgccacccctcttcatgtcaccagcccttcctcagcatccaccggtcacgccaccccgcttcctgtcaccgacacttcctcagcatccacaggtcacgccaaccctcttcatgtcaccagcccttcctcagcatccaccggtcacgccaccccgcttcctgtcaccgacacttcctcagcatccacaggtcacgccacccctcttcctgtcaccagcctttcctcagtatccacaggtgacaccacgcctcttcctgtcactagcccttcctcagcatccacaggtcacaccacccctcttcctgtcaccgacacttcctcagcatccacaggtcaggccaccgctcttcctgtcaccagcacttcctcagcatccacaggtgacaccacccctcttcctgtcaccgacacttcctcagcatccacaggtcaggccacccctcttcctgtcaccagcctttcctcagtatccacaggtgacaccacgcctcttcctgtcactagcccttcctcagcatccacaggtcacgccactcctcttcttgtcaccgacgcttcctcagcatccacaggtcaggccacccctcttcctgtcaccagcctttcctcagtatccacaggtgacaccacgcctcttcctgtcactagcccttcctcagcatccaccggtcatgccacctctcttcctgtcaccgacacttcctcagcatccacaggtgacaccacctctcttcctgtcaccgacacttcctcagcatacacaggtgacaccacctctcttcctgtcaccgacacttcctcatcatccacaggtgacaccacccctcttcttgtcaccgagacttcctcagtatccacaggtcacgccactcctcttcttgtcaccgacgcttcctcagcatccacaggtcacgccacccctcttcatgtcaccagcccttcctcagcatccacaggtgacaccacccctgtgcctgtcaccgacacttcctcagtatccacaggtcacgccacccctcttcctgtcaccggcctttcctcagcttccacaggtgacaccacccgtcttcctgtcaccgacatttcctcggcatccacaggtcaggccacccctcttcctgtcaccaacacttcctcagtatccacaggtgacaccatgcctcttcctgtcactagcccttcctcagcatccacaggtcacgccacccctcttcctgtcaccagcacttcctcagcatccaccggtcacgccacccctgttcctgtcaccagcacttcctcagcatctacaggtcacaccacccctcttcctgtcaccgacacttcctcagcatccacaggtgacaccacccctcttcctgtcaccagcccttcctcagcatctacaggtcacaccacccctcttcatgtcaccatcccttcctcagcatccacaggtgacaccagcactcttcctgtcaccggcgcttcctcagcatccaccggtcacgccacccctcttcctgtcaccgacacttcctcagtatccaccggtcacgccacgcctcttcctgtcaccagcctttcctcagtatccacaggtgacaccacccctcttcctgtcaccgacgcttcctcggcatccacaggtcaggccacccctcttcctgtcaccagcctttcctcagtatccacaggtgacaccacccctcttcttgtcaccgacgcttcctcagtatccacaggtcacgccacccctcttcctgtcaccgacacttcctcagcatccacaggtgacaccacccgtcttcctgtcacggacacttcctcagcatccacaggtcaggccacccctcttcctgtcaccagcctttcctcagtatccacaggtgacaccacccctcttcttgtcaccgacgcttcctcagtatccacaggtcacgccacccctcttcctgtcaccgacacttcctcagcatccacaggtgacaccacccgtcttcctgtcacggacacttcctcagcatccacaggtcaggccacccctcttcctgtcaccatcccttcctcatcatcctcaggtcacaccacccctcttcctgtcaccagcacttcctcagtatctacaggtcacgtcacccctcttcatgtcaccagcccttcctcagcatccacaggtcacgtcacccctcttcctgtcaccagcacttcctcagcatccacaggtcacgccacccctcttcttgtcaccgacgcttcctcagtgtccacaggtcacgccacgcctcttcctgtcaccgacgcttcctcagcatccacaggtgacaccacccctcttcctgtcaccgacacttcctcagcatccacaggtcaggccacccctcttcctgtcaccagcctttcctcagtatccacaggtgacaccacccctcttcctgtcaccgacgcttcctcagcatccacaggtcacgccacccctcttcctgtcaccatcccttcctcagtatccacaggtgacaccatgcctcttcctgtcactagcccttcctcagcatccacaggtcacgccacccctcttcctgttaccggcctttcctcagcttccacaggtgacaccacccctcttcctgtcaccgacacttcctcagcatccacacgtcacgccacccctcttcctgtcaccgacacttcctcagcttccacagatgacaccacccgtcttcctgtcaccgacgtttcctcggcatccacaggacatgccacccctcttcctgtcaccagcacttcctcagcatccacaggtgacaccacccctcttcctgtcaccgacacttcctcagtatccacaggtcacgccacctctcttcctgtcaccagccgttcctcagcatccacaggtcacgccaccccccttcctgtcaccgacacttcctcagtatccacaggtcacgccacccctcttcctgtcaccagcacttcctcagtatctacaggtcacgccacccctcttcctgtcaccagcccttcctcagcatccacaggtcacgccacccctgttcctgtcaccagcacttcctcagcatccacaggtgacaccacccctcttcctgtcaccaatgcttcctcattatccacaggtcacgccacccctcttcatgtcaccagcccttcctcagcatccagaggtgacaccagcactcttcctgtcaccgatgcttcctcagcatccaccggtcacgccacccctcttcctctcaccagcctttcctcagtatccacaggtgacaccacgcctcttcctgtcaccgacacttcctctgcatccacaggtcaggccacccctcttcctgtcaccagcctttcctcagtatccacaggtgacaccacgcctcttcctgtcaccatcccttcctcagcatcctcaggtcacaccacctctcttcctgtcaccgacgcttcctcagtgtccacaggtcacggcacccctcttcctgtcaccagcacttcctcagcatccacaggtgacaccacccctcttcctgtcaccgacacttcctcagcatccacaggtcacgccacccctcttcctgtcaccgacacttcctcagcatccacaggtcacgccacccctcttcctgtcaccagcctttcctcagtatccacaggtcacgccacccctcttgctgtcagcagtgctacctcagcttccacagtatcctcggactcccctctgaagatggaaacaccaggaatgacaacaccgtcactgaagacagacggtgggagacgcacagccacatcaccaccccccacaacctcccagaccatcatttccaccattcccagcactgccatgcacacccgctccacagctgcccccatccccatcctgcctgagagaggtgaggccatacaggagtttccctcttcccctatggggcaggcgccggggacctggagttcgtcaggaggaccgtggacttcacctccccactcttcaagccggcgactggcttcccccttggctcctctctccgtgattccctctacttcacagacaatggccagatcatcttcccagagtcagactaccagattttctcctaccccaacccactcccaacaggcttcacaggccgggaccctgtggccctggtggctccgttctgggacgatgctgacttctccactggtcgggggaccacattttatcaggaatacgagacgttctatggtgaacacagcctgctagtccagcaggccgagtcttggattagaaagatgacaaacaacgggggctacaaggccaggtgggccctaaaggtcacgtgggtcaatgcccacgcctatcctgcccagtggaccctcgggagcaacacctaccaagccatcctctccacggacgggagcaggtcctatgccctgtttctctaccagagcggtgggatgcagtgggacgtggcccagcgctcaggcaacccggtgctcatgggcttctctagtggagatggctatttcgaaaacagcccactgatgtcccagccagtgtgggagaggtatcgccctgatagattcctgaattccaactcaggcctccaagggctgcagttctacaggctacaccgggaagaaaggcccaactaccgtctcgagtgcctgcagtggctgaagagccagcctcggtggcccagctggggctggaaccaggtctcctgcccttgttcctggcagcagggacgacgggacttacgattccaacccgtcagcataggtcgctggggcctcggcagtaggcagctgtgcagcttcacctcttggcgaggaggcgtgtgctgcagctacgggccctggggagagtttcgtgaaggctggcacgtgcagcgtccttggcagttggcccaggaactggagccacagagctggtgctgccgctggaatgacaagccctacctctgtgccctgtaccagcagaggcggccccacgtgggctgtgctacatacaggcccccacagcccgcctggatgttcggggacccccacatcaccaccttggatggtgtcagttacaccttcaatgggctgggggacttcctgctggtcggggcccaagacgggaactcctccttcctgcttcagggccgcaccgcccagactggctcagcccaggccaccaacttcatcgcctttgcggctcagtaccgctccagcagcctgggccccgtcacggtccaatggctccttgagcctcacgacgcaatccgtgtcctgctggataaccagactgtgacatttcagcctgaccatgaagacggcggaggccaggagacgttcaacgccaccggagtcctcctgagccgcaacggctctgaggtctcggccagcttcgacggctgggccaccgtctcggtgatcgcgctctccaacatcctccacgcctccgccagcctcccgcccgagtaccagaaccgcacggaggggctcctgggggtctggaataacaatccagaggacgacttcaggatgcccaatggctccaccattcccccagggagccctgaggagatgcttttccactttggaatgacctggcagatcaacgggacaggcctccttggcaagaggaatgaccagctgccttccaacttcacccctgttttctactcacaactgcaaaaaaacagctcctgggctgaacatttgatctccaactgtgacggagatagctcatgcatctatgacaccctggccctgcgcaacgcaagcatcggacttcacacgagggaagtcagtaaaaactacgagcaggcgaacgccaccctcaatcagtacccgccctccatcaatggtggtcgtgtgattgaagcctacaaggggcagaccacgctgattcagtacaccagcaatgctgaggatgccaacttcacgctcagagacagctgcaccgacttggagctctttgagaatgggacgttgctgtggacacccaagtcgctggagccattcactctggagattctagcaagaagtgccaagattggcttggcatctgcactccagcccaggactgtggtctgccattgcaatgcagagagccagtgtttgtacaatcagaccagcagggtgggcaactcctccctggaggtggctggctgcaagtgtgacgggggcaccttcggccgctactgcgagggctccgaggatgcctgtgaggagccgtgcttcccgagtgtccactgcgttcctgggaagggctgcgaggcctgccctccaaacctgactggggatgggcggcactgtgcggctctggggagctctttcctgtgtcagaaccagtcctgccctgtgaattactgctacaatcaaggccactgctacatctcccagactctgggctgtcagcccatgtgcacctgccccccagccttcactgacagccgctgcttcctggctgggaacaacttcagtccaactgtcaacctagaacttcccttaagagtcatccagctcttgctcagtgaagaggaaaatgcctccatggcagaagtcaacgcctcggtggcatacagactggggaccctggacatgcgggcctttctccgcaacagccaagtggaacgaatcgattctgcagcaccggcctcgggaagccccatccaacactggatggtcatctcggagttccagtaccgccctcggggcccggtcattgacttcctgaacaaccagctgctggccgcggtggtggaggcgttcttataccacgttccacggaggagtgaggagcccaggaacgacgtggtcttccagcccatctccggggaagacgtgcgcgatgtgacagccctgaacgtgagcacgctgaaggcttacttcagatgcgatggctacaagggctacgacctggtctacagcccccagagcggcttcacctgcgtgtccccgtgcagtaggggctactgtgaccatggaggccagtgccagcacctgcccagtgggccccgctgcagctgtgtgtccttctccatctacacggcctggggcgagcactgtgagcacctgagcatgaaactcgacgcgttcttcggcatcttctttggggccctgggcggcctcttgctgctgggggtcgggacgttcgtggtcctgcgcttctggggttgctccggggccaggttctcctatttcctgaactcagctgaggccttgccttgaaggggcagctgtggcctaggctacctcaagactcacctcatccttaccgcacatttaaggcgccattgcttttgggagactggaaaagggaaggtgactgaaggctgtcaggattctt

SEQ ID NO: 155690 - DNA, 3804 bp, Homo sapiens
  Payload ID: 10597
  Gene Symbol: MUC4
  Gene Name: mucin 4, cell surface associated
  ENST ID: ENST00000627276
  CDS Start-End: 1-524
ctctgaagatggaaacaccaggaatgacaacaccgtcactgaagacagacggtgggagacgcacagccacatcaccaccccccacaacctcccagaccatcatttccaccattcccagcactgccatgcacacccgctccacagctgcccccatccccatcctgcctgagagaggtgaggccatacaggagtttccctcttcccctatggggcaggcgccggggacctggagttcgtcaggaggaccgtggacttcacctccccactcttcaagccggcgactggcttcccccttggctcctctctccgtgattccctctacttcacagacaatggccagatcatcttcccagagtcagactaccagattttctcctaccccaacccactcccaacaggcttcacaggccgggaccctgtggccctggtggctccgttctgggacgatgctgacttctccactggtcgggggaccacattttatcaggaatacgagacgttctatggtgaacacagcctgctagtccagcaggccgagtcttggattagaaagatgacaaacaacgggggctacaaggccaggtgggccctaaaggtcacgtgggtcaatgcccacgcctatcctgcccagtggaccctcgggagcaacacctaccaagccatcctctccacggacgggagcaggtcctatgccctgtttctctaccagagcggtgggatgcagtgggacgtggcccagcgctcaggcaacccggtgctcatgggcttctctaggcctccaagggctgcagttctacaggctacaccgggaagaaaggcccaactaccgtctcgagtgcctgcagtggctgaagagccagcctcggtggcccagctggggctggaaccaggtctcctgcccttgttcctggcagcagggacgacgggacttacgattccaacccgtcagcataggtcgctggggcctcggcagtaggcagctgtgcagcttcacctcttggcgaggaggcgtgtgctgcagctacgggccctggggagagtttcgtgaaggctggcacgtgcagcgtccttggcagttggcccaggaactggagccacagagctggtgctgccgctggaatgacaagccctacctctgtgccctgtaccagcagaggcggccccacgtgggctgtgctacatacaggcccccacagcccgcctggatgttcggggacccccacatcaccaccttggatggtgtcagttacaccttcaatgggctgggggacttcctgctggtcggggcccaagacgggaactcctccttcctgcttcagggccgcaccgcccagactggctcagcccaggccaccaacttcatcgcctttgcggctcagtaccgctccagcagcctgggccccgtcacggtccaatggctccttgagcctcacgacgcaatccgtgtcctgctggataaccagactgtgacatttcagcctgaccatgaagacggcggaggccaggagacgttcaacgccaccggagtcctcctgagccgcaacggctctgaggtctcggccagcttcgacggctgggccaccgtctcggtgatcgcgctctccaacatcctccacgcctccgccagcctcccgcccgagtaccagaaccgcacggaggggctcctgggggtctggaataacaatccagaggacgacttcaggatgcccaatggctccaccattcccccagggagccctgaggagatgcttttccactttggaatgacctggcagatcaacgggacaggcctccttggcaagaggaatgaccagctgccttccaacttcacccctgttttctactcacaactgcaaaaaaacagctcctgggctgaacatttgatctccaactgtgacggagatagctcatgcatctatgacaccctggccctgcgcaacgcaagcatcggacttcacacgagggaagtcagtaaaaactacgagcaggcgaacgccaccctcaatcagtacccgccctccatcaatggtggtcgtgtgattgaagcctacaaggggcagaccacgctgattcagtacaccagcaatgctgaggatgccaacttcacgctcagagacagctgcaccgacttggagctctttgagaatgggacgttgctgtggacacccaagtcgctggagccattcactctggagattctagcaagaagtgccaagattggcttggcatctgcactccagcccaggactgtggtctgccattgcaatgcagagagccagtgtttgtacaatcagaccagcagggtgggcaactcctccctggaggtggctggctgcaagtgtgacgggggcaccttcggccgctactgcgagggctccgaggatgcctgtgaggagccgtgcttcccgagtgtccactgcgttcctgggaagggctgcgaggcctgccctccaaacctgactggggatgggcggcactgtgcggctctggggagctctttcctgtgtcagaaccagtcctgccctgtgaattactgctacaatcaaggccactgctacatctcccagactctgggctgtcagcccatgtgcacctgccccccagccttcactgacagccgctgcttcctggctgggaacaacttcagtccaactgtcaacctagaacttcccttaagagtcatccagctcttgctcagtgaagaggaaaatgcctccatggcagaagtcaacgcctcggtggcatacagactggggaccctggacatgcgggcctttctccgcaacagccaagtggaacgaatcgattctgcagcaccggcctcgggaagccccatccaacactggatggtcatctcggagttccagtaccgccctcggggcccggtcattgacttcctgaacaaccagctgctggccgcggtggtggaggcgttcttataccacgttccacggaggagtgaggagcccaggaacgacgtggtcttccagcccatctccggggaagacgtgcgcgatgtgacagccctgaacgtgagcacgctgaaggcttacttcagatgcgatggctacaagggctacgacctggtctacagcccccagagcggcttcacctgcgtgtccccgtgcagtaggggctactgtgaccatggaggccagtgccagcacctgcccagtgggccccgctgcagctgtgtgtccttctccatctacacggcctggggcgagcactgtgagcacctgagcatgaaactcgacgcgttcttcggcatcttctttggggccctgggcggcctcttgctgctgggggtcgggacgttcgtggtcctgcgcttctggggttgctccggggccaggttctcctatttcctgaactcagctgaggccttgccttgaaggggcagctgtggcctaggctacctcaagactcacctcatccttaccgcacatttaaggcgccattgcttttgggagactggaaaagggaaggtgactgaaggctgtcaggattcttcaaggagaatgaatactgggaatcaagacaagactataccttatccataggcgcaggtgcacagggggaggccataaagatcaaacatgcatggatgggtcctcacgcagacacacccacagaaggacactagcctgtgcacgcgcgcgtgcacacacacacacacacaagagttcataatgtggtgatggccctaagttaagcaaaatgcttctgcacacaaaactctctggtttacttcaaattaactctatttaaataaagtctctctgactttttgtgtcttcaaaa

SEQ ID NO: 155691 - DNA, 16091 bp, Homo sapiens
  Payload ID: 10597
  Gene Symbol: MUC4
  Gene Name: mucin 4, cell surface associated
  ENST ID: ENST00000628806
  CDS Start-End: 1-13295
gaaccacagaggacacattaataactggaagtaaaactgctgccccagtcacctcaacaggctcaacaacagcgacactagagggacaatcaactgcagcttcttcaaggacctctaatcaggacatatcagcttcatctcagaaccaccagactaagagcacggagaccaccagcaaagctcaaaccgacaccctcacgcagatgatgacatcaactcttttttcttccccaagtgtacacaatgtgatggagacagctcctccagatgaaatgaccacatcatttccctccagtgtcaccaacacactcatgatgacatcaaagactataacaatgacaacctccacagactccactcttggaaacacagaagagacatcaacagcaggaactgaaagttctaccccagtgacctcagcagtctcaataacagctggacaggaaggacaatcacgaacaacttcctggaggacctctatccaagacacatcagcttcttctcagaaccactggactcggagcacgcagaccaccagggaatctcaaaccagcaccctaacacacagaaccacttcaactccttctttctctccaagtgtacacaatgtgacagggactgtttctcagaagacatctccttcaggtgaaacagctacctcatccctctgtagtgtcacaaacacatccatgatgacatcagagaagataacagtgacaacctccacaggctccactcttggaaacccaggggagacatcatcagtacctgttactggaagtcttatgccagtcacctcagcagccttagtaacatttgatccagaaggacaatcaccagcaactttctcaaggacttctactcaggacacaacagctttttctaagaaccaccagactcagagcgtggagaccaccagagtatctcaaatcaacaccctcaacaccctcacaccggttacaacatcaactgttttatcctcaccaagtggattcaacccaagtggaacagtttctcaggagacattcccttctggtgaaacaaccacctcatccccttccagtgtcagcaatacattcctggtaacatcaaaggtgttcagaatgccaacctccagagactctactcttggaaacacagaggagacatcactatctgtaagtggaaccatttctgcaatcacttccaaagtttcaaccatatggtggtcagacactctgtcaacagcactctcccccagttctctacctccaaaaatatccacagctttccacacccagcagagtgaaggtgcagagaccacaggacggcctcatgagaggagctcattctctccaggtgtgtctcaagaaatatttactctacatgaaacaacaacatggccttcctcattctccagcaaaggccacacaacttggtcacaaacagaactgccctcaacatcaacaggtgctgccactaggcttgtcacaggaaatccatctacagggacagctggcactattccaagggtcccctctaaggtctcagcaataggggaaccaggagagcccaccacatactcctcccacagcacaactctcccaaaaacaacaggggcaggcgcccagacacaatggacacaagaaacggggaccactggagaggctcttctcagcagcccaagctacagtgtgactcagatgataaaaacggccacatccccatcttcttcacctatgctggatagacacacatcccaacaaattacaacggcaccatcaacaaatcattcaacaatacattccacaagcacctctcctcaggaatcaccagctgtttcccaaaggggtcacactcaagccccgcagaccacacaagaatcacaaaccacgaggtccgtctcccccatgactgacaccaagacagtcaccaccccaggttcttccttcacagccagtgggcactcgccctcagaaattgttcctcaggacgcacccaccataagtgcagcaacaacctttgccccagctcccaccggggatggtcacacaacccaggccccgaccacagcactgcaggcagcacccagcagccatgatgccaccctggggccctcaggaggcacgtcactttccaaaacaggtgcccttactctggccaactctgtagtgtcaacaccagggggcccagaaggacaatggacatcagcctctgccagcacctcacctgacacagcagcagccatgacccatacccaccaggctgagagcacagaggcctctggacaaacacagaccagcgaaccggcctcctcagggtcacgaaccacctcagcgggcacagctaccccttcctcatccggggcgagtggcacaacaccttcaggaagcgaaggaatatccacctcaggagagacgacaaggttttcatcaaacccctccagggacagtcacacaacccagtcaacaaccgaattgctgtccgcctcagccagtcatggtgccatcccagtaagcacaggaatggcgtcttcgatcgtccccggcacctttcatcccaccctctctgaggcctccactgcagggagaccgacaggacagtcaagcccaacttctcccagtgcctctcctcaggagacagccgccatttcccggatggcccagactcagaggacaagaaccagcagagggtctgacactatcagcctggcgtcccaggcaaccgacaccttctcaacagtcccacccacacctccatcgatcacatccactgggcttacatctccacaaaccgagacccacactctgtcaccttcagggtctggtaaaaccttcaccacggccctcatcagcaacgccacccctcttcctgtcacctacgcttcctcggcatccacaggtcacaccacccctcttcatgtcaccgatgcttcctcagtatccacaggtcacgccacccctcttcctgtcaccagcccttcctcagtatccacaggtcacaccacccctcttcctgtcaccgacacttcctcagaatccacaggtcacgtcacccctcttcctgtcaccagcttttcctcagcatccacaggtgacagcacccctcttcctgtcactgacacttcctcagcatccacaggtcacgtcacccctcttcctgtcaccagcctttcctcagcatccacaggtgacaccacccctcttcctgtcactgacacttcctcagcatccacaggtcacgccacctctcttcctgtcaccgacacttcctcagtatccacaggtcacaccacccctcttcctgtcaccgacacttcctcagcatccacaggtcacgccacctctcttcctgtcaccgacacttcctcagtatccacaggtcacaccacccctcttcatgtcactgatgcttcctcagcatccacaggtcaggccacccctcttcctgtcaccagcctttcctcagtatccacaggtgacaccacgcctcttcctgtcactagcccttcctcagcatccacaggtcacgccacccctcttcttgtcaccgacacttcctcagcatccacaggacacgccacccctcttcctgtcaccgacgcttcctcagtgtccacagatcacgccacctctcttcctgtaaccatcccttccgcagcatccacaggtcacaccacccctcttcctgtcaccgacacttcctcagcatccacaggtcaggccacctctcttcttgtcaccgacacttcctcagtatccacaggtgacaccacgcctcttcctgtcactagcacttcctcagcatccacaggtcacgtcactcctcttcatgtcaccagcccttcctcagcatccacaggtcacgccacccctcttcctgtcaccagcctttcctcagcatccacaggtgacaccatgcctcttcctgtcactagcccttcctcagcatccacaggtgacaccacccctcttcctgtcaccgacgcttcctcagtatccacaggtcacaccacccctcttcatgtcactgatgcttcctcagcatccacaggtcaggccacccctcttcctgtcaccagcctttcctcagtatccacaggtgacaccacgcctcttcctgtcactagcccttcctcagcatccacaggtcacgccacccctcttcttgtcaccgacacttcctcagcatccacaggacacgccacccctcttcctgtcaccgacgcttcctcagtgtccacagatcacgccacctctcttcctgtaaccatcccttccgcagcatccacaggtcacaccacccctcttcctgtcaccgacacttcctcagcatccacaggtcaggccacctctcttcttgtcaccgacacttcctcagtatccacaggtgacaccacgcctcttcctgtcactagcacttcctcagcatccacaggtcacgtcactcctcttcatgtcaccagcccttcctcagcatccacaggtcacgccacccctcttcctgtcaccagcctttcctcagcatccacaggtgacaccatgcctcttcctgtcactagcccttcctcagcatccacaggtgacaccacccctcttcctgtcaccgacgcttcctcagtatccacaggtcacaccacccctcttcctgtcaccagcccttcctcagcatctacaggtcacaccacccctcttcctgtcaccgacacttcctcagcatccaaaggtgacaccacccctcttcctgtcaccagcccttcctcagcatctacaggtcacaccacccctcttcctgtcaccgacacttcctcagcatccacaggtgacaccacccctcttcctgtcaccaatgcttcctcattatccacaggtcacgccacccctcttcatgtcaccagcccttcctcagcatccacaggtcacgccacccctcttcctgtcaccagcacttcctcagcatccaccggtcacgccacccctcttcctgtcaccggcctttcctcagctaccacagatgacaccacccgtcttcctgtcaccgacgtttcctcggcatccacaggtcaggccacccctcttcctgtcaccagcctttcctcagtatccacaggtgacaccacgcctcttcctgtcactagcccttcctcagcatccacaggtcacgccagccctcttcttgtcactgacgcttcctcagcatccacaggtcaggccacccctcttcctgtcaccgacacttcctcagtatccacagctcacgccaccccacttcctgtcaccggcctttcttcagcttccacagatgacaccacccgtcttcctgtcaccgacgtttcctcggcatccacaggtcaggccatccctcttcctgtcaccagcccttcctcagcatccacaggtgacaccacccctcttcctgtcaccgacgcttcctcagcatccacaggtgacaccacctctcttcctgtcaccatcccttcctcagcatcttcaggtcacaccacctctcttcctgtcaccgacgcttcctcagtgtccacaggtcacgccacctctcttcttgtcaccgacgcttcctcagtatccacaggtgacaccacccctcttcctgtcaccgacactaactcagcatccacaggtgacaccacccctcttcatgtcaccgacgcttcctcagtatccacaggtcacgccacctctcttcctgtcaccagcctttcctcagcatccacaggtgacaccacgcctcttcctgtcactagcccttcctcagcatcctcaggtcacaccacccctcttcctgtcaccgacgcttcctcagtacccacaggtcacgccacctctcttcctgtcaccgacgcttcctcagtgtccacaggtcacgccacccctcttcctgtcaccgacgcttcctcagtgtccacaggtcatgccacccctcttccggtcaccgacacttcctcagtatctacaggacaggccacccctcttcctgtcaccagcctttcctcagcatccactggtgacaccacgccgcttcctgtcaccgatacttcctcagcatccacaggtcaggacacccctcttcctgtcaccagcctttcctcagtatccacaggtgacaccacgcctcttcctgtcactaacccttcctcagcatccacaggtcacgccacccctcttcttgtcaccgacgcttcctcaatatccacaggtcacgccacctctcttcttgtcaccgacgcttcctcagtatccacaggtcacgccaccgctcttcatgacaccgatgcttcctcattatccacaggggacaccacccctcttcctgtcaccagcccttcctcaacatccacaggtgacaccacccctcttcctgtcaccgaaacttcctcagtatccacaggtcacgccacctctcttcctgtcaccgacacttcctcagcatccacaggtcacgccacctctcttcctgtcaccgacacttcctcagcatccacaggtcacgccacccctcttcctgtcaccgacacttcctcagcatccacaggtcaggccacccctcttcctgtcaccagcccttcctcagcatccacaggtcacgccatccctcttcttgtcaccgacacttcctcagcatccacaggacaggccacccctcttcctgtcaccagcctttcctcagcatccacaggtgacaccacccctcttcctgtcaccgacgcttcctcagtgtccacaggtcacgccacctctcttcctgtcaccagcctttcctcagtatccacaggtgacaccactcctcttcctgtcactagcccttcctcagcatccacaggtcacgccacccctcttcatgtcaccgacgcttcctcagcatccacaggtcacgccacccctcttcctgtcaccagcctttcctcagcatccacaggtgacaccacgcctcttcctgtcactagcccttcctcagcatccacaggtcacgccacccctcttcatgtcaccgacgcttcctcagtatccacaggtgacaccacccctcttcctgtcaccagctcttcctcagcatcctcaggtcacaccacccctcttcctgtcaccgacgcttcctcagcatccacaggtgacaccacccctcttcctgtcaccgacacttcctcagcatccacaggtcacgccacccatcttcctgtcaccggcctttcctcagcttccacaggtgacaccacccgtcttcctgtcaccaacgtttcctcggcatccacaggtcatgccacccctcttcctgtcaccagcacttcctcagcatccacaggtgacaccacccctcttcctggcaccgacacttcctcagtatccacaggtcacaccacccctcttcttgtcaccgacgcttcgtcagtatccacaggtgacaccacccgtcttcctgtcaccagcccttcctcagcatctacaggtcacaccacccctctacctgtcaccgacactccctcagcatccacaggtgacaccacccctcttcctgtcaccaatgcttcctcattatccacacgtcacgccacctctcttcatgtcaccagcccttcctcagcatccacaggtcacgccacctctcttcctgtcaccgacacttccgcagcatccacaggtcacgccacccctcttcctgtcaccagcacttcctcagcatccacaggtgacaccacccctcttcctgtcaccgacacttactcagcatccacaggtcaggccacccctcttcctgtcaccagcctttcctcagtatccacaggtgacaccacgcctcttcctgtcactagcccttcctcagcatccacaggtcacgccactcctcttcttgtcaccgacgcttcctcagcatccacaggtcaggccacccctcttcctgtcaccagcctttcctcagtatccacaggtgacaccacgcctcttcctgtcactagcccttcctcagcatccaccggtcatgccacctctcttcctgtcaccgacacttcctcagcatccacaggtgacaccacctctcttcctgtcaccgacacttcctcagcatacacaggtgacaccacctctcttcctgtcaccgacacttcctcatcatccacaggtgacaccacccctcttcttgtcaccgagacttcctcagtatccacaggtgacaccacccctcttcctgtcaccgacacttcctcagcatccacaggtcacgccacccctcttcctgtcaccaacacttcctcagtatccacaggtcacgccacccctcttcatgtcaccagcccttcctcagcatccacaggtcacaccacccctcttcctgtcaccgacgcttcgtcagtgtccacaggtcacgccacctctcttcctgtcaccgacgcttcctcagtgttcacaggtcatgccacctctcttcctgtcaccatcccttcctcagcatcctcaggtcacaccacccctcttcctgtcaccgacgcttcctcagtgtccacaggtcacgccacctctcttcctgtcaccgacgcttcctcagtgtccacaggtcatgccacccctcttcctgtcaccgacgcttcctcagtgtccacaggtcacgctacccctcttcctctcaccagcctttcctcagtatccacaggtgacaccacgcctcttcctgtcaccgacacttcctcagcatccacaggtcaggccacccctcttcctgtcaccagcctttcctcagtatccacaggtgacaccacccctcttcctgtcaccgacacttcctcagcatccacaggtcacgccacctctcttcctgtcaccgacacttcctcagcatccacaggtcacgccacccctcttcctgacaccgacacttcctcagcatccacaggtcacgccacccttcttcctgtcaccgacacttcctcagcatccataggtcacgccacctctcttcctgtcaccgacacttcctcaatatccacaggtcacgccacccctcttcatgtcaccagcccttcctcagcatccaccggtcacgccaccccgcttcctgtcaccgacacttcctcagcatccacaggtcacgccaaccctcttcatgtcaccagcccttcctcagcatccaccggtcacgccaccccgcttcctgtcaccgacacttcctcagcatccacaggtcacgccacccctcttcctgtcaccagcctttcctcagtatccacaggtgacaccacgcctcttcctgtcactagcccttcctcagcatccacaggtcacaccacccctcttcctgtcaccgacacttcctcagcatccacaggtcaggccaccgctcttcctgtcaccagcacttcctcagcatccacaggtgacaccacccctcttcctgtcaccgacacttcctcagcatccacaggtcaggccacccctcttcctgtcaccagcctttcctcagtatccacaggtgacaccacgcctcttcctgtcactagcccttcctcagcatccacaggtcacgccactcctcttcttgtcaccgacgcttcctcagcatccacaggtcaggccacccctcttcctgtcaccagcctttcctcagtatccacaggtgacaccacgcctcttcctgtcactagcccttcctcagcatccaccggtcatgccacctctcttcctgtcaccgacacttcctcagcatccacaggtgacaccacctctcttcctgtcaccgacacttcctcagcatacacaggtgacaccacctctcttcctgtcaccgacacttcctcatcatccacaggtgacaccacccctcttcttgtcaccgagacttcctcagtatccacaggtcacgccactcctcttcttgtcaccgacgcttcctcagcatccacaggtcacgccacccctcttcatgtcaccagcccttcctcagcatccacaggtgacaccacccctgtgcctgtcaccgacacttcctcagtatccacaggtcacgccacccctcttcctgtcaccggcctttcctcagcttccacaggtgacaccacccgtcttcctgtcaccgacatttcctcggcatccacaggtcaggccacccctcttcctgtcaccaacacttcctcagtatccacaggtgacaccatgcctcttcctgtcactagcccttcctcagcatccacaggtcacgccacccctcttcctgtcaccagcacttcctcagcatccaccggtcacgccacccctgttcctgtcaccagcacttcctcagcatctacaggtcacaccacccctcttcctgtcaccgacacttcctcagcatccacaggtgacaccacccctcttcctgtcaccagcccttcctcagcatctacaggtcacaccacccctcttcatgtcaccatcccttcctcagcatccacaggtgacaccagcactcttcctgtcaccggcgcttcctcagcatccaccggtcacgccacccctcttcctgtcaccgacacttcctcagtatccaccggtcacgccacgcctcttcctgtcaccagcctttcctcagtatccacaggtgacaccacccctcttcctgtcaccgacgcttcctcggcatccacaggtcaggccacccctcttcctgtcaccagcctttcctcagtatccacaggtgacaccacccctcttcttgtcaccgacgcttcctcagtatccacaggtcacgccacccctcttcctgtcaccgacacttcctcagcatccacaggtgacaccacccgtcttcctgtcacggacacttcctcagcatccacaggtcaggccacccctcttcctgtcaccagcctttcctcagtatccacaggtgacaccacccctcttcttgtcaccgacgcttcctcagtatccacaggtcacgccacccctcttcctgtcaccgacacttcctcagcatccacaggtgacaccacccgtcttcctgtcacggacacttcctcagcatccacaggtcaggccacccctcttcctgtcaccatcccttcctcatcatcctcaggtcacaccacccctcttcctgtcaccagcacttcctcagtatctacaggtcacgtcacccctcttcatgtcaccagcccttcctcagcatccacaggtcacgtcacccctcttcctgtcaccagcacttcctcagcatccacaggtcacgccacccctcttcttgtcaccgacgcttcctcagtgtccacaggtcacgccacgcctcttcctgtcaccgacgcttcctcagcatccacaggtgacaccacccctcttcctgtcaccgacacttcctcagcatccacaggtcaggccacccctcttcctgtcaccagcctttcctcagtatccacaggtgacaccacccctcttcctgtcaccgacgcttcctcagcatccacaggtcacgccacccctcttcctgtcaccatcccttcctcagtatccacaggtgacaccatgcctcttcctgtcactagcccttcctcagcatccacaggtcacgccacccctcttcctgttaccggcctttcctcagcttccacaggtgacaccacccctcttcctgtcaccgacacttcctcagcatccacacgtcacgccacccctcttcctgtcaccgacacttcctcagcttccacagatgacaccacccgtcttcctgtcaccgacgtttcctcggcatccacaggacatgccacccctcttcctgtcaccagcacttcctcagcatccacaggtgacaccacccctcttcctgtcaccgacacttcctcagtatccacaggtcacgccacctctcttcctgtcaccagccgttcctcagcatccacaggtcacgccaccccccttcctgtcaccgacacttcctcagtatccacaggtcacgccacccctcttcctgtcaccagcacttcctcagtatctacaggtcacgccacccctcttcctgtcaccagcccttcctcagcatccacaggtcacgccacccctgttcctgtcaccagcacttcctcagcatccacaggtgacaccacccctcttcctgtcaccaatgcttcctcattatccacaggtcacgccacccctcttcatgtcaccagcccttcctcagcatccagaggtgacaccagcactcttcctgtcaccgatgcttcctcagcatccaccggtcacgccacccctcttcctctcaccagcctttcctcagtatccacaggtgacaccacgcctcttcctgtcaccgacacttcctctgcatccacaggtcaggccacccctcttcctgtcaccagcctttcctcagtatccacaggtgacaccacgcctcttcctgtcaccatcccttcctcagcatcctcaggtcacaccacctctcttcctgtcaccgacgcttcctcagtgtccacaggtcacggcacccctcttcctgtcaccagcacttcctcagcatccacaggtgacaccacccctcttcctgtcaccgacacttcctcagcatccacaggtcacgccacccctcttcctgtcaccgacacttcctcagcatccacaggtcacgccacccctcttcctgtcaccagcctttcctcagtatccacaggtcacgccacccctcttgctgtcagcagtgctacctcagcttccacagtatcctcggactcccctctgaagatggaaacaccaggaatgacaacaccgtcactgaagacagacggtgggagacgcacagccacatcaccaccccccacaacctcccagaccatcatttccaccattcccagcactgccatgcacacccgctccacagctgcccccatccccatcctgcctgagagaggagtttccctcttcccctatggggcaggcgccggggacctggagttcgtcaggaggaccgtggacttcacctccccactcttcaagccggcgactggcttcccccttggctcctctctccgtgattccctctacttcacagacaatggccagatcatcttcccagagtcagactaccagattttctcctaccccaacccactcccaacaggcttcacaggccgggaccctgtggccctggtggctccgttctgggacgatgctgacttctccactggtcgggggaccacattttatcagagcaacacctaccaagccatcctctccacggacgggagcaggtcctatgccctgtttctctaccagagcggtgggatgcagtgggacgtggcccagcgctcagtggagatggctatttcgaaaacagcccactgatgtcccagccagtgtgggagaggtatcgccctgatagattcctgaattccaactcaggcctccaagggctgcagttctacaggctacaccgggaagaaaggcccaactaccgtctcgagtgcctgcagtggctgaagagccagcctcggtggcccagctggggctggaaccaggtctcctgcccttgttcctggcagcagggacgacgggacttacgattccaacccgtcagcataggtcgctggggcctcggcagtaggcagctgtgcagcttcacctcttggcgaggaggcgtgtgctgcagctacgggccctggggagagtttcgtgaaggctggcacgtgcagcgtccttggcagttggcccaggaactggagccacagagctggtgctgccgctggaatgacaagccctacctctgtgccctgtaccagcagaggcggccccacgtgggctgtgctacatacaggcccccacagcccgcctggatgttcggggacccccacatcaccaccttggatggtgtcagttacaccttcaatgggctgggggacttcctgctggtcggggcccaagacgggaactcctccttcctgcttcagggccgcaccgcccagactggctcagcccaggccaccaacttcatcgcctttgcggctcagtaccgctccagcagcctgggccccgtcacggtccaatggctccttgagcctcacgacgcaatccgtgtcctgctggataaccagactgtgacatttcagcctgaccatgaagacggcggaggccaggagacgttcaacgccaccggagtcctcctgagccgcaacggctctgaggtctcggccagcttcgacggctgggccaccgtctcggtgatcgcgctctccaacatcctccacgcctccgccagcctcccgcccgagtaccagaaccgcacggaggggctcctgggggtctggaataacaatccagaggacgacttcaggatgcccaatggctccaccattcccccagggagccctgaggagatgcttttccactttggaatgacctggcagatcaacgggacaggcctccttggcaagaggaatgaccagctgccttccaacttcacccctgttttctactcacaactgcaaaaaaacagctcctgggctgaacatttgatctccaactgtgacggagatagctcatgcatctatgacaccctggccctgcgcaacgcaagcatcggacttcacacgagggaagtcagtaaaaactacgagcaggcgaacgccaccctcaatcagtacccgccctccatcaatggtggtcgtgtgattgaagcctacaaggggcagaccacgctgattcagtacaccagcaatgctgaggatgccaacttcacgctcagagacagctgcaccgacttggagctctttgagaatgggacgttgctgtggacacccaagtcgctggagccattcactctggagattctagcaagaagtgccaagattggcttggcatctgcactccagcccaggactgtggtctgccattgcaatgcagagagccagtgtttgtacaatcagaccagcagggtgggcaactcctccctggaggtggctggctgcaagtgtgacgggggcaccttcggccgctactgcgagggctccgaggatgcctgtgaggagccgtgcttcccgagtgtccactgcgttcctgggaagggctgcgaggcctgccctccaaacctgactggggatgggcggcactgtgcggctctggggagctctttcctgtgtcagaaccagtcctgccctgtgaattactgctacaatcaaggccactgctacatctcccagactctgggctgtcagcccatgtgcacctgccccccagccttcactgacagccgctgcttcctggctgggaacaacttcagtccaactgtcaacctagaacttcccttaagagtcatccagctcttgctcagtgaagaggaaaatgcctccatggcagaagtcaacgcctcggtggcatacagactggggaccctggacatgcgggcctttctccgcaacagccaagtggaacgaatcgattctgcagcaccggcctcgggaagccccatccaacactggatggtcatctcggagttccagtaccgccctcggggcccggtcattgacttcctgaacaaccagctgctggccgcggtggtggaggcgttcttataccacgttccacggaggagtgaggagcccaggaacgacgtggtcttccagcccatctccggggaagacgtgcgcgatgtgacagccctgaacgtgagcacgctgaaggcttacttcagatgcgatggctacaagggctacgacctggtctacagcccccagagcggcttcacctgcgtgtccccgtgcagtaggggctactgtgaccatggaggccagtgccagcacctgcccagtgggccccgctgcagctgtgtgtccttctccatctacacggcctggggcgagcactgtgagcacctgagcatgaaactcgacgcgttcttcggcatcttctttggggccctgggcggcctcttgctgctgggggtcgggacgttcgtggtcctgcgcttctggggttgctccggggccaggttctcctatttcctgaactcagctgaggccttgccttgaaggggcagctgtggcctaggctacctcaagactcacctcatccttaccgcacatttaaggcgccattgcttttgggagactggaaaagggaaggtgactgaaggctgtcaggattctt

SEQ ID NO: 155692 - DNA, 16566 bp, Homo sapiens; identical to SEQ ID NO: 155677
  Payload ID: 10597
  Gene Symbol: MUC4
  Gene Name: mucin 4, cell surface associated
  ENST ID: ENST00000629947
  CDS Start-End: 1-16157

SEQ ID NO: 155693 - DNA, 16043 bp, Homo sapiens
  Payload ID: 10597
  Gene Symbol: MUC4
  Gene Name: mucin 4, cell surface associated
  ENST ID: ENST00000631351
  CDS Start-End: 1-13247
gaaccacagaggacacattaataactggaagtaaaactgctgccccagtcacctcaacaggctcaacaacagcgacactagagggacaatcaactgcagcttcttcaaggacctctaatcaggacatatcagcttcatctcagaaccaccagactaagagcacggagaccaccagcaaagctcaaaccgacaccctcacgcagatgatgacatcaactcttttttcttccccaagtgtacacaatgtgatggagacagctcctccagatgaaatgaccacatcatttccctccagtgtcaccaacacactcatgatgacatcaaagactataacaatgacaacctccacagactccactcttggaaacacagaagagacatcaacagcaggaactgaaagttctaccccagtgacctcagcagtctcaataacagctggacaggaaggacaatcacgaacaacttcctggaggacctctatccaagacacatcagcttcttctcagaaccactggactcggagcacgcagaccaccagggaatctcaaaccagcaccctaacacacagaaccacttcaactccttctttctctccaagtgtacacaatgtgacagggactgtttctcagaagacatctccttcaggtgaaacagctacctcatccctctgtagtgtcacaaacacatccatgatgacatcagagaagataacagtgacaacctccacaggctccactcttggaaacccaggggagacatcatcagtacctgttactggaagtcttatgccagtcacctcagcagccttagtaacatttgatccagaaggacaatcaccagcaactttctcaaggacttctactcaggacacaacagctttttctaagaaccaccagactcagagcgtggagaccaccagagtatctcaaatcaacaccctcaacaccctcacaccggttacaacatcaactgttttatcctcaccaagtggattcaacccaagtggaacagtttctcaggagacattcccttctggtgaaacaaccacctcatccccttccagtgtcagcaatacattcctggtaacatcaaaggtgttcagaatgccaacctccagagactctactcttggaaacacagaggagacatcactatctgtaagtggaaccatttctgcaatcacttccaaagtttcaaccatatggtggtcagacactctgtcaacagcactctcccccagttctctacctccaaaaatatccacagctttccacacccagcagagtgaaggtgcagagaccacaggacggcctcatgagaggagctcattctctccaggtgtgtctcaagaaatatttactctacatgaaacaacaacatggccttcctcattctccagcaaaggccacacaacttggtcacaaacagaactgccctcaacatcaacaggtgctgccactaggcttgtcacaggaaatccatctacagggacagctggcactattccaagggtcccctctaaggtctcagcaataggggaaccaggagagcccaccacatactcctcccacagcacaactctcccaaaaacaacaggggcaggcgcccagacacaatggacacaagaaacggggaccactggagaggctcttctcagcagcccaagctacagtgtgactcagatgataaaaacggccacatccccatcttcttcacctatgctggatagacacacatcccaacaaattacaacggcaccatcaacaaatcattcaacaatacattccacaagcacctctcctcaggaatcaccagctgtttcccaaaggggtcacactcaagccccgcagaccacacaagaatcacaaaccacgaggtccgtctcccccatgactgacaccaagacagtcaccaccccaggttcttccttcacagccagtgggcactcgccctcagaaattgttcctcaggacgcacccaccataagtgcagcaacaacctttgccccagctcccaccggggatggtcacacaacccaggccccgaccacagcactgcaggcagcacccagcagccatgatgccaccctggggccctcaggaggcacgtcactttccaaaacaggtgcccttactctggccaactctgtagtgtcaacaccagggggcccagaaggacaatggacatcagcctctgccagcacctcacctgacacagcagcagccatgacccatacccaccaggctgagagcacagaggcctctggacaaacacagaccagcgaaccggcctcctcagggtcacgaaccacctcagcgggcacagctaccccttcctcatccggggcgagtggcacaacaccttcaggaagcgaaggaatatccacctcaggagagacgacaaggttttcatcaaacccctccagggacagtcacacaacccagtcaacaaccgaattgctgtccgcctcagccagtcatggtgccatcccagtaagcacaggaatggcgtcttcgatcgtccccggcacctttcatcccaccctctctgaggcctccactgcagggagaccgacaggacagtcaagcccaacttctcccagtgcctctcctcaggagacagccgccatttcccggatggcccagactcagaggacaagaaccagcagagggtctgacactatcagcctggcgtcccaggcaaccgacaccttctcaacagtcccacccacacctccatcgatcacatccactgggcttacatctccacaaaccgagacccacactctgtcaccttcagggtctggtaaaaccttcaccacggccctcatcagcaacgccacccctcttcctgtcacctacgcttcctcggcatccacaggtcacaccacccctcttcatgtcaccgatgcttcctcagtatccacaggtcacgccacccctcttcctgtcaccagcccttcctcagtatccacaggtcacaccacccctcttcctgtcaccgacacttcctcagaatccacaggtcacgtcacccctcttcctgtcaccagcttttcctcagcatccacaggtgacagcacccctcttcctgtcactgacacttcctcagcatccacaggtcacgtcacccctcttcctgtcaccagcctttcctcagcatccacaggtgacaccacccctcttcctgtcactgacacttcctcagcatccacaggtcacgccacctctcttcctgtcaccgacacttcctcagtatccacaggtcacaccacccctcttcctgtcaccgacacttcctcagcatccacaggtcacgccacctctcttcctgtcaccgacacttcctcagtatccacaggtcacaccacccctcttcatgtcactgatgcttcctcagcatccacaggtcaggccacccctcttcctgtcaccagcctttcctcagtatccacaggtgacaccacgcctcttcctgtcactagcccttcctcagcatccacaggtcacgccacccctcttcttgtcaccgacacttcctcagcatccacaggacacgccacccctcttcctgtcaccgacgcttcctcagtgtccacagatcacgccacctctcttcctgtaaccatcccttccgcagcatccacaggtcacaccacccctcttcctgtcaccgacacttcctcagcatccacaggtcaggccacctctcttcttgtcaccgacacttcctcagtatccacaggtgacaccacgcctcttcctgtcactagcacttcctcagcatccacaggtcacgtcactcctcttcatgtcaccagcccttcctcagcatccacaggtcacgccacccctcttcctgtcaccagcctttcctcagcatccacaggtgacaccatgcctcttcctgtcactagcccttcctcagcatccacaggtgacaccacccctcttcctgtcaccgacgcttcctcagtatccacaggtcacaccacccctcttcatgtcactgatgcttcctcagcatccacaggtcaggccacccctcttcctgtcaccagcctttcctcagtatccacaggtgacaccacgcctcttcctgtcactagcccttcctcagcatccacaggtcacgccacccctcttcttgtcaccgacacttcctcagcatccacaggacacgccacccctcttcctgtcaccgacgcttcctcagtgtccacagatcacgccacctctcttcctgtaaccatcccttccgcagcatccacaggtcacaccacccctcttcctgtcaccgacacttcctcagcatccacaggtcaggccacctctcttcttgtcaccgacacttcctcagtatccacaggtgacaccacgcctcttcctgtcactagcacttcctcagcatccacaggtcacgtcactcctcttcatgtcaccagcccttcctcagcatccacaggtcacgccacccctcttcctgtcaccagcctttcctcagcatccacaggtgacaccatgcctcttcctgtcactagcccttcctcagcatccacaggtgacaccacccctcttcctgtcaccgacgcttcctcagtatccacaggtcacaccacccctcttcctgtcaccagcccttcctcagcatctacaggtcacaccacccctcttcctgtcaccgacacttcctcagcatccaaaggtgacaccacccctcttcctgtcaccagcccttcctcagcatctacaggtcacaccacccctcttcctgtcaccgacacttcctcagcatccacaggtgacaccacccctcttcctgtcaccaatgcttcctcattatccacaggtcacgccacccctcttcatgtcaccagcccttcctcagcatccacaggtcacgccacccctcttcctgtcaccagcacttcctcagcatccaccggtcacgccacccctcttcctgtcaccggcctttcctcagctaccacagatgacaccacccgtcttcctgtcaccgacgtttcctcggcatccacaggtcaggccacccctcttcctgtcaccagcctttcctcagtatccacaggtgacaccacgcctcttcctgtcactagcccttcctcagcatccacaggtcacgccagccctcttcttgtcactgacgcttcctcagcatccacaggtcaggccacccctcttcctgtcaccgacacttcctcagtatccacagctcacgccaccccacttcctgtcaccggcctttcttcagcttccacagatgacaccacccgtcttcctgtcaccgacgtttcctcggcatccacaggtcaggccatccctcttcctgtcaccagcccttcctcagcatccacaggtgacaccacccctcttcctgtcaccgacgcttcctcagcatccacaggtgacaccacctctcttcctgtcaccatcccttcctcagcatcttcaggtcacaccacctctcttcctgtcaccgacgcttcctcagtgtccacaggtcacgccacctctcttcttgtcaccgacgcttcctcagtatccacaggtgacaccacccctcttcctgtcaccgacactaactcagcatccacaggtgacaccacccctcttcatgtcaccgacgcttcctcagtatccacaggtcacgccacctctcttcctgtcaccagcctttcctcagcatccacaggtgacaccacgcctcttcctgtcactagcccttcctcagcatcctcaggtcacaccacccctcttcctgtcaccgacgcttcctcagtacccacaggtcacgccacctctcttcctgtcaccgacgcttcctcagtgtccacaggtcacgccacccctcttcctgtcaccgacgcttcctcagtgtccacaggtcatgccacccctcttccggtcaccgacacttcctcagtatctacaggacaggccacccctcttcctgtcaccagcctttcctcagcatccactggtgacaccacgccgcttcctgtcaccgatacttcctcagcatccacaggtcaggacacccctcttcctgtcaccagcctttcctcagtatccacaggtgacaccacgcctcttcctgtcactaacccttcctcagcatccacaggtcacgccacccctcttcttgtcaccgacgcttcctcaatatccacaggtcacgccacctctcttcttgtcaccgacgcttcctcagtatccacaggtcacgccaccgctcttcatgacaccgatgcttcctcattatccacaggggacaccacccctcttcctgtcaccagcccttcctcaacatccacaggtgacaccacccctcttcctgtcaccgaaacttcctcagtatccacaggtcacgccacctctcttcctgtcaccgacacttcctcagcatccacaggtcacgccacctctcttcctgtcaccgacacttcctcagcatccacaggtcacgccacccctcttcctgtcaccgacacttcctcagcatccacaggtcaggccacccctcttcctgtcaccagcccttcctcagcatccacaggtcacgccatccctcttcttgtcaccgacacttcctcagcatccacaggacaggccacccctcttcctgtcaccagcctttcctcagcatccacaggtgacaccacccctcttcctgtcaccgacgcttcctcagtgtccacaggtcacgccacctctcttcctgtcaccagcctttcctcagtatccacaggtgacaccactcctcttcctgtcactagcccttcctcagcatccacaggtcacgccacccctcttcatgtcaccgacgcttcctcagcatccacaggtcacgccacccctcttcctgtcaccagcctttcctcagcatccacaggtgacaccacgcctcttcctgtcactagcccttcctcagcatccacaggtcacgccacccctcttcatgtcaccgacgcttcctcagtatccacaggtgacaccacccctcttcctgtcaccagctcttcctcagcatcctcaggtcacaccacccctcttcctgtcaccgacgcttcctcagcatccacaggtgacaccacccctcttcctgtcaccgacacttcctcagcatccacaggtcacgccacccatcttcctgtcaccggcctttcctcagcttccacaggtgacaccacccgtcttcctgtcaccaacgtttcctcggcatccacaggtcatgccacccctcttcctgtcaccagcacttcctcagcatccacaggtgacaccacccctcttcctggcaccgacacttcctcagtatccacaggtcacaccacccctcttcttgtcaccgacgcttcgtcagtatccacaggtgacaccacccgtcttcctgtcaccagcccttcctcagcatctacaggtcacaccacccctctacctgtcaccgacactccctcagcatccacaggtgacaccacccctcttcctgtcaccaatgcttcctcattatccacacgtcacgccacctctcttcatgtcaccagcccttcctcagcatccacaggtcacgccacctctcttcctgtcaccgacacttccgcagcatccacaggtcacgccacccctcttcctgtcaccagcacttcctcagcatccacaggtgacaccacccctcttcctgtcaccgacacttactcagcatccacaggtcaggccacccctcttcctgtcaccagcctttcctcagtatccacaggtgacaccacgcctcttcctgtcactagcccttcctcagcatccacaggtcacgccactcctcttcttgtcaccgacgcttcctcagcatccacaggtcaggccacccctcttcctgtcaccagcctttcctcagtatccacaggtgacaccacgcctcttcctgtcactagcccttcctcagcatccaccggtcatgccacctctcttcctgtcaccgacacttcctcagcatccacaggtgacaccacctctcttcctgtcaccgacacttcctcagcatacacaggtgacaccacctctcttcctgtcaccgacacttcctcatcatccacaggtgacaccacccctcttcttgtcaccgagacttcctcagtatccacaggtgacaccacccctcttcctgtcaccgacacttcctcagcatccacaggtcacgccacccctcttcctgtcaccaacacttcctcagtatccacaggtcacgccacccctcttcatgtcaccagcccttcctcagcatccacaggtcacaccacccctcttcctgtcaccgacgcttcgtcagtgtccacaggtcacgccacctctcttcctgtcaccgacgcttcctcagtgttcacaggtcatgccacctctcttcctgtcaccatcccttcctcagcatcctcaggtcacaccacccctcttcctgtcaccgacgcttcctcagtgtccacaggtcacgccacctctcttcctgtcaccgacgcttcctcagtgtccacaggtcatgccacccctcttcctgtcaccgacgcttcctcagtgtccacaggtcacgctacccctcttcctctcaccagcctttcctcagtatccacaggtgacaccacgcctcttcctgtcaccgacacttcctcagcatccacaggtcaggccacccctcttcctgtcaccagcctttcctcagtatccacaggtgacaccacccctcttcctgtcaccgacacttcctcagcatccacaggtcacgccacctctcttcctgtcaccgacacttcctcagcatccacaggtcacgccacccctcttcctgacaccgacacttcctcagcatccacaggtcacgccacccttcttcctgtcaccgacacttcctcagcatccataggtcacgccacctctcttcctgtcaccgacacttcctcaatatccacaggtcacgccacccctcttcatgtcaccagcccttcctcagcatccaccggtcacgccaccccgcttcctgtcaccgacacttcctcagcatccacaggtcacgccaaccctcttcatgtcaccagcccttcctcagcatccaccggtcacgccaccccgcttcctgtcaccgacacttcctcagcatccacaggtcacgccacccctcttcctgtcaccagcctttcctcagtatccacaggtgacaccacgcctcttcctgtcactagcccttcctcagcatccacaggtcacaccacccctcttcctgtcaccgacacttcctcagcatccacaggtcaggccaccgctcttcctgtcaccagcacttcctcagcatccacaggtgacaccacccctcttcctgtcaccgacacttcctcagcatccacaggtcaggccacccctcttcctgtcaccagcctttcctcagtatccacaggtgacaccacgcctcttcctgtcactagcccttcctcagcatccacaggtcacgccactcctcttcttgtcaccgacgcttcctcagcatccacaggtcaggccacccctcttcctgtcaccagcctttcctcagtatccacaggtgacaccacgcctcttcctgtcactagcccttcctcagcatccaccggtcatgccacctctcttcctgtcaccgacacttcctcagcatccacaggtgacaccacctctcttcctgtcaccgacacttcctcagcatacacaggtgacaccacctctcttcctgtcaccgacacttcctcatcatccacaggtgacaccacccctcttcttgtcaccgagacttcctcagtatccacaggtcacgccactcctcttcttgtcaccgacgcttcctcagcatccacaggtcacgccacccctcttcatgtcaccagcccttcctcagcatccacaggtgacaccacccctgtgcctgtcaccgacacttcctcagtatccacaggtcacgccacccctcttcctgtcaccggcctttcctcagcttccacaggtgacaccacccgtcttcctgtcaccgacatttcctcggcatccacaggtcaggccacccctcttcctgtcaccaacacttcctcagtatccacaggtgacaccatgcctcttcctgtcactagcccttcctcagcatccacaggtcacgccacccctcttcctgtcaccagcacttcctcagcatccaccggtcacgccacccctgttcctgtcaccagcacttcctcagcatctacaggtcacaccacccctcttcctgtcaccgacacttcctcagcatccacaggtgacaccacccctcttcctgtcaccagcccttcctcagcatctacaggtcacaccacccctcttcatgtcaccatcccttcctcagcatccacaggtgacaccagcactcttcctgtcaccggcgcttcctcagcatccaccggtcacgccacccctcttcctgtcaccgacacttcctcagtatccaccggtcacgccacgcctcttcctgtcaccagcctttcctcagtatccacaggtgacaccacccctcttcctgtcaccgacgcttcctcggcatccacaggtcaggccacccctcttcctgtcaccagcctttcctcagtatccacaggtgacaccacccctcttcttgtcaccgacgcttcctcagtatccacaggtcacgccacccctcttcctgtcaccgacacttcctcagcatccacaggtgacaccacccgtcttcctgtcacggacacttcctcagcatccacaggtcaggccacccctcttcctgtcaccagcctttcctcagtatccacaggtgacaccacccctcttcttgtcaccgacgcttcctcagtatccacaggtcacgccacccctcttcctgtcaccgacacttcctcagcatccacaggtgacaccacccgtcttcctgtcacggacacttcctcagcatccacaggtcaggccacccctcttcctgtcaccatcccttcctcatcatcctcaggtcacaccacccctcttcctgtcaccagcacttcctcagtatctacaggtcacgtcacccctcttcatgtcaccagcccttcctcagcatccacaggtcacgtcacccctcttcctgtcaccagcacttcctcagcatccacaggtcacgccacccctcttcttgtcaccgacgcttcctcagtgtccacaggtcacgccacgcctcttcctgtcaccgacgcttcctcagcatccacaggtgacaccacccctcttcctgtcaccgacacttcctcagcatccacaggtcaggccacccctcttcctgtcaccagcctttcctcagtatccacaggtgacaccacccctcttcctgtcaccgacgcttcctcagcatccacaggtcacgccacccctcttcctgtcaccatcccttcctcagtatccacaggtgacaccatgcctcttcctgtcactagcccttcctcagcatccacaggtcacgccacccctcttcctgttaccggcctttcctcagcttccacaggtgacaccacccctcttcctgtcaccgacacttcctcagcatccacacgtcacgccacccctcttcctgtcaccgacacttcctcagcttccacagatgacaccacccgtcttcctgtcaccgacgtttcctcggcatccacaggacatgccacccctcttcctgtcaccagcacttcctcagcatccacaggtgacaccacccctcttcctgtcaccgacacttcctcagtatccacaggtcacgccacctctcttcctgtcaccagccgttcctcagcatccacaggtcacgccaccccccttcctgtcaccgacacttcctcagtatccacaggtcacgccacccctcttcctgtcaccagcacttcctcagtatctacaggtcacgccacccctcttcctgtcaccagcccttcctcagcatccacaggtcacgccacccctgttcctgtcaccagcacttcctcagcatccacaggtgacaccacccctcttcctgtcaccaatgcttcctcattatccacaggtcacgccacccctcttcatgtcaccagcccttcctcagcatccagaggtgacaccagcactcttcctgtcaccgatgcttcctcagcatccaccggtcacgccacccctcttcctctcaccagcctttcctcagtatccacaggtgacaccacgcctcttcctgtcaccgacacttcctctgcatccacaggtcaggccacccctcttcctgtcaccagcctttcctcagtatccacaggtgacaccacgcctcttcctgtcaccatcccttcctcagcatcctcaggtcacaccacctctcttcctgtcaccgacgcttcctcagtgtccacaggtcacggcacccctcttcctgtcaccagcacttcctcagcatccacaggtgacaccacccctcttcctgtcaccgacacttcctcagcatccacaggtcacgccacccctcttcctgtcaccgacacttcctcagcatccacaggtcacgccacccctcttcctgtcaccagcctttcctcagtatccacaggtcacgccacccctcttgctgtcagcagtgctacctcagcttccacagtatcctcggactcccctctgaagatggaaacaccaggaatgacaacaccgtcactgaagacagacggtgggagacgcacagccacatcaccaccccccacaacctcccagaccatcatttccaccattcccagcactgccatgcacacccgctccacagctgcccccatccccatcctgcctgagagaggagtttccctcttcccctatggggcaggcgccggggacctggagttcgtcaggaggaccgtggacttcacctccccactcttcaagccggcgactggcttcccccttggctcctctctccgtgattccctctacgcttcacaggccgggaccctgtggccctggtggctccgttctgggacgatgctgacttctccactggtcgggggaccacattttatcagagcaacacctaccaagccatcctctccacggacgggagcaggtcctatgccctgtttctctaccagagcggtgggatgcagtgggacgtggcccagcgctcaggcaacccggtgctcatgggcttctctagtggagatggctatttcgaaaacagcccactgatgtcccagccagtgtgggagaggtatcgccctgatagattcctgaattccaactcaggcctccaagggctgcagttctacaggctacaccgggaagaaaggcccaactaccgtctcgagtgcctgcagtggctgaagagccagcctcggtggcccagctggggctggaaccaggtctcctgcccttgttcctggcagcagggacgacgggacttacgattccaacccgtcagcataggtcgctggggcctcggcagtaggcagctgtgcagcttcacctcttggcgaggaggcgtgtgctgcagctacgggccctggggagagtttcgtgaaggctggcacgtgcagcgtccttggcagttggcccaggaactggagccacagagctggtgctgccgctggaatgacaagccctacctctgtgccctgtaccagcagaggcggccccacgtgggctgtgctacatacaggcccccacagcccgcctggatgttcggggacccccacatcaccaccttggatggtgtcagttacaccttcaatgggctgggggacttcctgctggtcggggcccaagacgggaactcctccttcctgcttcagggccgcaccgcccagactggctcagcccaggccaccaacttcatcgcctttgcggctcagtaccgctccagcagcctgggccccgtcacggtccaatggctccttgagcctcacgacgcaatccgtgtcctgctggataaccagactgtgacatttcagcctgaccatgaagacggcggaggccaggagacgttcaacgccaccggagtcctcctgagccgcaacggctctgaggtctcggccagcttcgacggctgggccaccgtctcggtgatcgcgctctccaacatcctccacgcctccgccagcctcccgcccgagtaccagaaccgcacggaggggctcctgggggtctggaataacaatccagaggacgacttcaggatgcccaatggctccaccattcccccagggagccctgaggagatgcttttccactttggaatgacctggcagatcaacgggacaggcctccttggcaagaggaatgaccagctgccttccaacttcacccctgttttctactcacaactgcaaaaaaacagctcctgggctgaacatttgatctccaactgtgacggagatagctcatgcatctatgacaccctggccctgcgcaacgcaagcatcggacttcacacgagggaagtcagtaaaaactacgagcaggcgaacgccaccctcaatcagtacccgccctccatcaatggtggtcgtgtgattgaagcctacaaggggcagaccacgctgattcagtacaccagcaatgctgaggatgccaacttcacgctcagagacagctgcaccgacttggagctctttgagaatgggacgttgctgtggacacccaagtcgctggagccattcactctggagattctagcaagaagtgccaagattggcttggcatctgcactccagcccaggactgtggtctgccattgcaatgcagagagccagtgtttgtacaatcagaccagcagggtgggcaactcctccctggaggtggctggctgcaagtgtgacgggggcaccttcggccgctactgcgagggctccgaggatgcctgtgaggagccgtgcttcccgagtgtccactgcgttcctgggaagggctgcgaggcctgccctccaaacctgactggggatgggcggcactgtgcggctctggggagctctttcctgtgtcagaaccagtcctgccctgtgaattactgctacaatcaaggccactgctacatctcccagactctgggctgtcagcccatgtgcacctgccccccagccttcactgacagccgctgcttcctggctgggaacaacttcagtccaactgtcaacctagaacttcccttaagagtcatccagctcttgctcagtgaagaggaaaatgcctccatggcagaagtcaacgcctcggtggcatacagactggggaccctggacatgcgggcctttctccgcaacagccaagtggaacgaatcgattctgcagcaccggcctcgggaagccccatccaacactggatggtcatctcggagttccagtaccgccctcggggcccggtcattgacttcctgaacaaccagctgctggccgcggtggtggaggcgttcttataccacgttccacggaggagtgaggagcccaggaacgacgtggtcttccagcccatctccggggaagacgtgcgcgatgtgacagccctgaacgtgagcacgctgaaggcttacttcagatgcgatggctacaagggctacgacctggtctacagcccccagagcggcttcacctgcgtgtccccgtgcagtaggggctactgtgaccatggaggccagtgccagcacctgcccagtgggccccgctgcagctgtgtgtccttctccatctacacggcctggggcgagcactgtgagcacctgagcatgaaactcgacgcgttcttcggcatcttctttggggccctgggcggcctcttgctgctgggggtcgggacgttcgtggtcctgcgcttctggggttgctccggggccaggttctcctatttcctgaactcagctgaggccttgccttgaaggggcagctgtggcctaggctacctcaagactcacctcatccttaccgcacatttaaggcgccattgcttttgggagactggaaaagggaaggtgactgaaggctgtcaggattctt

SEQ ID NO: 155694 - DNA, 16015 bp, Homo sapiens
  Payload ID: 10597
  Gene Symbol: MUC4
  Gene Name: mucin 4, cell surface associated
  ENST ID: ENST00000629021
  CDS Start-End: 1-13253
gaaccacagaggacacattaataactggaagtaaaactgctgccccagtcacctcaacaggctcaacaacagcgacactagagggacaatcaactgcagcttcttcaaggacctctaatcaggacatatcagcttcatctcagaaccaccagactaagagcacggagaccaccagcaaagctcaaaccgacaccctcacgcagatgatgacatcaactcttttttcttccccaagtgtacacaatgtgatggagacagctcctccagatgaaatgaccacatcatttccctccagtgtcaccaacacactcatgatgacatcaaagactataacaatgacaacctccacagactccactcttggaaacacagaagagacatcaacagcaggaactgaaagttctaccccagtgacctcagcagtctcaataacagctggacaggaaggacaatcacgaacaacttcctggaggacctctatccaagacacatcagcttcttctcagaaccactggactcggagcacgcagaccaccagggaatctcaaaccagcaccctaacacacagaaccacttcaactccttctttctctccaagtgtacacaatgtgacagggactgtttctcagaagacatctccttcaggtgaaacagctacctcatccctctgtagtgtcacaaacacatccatgatgacatcagagaagataacagtgacaacctccacaggctccactcttggaaacccaggggagacatcatcagtacctgttactggaagtcttatgccagtcacctcagcagccttagtaacatttgatccagaaggacaatcaccagcaactttctcaaggacttctactcaggacacaacagctttttctaagaaccaccagactcagagcgtggagaccaccagagtatctcaaatcaacaccctcaacaccctcacaccggttacaacatcaactgttttatcctcaccaagtggattcaacccaagtggaacagtttctcaggagacattcccttctggtgaaacaaccacctcatccccttccagtgtcagcaatacattcctggtaacatcaaaggtgttcagaatgccaacctccagagactctactcttggaaacacagaggagacatcactatctgtaagtggaaccatttctgcaatcacttccaaagtttcaaccatatggtggtcagacactctgtcaacagcactctcccccagttctctacctccaaaaatatccacagctttccacacccagcagagtgaaggtgcagagaccacaggacggcctcatgagaggagctcattctctccaggtgtgtctcaagaaatatttactctacatgaaacaacaacatggccttcctcattctccagcaaaggccacacaacttggtcacaaacagaactgccctcaacatcaacaggtgctgccactaggcttgtcacaggaaatccatctacagggacagctggcactattccaagggtcccctctaaggtctcagcaataggggaaccaggagagcccaccacatactcctcccacagcacaactctcccaaaaacaacaggggcaggcgcccagacacaatggacacaagaaacggggaccactggagaggctcttctcagcagcccaagctacagtgtgactcagatgataaaaacggccacatccccatcttcttcacctatgctggatagacacacatcccaacaaattacaacggcaccatcaacaaatcattcaacaatacattccacaagcacctctcctcaggaatcaccagctgtttcccaaaggggtcacactcaagccccgcagaccacacaagaatcacaaaccacgaggtccgtctcccccatgactgacaccaagacagtcaccaccccaggttcttccttcacagccagtgggcactcgccctcagaaattgttcctcaggacgcacccaccataagtgcagcaacaacctttgccccagctcccaccggggatggtcacacaacccaggccccgaccacagcactgcaggcagcacccagcagccatgatgccaccctggggccctcaggaggcacgtcactttccaaaacaggtgcccttactctggccaactctgtagtgtcaacaccagggggcccagaaggacaatggacatcagcctctgccagcacctcacctgacacagcagcagccatgacccatacccaccaggctgagagcacagaggcctctggacaaacacagaccagcgaaccggcctcctcagggtcacgaaccacctcagcgggcacagctaccccttcctcatccggggcgagtggcacaacaccttcaggaagcgaaggaatatccacctcaggagagacgacaaggttttcatcaaacccctccagggacagtcacacaacccagtcaacaaccgaattgctgtccgcctcagccagtcatggtgccatcccagtaagcacaggaatggcgtcttcgatcgtccccggcacctttcatcccaccctctctgaggcctccactgcagggagaccgacaggacagtcaagcccaacttctcccagtgcctctcctcaggagacagccgccatttcccggatggcccagactcagaggacaagaaccagcagagggtctgacactatcagcctggcgtcccaggcaaccgacaccttctcaacagtcccacccacacctccatcgatcacatccactgggcttacatctccacaaaccgagacccacactctgtcaccttcagggtctggtaaaaccttcaccacggccctcatcagcaacgccacccctcttcctgtcacctacgcttcctcggcatccacaggtcacaccacccctcttcatgtcaccgatgcttcctcagtatccacaggtcacgccacccctcttcctgtcaccagcccttcctcagtatccacaggtcacaccacccctcttcctgtcaccgacacttcctcagaatccacaggtcacgtcacccctcttcctgtcaccagcttttcctcagcatccacaggtgacagcacccctcttcctgtcactgacacttcctcagcatccacaggtcacgtcacccctcttcctgtcaccagcctttcctcagcatccacaggtgacaccacccctcttcctgtcactgacacttcctcagcatccacaggtcacgccacctctcttcctgtcaccgacacttcctcagtatccacaggtcacaccacccctcttcctgtcaccgacacttcctcagcatccacaggtcacgccacctctcttcctgtcaccgacacttcctcagtatccacaggtcacaccacccctcttcatgtcactgatgcttcctcagcatccacaggtcaggccacccctcttcctgtcaccagcctttcctcagtatccacaggtgacaccacgcctcttcctgtcactagcccttcctcagcatccacaggtcacgccacccctcttcttgtcaccgacacttcctcagcatccacaggacacgccacccctcttcctgtcaccgacgcttcctcagtgtccacagatcacgccacctctcttcctgtaaccatcccttccgcagcatccacaggtcacaccacccctcttcctgtcaccgacacttcctcagcatccacaggtcaggccacctctcttcttgtcaccgacacttcctcagtatccacaggtgacaccacgcctcttcctgtcactagcacttcctcagcatccacaggtcacgtcactcctcttcatgtcaccagcccttcctcagcatccacaggtcacgccacccctcttcctgtcaccagcctttcctcagcatccacaggtgacaccatgcctcttcctgtcactagcccttcctcagcatccacaggtgacaccacccctcttcctgtcaccgacgcttcctcagtatccacaggtcacaccacccctcttcatgtcactgatgcttcctcagcatccacaggtcaggccacccctcttcctgtcaccagcctttcctcagtatccacaggtgacaccacgcctcttcctgtcactagcccttcctcagcatccacaggtcacgccacccctcttcttgtcaccgacacttcctcagcatccacaggacacgccacccctcttcctgtcaccgacgcttcctcagtgtccacagatcacgccacctctcttcctgtaaccatcccttccgcagcatccacaggtcacaccacccctcttcctgtcaccgacacttcctcagcatccacaggtcaggccacctctcttcttgtcaccgacacttcctcagtatccacaggtgacaccacgcctcttcctgtcactagcacttcctcagcatccacaggtcacgtcactcctcttcatgtcaccagcccttcctcagcatccacaggtcacgccacccctcttcctgtcaccagcctttcctcagcatccacaggtgacaccatgcctcttcctgtcactagcccttcctcagcatccacaggtgacaccacccctcttcctgtcaccgacgcttcctcagtatccacaggtcacaccacccctcttcctgtcaccagcccttcctcagcatctacaggtcacaccacccctcttcctgtcaccgacacttcctcagcatccaaaggtgacaccacccctcttcctgtcaccagcccttcctcagcatctacaggtcacaccacccctcttcctgtcaccgacacttcctcagcatccacaggtgacaccacccctcttcctgtcaccaatgcttcctcattatccacaggtcacgccacccctcttcatgtcaccagcccttcctcagcatccacaggtcacgccacccctcttcctgtcaccagcacttcctcagcatccaccggtcacgccacccctcttcctgtcaccggcctttcctcagctaccacagatgacaccacccgtcttcctgtcaccgacgtttcctcggcatccacaggtcaggccacccctcttcctgtcaccagcctttcctcagtatccacaggtgacaccacgcctcttcctgtcactagcccttcctcagcatccacaggtcacgccagccctcttcttgtcactgacgcttcctcagcatccacaggtcaggccacccctcttcctgtcaccgacacttcctcagtatccacagctcacgccaccccacttcctgtcaccggcctttcttcagcttccacagatgacaccacccgtcttcctgtcaccgacgtttcctcggcatccacaggtcaggccatccctcttcctgtcaccagcccttcctcagcatccacaggtgacaccacccctcttcctgtcaccgacgcttcctcagcatccacaggtgacaccacctctcttcctgtcaccatcccttcctcagcatcttcaggtcacaccacctctcttcctgtcaccgacgcttcctcagtgtccacaggtcacgccacctctcttcttgtcaccgacgcttcctcagtatccacaggtgacaccacccctcttcctgtcaccgacactaactcagcatccacaggtgacaccacccctcttcatgtcaccgacgcttcctcagtatccacaggtcacgccacctctcttcctgtcaccagcctttcctcagcatccacaggtgacaccacgcctcttcctgtcactagcccttcctcagcatcctcaggtcacaccacccctcttcctgtcaccgacgcttcctcagtacccacaggtcacgccacctctcttcctgtcaccgacgcttcctcagtgtccacaggtcacgccacccctcttcctgtcaccgacgcttcctcagtgtccacaggtcatgccacccctcttccggtcaccgacacttcctcagtatctacaggacaggccacccctcttcctgtcaccagcctttcctcagcatccactggtgacaccacgccgcttcctgtcaccgatacttcctcagcatccacaggtcaggacacccctcttcctgtcaccagcctttcctcagtatccacaggtgacaccacgcctcttcctgtcactaacccttcctcagcatccacaggtcacgccacccctcttcttgtcaccgacgcttcctcaatatccacaggtcacgccacctctcttcttgtcaccgacgcttcctcagtatccacaggtcacgccaccgctcttcatgacaccgatgcttcctcattatccacaggggacaccacccctcttcctgtcaccagcccttcctcaacatccacaggtgacaccacccctcttcctgtcaccgaaacttcctcagtatccacaggtcacgccacctctcttcctgtcaccgacacttcctcagcatccacaggtcacgccacctctcttcctgtcaccgacacttcctcagcatccacaggtcacgccacccctcttcctgtcaccgacacttcctcagcatccacaggtcaggccacccctcttcctgtcaccagcccttcctcagcatccacaggtcacgccatccctcttcttgtcaccgacacttcctcagcatccacaggacaggccacccctcttcctgtcaccagcctttcctcagcatccacaggtgacaccacccctcttcctgtcaccgacgcttcctcagtgtccacaggtcacgccacctctcttcctgtcaccagcctttcctcagtatccacaggtgacaccactcctcttcctgtcactagcccttcctcagcatccacaggtcacgccacccctcttcatgtcaccgacgcttcctcagcatccacaggtcacgccacccctcttcctgtcaccagcctttcctcagcatccacaggtgacaccacgcctcttcctgtcactagcccttcctcagcatccacaggtcacgccacccctcttcatgtcaccgacgcttcctcagtatccacaggtgacaccacccctcttcctgtcaccagctcttcctcagcatcctcaggtcacaccacccctcttcctgtcaccgacgcttcctcagcatccacaggtgacaccacccctcttcctgtcaccgacacttcctcagcatccacaggtcacgccacccatcttcctgtcaccggcctttcctcagcttccacaggtgacaccacccgtcttcctgtcaccaacgtttcctcggcatccacaggtcatgccacccctcttcctgtcaccagcacttcctcagcatccacaggtgacaccacccctcttcctggcaccgacacttcctcagtatccacaggtcacaccacccctcttcttgtcaccgacgcttcgtcagtatccacaggtgacaccacccgtcttcctgtcaccagcccttcctcagcatctacaggtcacaccacccctctacctgtcaccgacactccctcagcatccacaggtgacaccacccctcttcctgtcaccaatgcttcctcattatccacacgtcacgccacctctcttcatgtcaccagcccttcctcagcatccacaggtcacgccacctctcttcctgtcaccgacacttccgcagcatccacaggtcacgccacccctcttcctgtcaccagcacttcctcagcatccacaggtgacaccacccctcttcctgtcaccgacacttactcagcatccacaggtcaggccacccctcttcctgtcaccagcctttcctcagtatccacaggtgacaccacgcctcttcctgtcactagcccttcctcagcatccacaggtcacgccactcctcttcttgtcaccgacgcttcctcagcatccacaggtcaggccacccctcttcctgtcaccagcctttcctcagtatccacaggtgacaccacgcctcttcctgtcactagcccttcctcagcatccaccggtcatgccacctctcttcctgtcaccgacacttcctcagcatccacaggtgacaccacctctcttcctgtcaccgacacttcctcagcatacacaggtgacaccacctctcttcctgtcaccgacacttcctcatcatccacaggtgacaccacccctcttcttgtcaccgagacttcctcagtatccacaggtgacaccacccctcttcctgtcaccgacacttcctcagcatccacaggtcacgccacccctcttcctgtcaccaacacttcctcagtatccacaggtcacgccacccctcttcatgtcaccagcccttcctcagcatccacaggtcacaccacccctcttcctgtcaccgacgcttcgtcagtgtccacaggtcacgccacctctcttcctgtcaccgacgcttcctcagtgttcacaggtcatgccacctctcttcctgtcaccatcccttcctcagcatcctcaggtcacaccacccctcttcctgtcaccgacgcttcctcagtgtccacaggtcacgccacctctcttcctgtcaccgacgcttcctcagtgtccacaggtcatgccacccctcttcctgtcaccgacgcttcctcagtgtccacaggtcacgctacccctcttcctctcaccagcctttcctcagtatccacaggtgacaccacgcctcttcctgtcaccgacacttcctcagcatccacaggtcaggccacccctcttcctgtcaccagcctttcctcagtatccacaggtgacaccacccctcttcctgtcaccgacacttcctcagcatccacaggtcacgccacctctcttcctgtcaccgacacttcctcagcatccacaggtcacgccacccctcttcctgacaccgacacttcctcagcatccacaggtcacgccacccttcttcctgtcaccgacacttcctcagcatccataggtcacgccacctctcttcctgtcaccgacacttcctcaatatccacaggtcacgccacccctcttcatgtcaccagcccttcctcagcatccaccggtcacgccaccccgcttcctgtcaccgacacttcctcagcatccacaggtcacgccaaccctcttcatgtcaccagcccttcctcagcatccaccggtcacgccaccccgcttcctgtcaccgacacttcctcagcatccacaggtcacgccacccctcttcctgtcaccagcctttcctcagtatccacaggtgacaccacgcctcttcctgtcactagcccttcctcagcatccacaggtcacaccacccctcttcctgtcaccgacacttcctcagcatccacaggtcaggccaccgctcttcctgtcaccagcacttcctcagcatccacaggtgacaccacccctcttcctgtcaccgacacttcctcagcatccacaggtcaggccacccctcttcctgtcaccagcctttcctcagtatccacaggtgacaccacgcctcttcctgtcactagcccttcctcagcatccacaggtcacgccactcctcttcttgtcaccgacgcttcctcagcatccacaggtcaggccacccctcttcctgtcaccagcctttcctcagtatccacaggtgacaccacgcctcttcctgtcactagcccttcctcagcatccaccggtcatgccacctctcttcctgtcaccgacacttcctcagcatccacaggtgacaccacctctcttcctgtcaccgacacttcctcagcatacacaggtgacaccacctctcttcctgtcaccgacacttcctcatcatccacaggtgacaccacccctcttcttgtcaccgagacttcctcagtatccacaggtcacgccactcctcttcttgtcaccgacgcttcctcagcatccacaggtcacgccacccctcttcatgtcaccagcccttcctcagcatccacaggtgacaccacccctgtgcctgtcaccgacacttcctcagtatccacaggtcacgccacccctcttcctgtcaccggcctttcctcagcttccacaggtgacaccacccgtcttcctgtcaccgacatttcctcggcatccacaggtcaggccacccctcttcctgtcaccaacacttcctcagtatccacaggtgacaccatgcctcttcctgtcactagcccttcctcagcatccacaggtcacgccacccctcttcctgtcaccagcacttcctcagcatccaccggtcacgccacccctgttcctgtcaccagcacttcctcagcatctacaggtcacaccacccctcttcctgtcaccgacacttcctcagcatccacaggtgacaccacccctcttcctgtcaccagcccttcctcagcatctacaggtcacaccacccctcttcatgtcaccatcccttcctcagcatccacaggtgacaccagcactcttcctgtcaccggcgcttcctcagcatccaccggtcacgccacccctcttcctgtcaccgacacttcctcagtatccaccggtcacgccacgcctcttcctgtcaccagcctttcctcagtatccacaggtgacaccacccctcttcctgtcaccgacgcttcctcggcatccacaggtcaggccacccctcttcctgtcaccagcctttcctcagtatccacaggtgacaccacccctcttcttgtcaccgacgcttcctcagtatccacaggtcacgccacccctcttcctgtcaccgacacttcctcagcatccacaggtgacaccacccgtcttcctgtcacggacacttcctcagcatccacaggtcaggccacccctcttcctgtcaccagcctttcctcagtatccacaggtgacaccacccctcttcttgtcaccgacgcttcctcagtatccacaggtcacgccacccctcttcctgtcaccgacacttcctcagcatccacaggtgacaccacccgtcttcctgtcacggacacttcctcagcatccacaggtcaggccacccctcttcctgtcaccatcccttcctcatcatcctcaggtcacaccacccctcttcctgtcaccagcacttcctcagtatctacaggtcacgtcacccctcttcatgtcaccagcccttcctcagcatccacaggtcacgtcacccctcttcctgtcaccagcacttcctcagcatccacaggtcacgccacccctcttcttgtcaccgacgcttcctcagtgtccacaggtcacgccacgcctcttcctgtcaccgacgcttcctcagcatccacaggtgacaccacccctcttcctgtcaccgacacttcctcagcatccacaggtcaggccacccctcttcctgtcaccagcctttcctcagtatccacaggtgacaccacccctcttcctgtcaccgacgcttcctcagcatccacaggtcacgccacccctcttcctgtcaccatcccttcctcagtatccacaggtgacaccatgcctcttcctgtcactagcccttcctcagcatccacaggtcacgccacccctcttcctgttaccggcctttcctcagcttccacaggtgacaccacccctcttcctgtcaccgacacttcctcagcatccacacgtcacgccacccctcttcctgtcaccgacacttcctcagcttccacagatgacaccacccgtcttcctgtcaccgacgtttcctcggcatccacaggacatgccacccctcttcctgtcaccagcacttcctcagcatccacaggtgacaccacccctcttcctgtcaccgacacttcctcagtatccacaggtcacgccacctctcttcctgtcaccagccgttcctcagcatccacaggtcacgccaccccccttcctgtcaccgacacttcctcagtatccacaggtcacgccacccctcttcctgtcaccagcacttcctcagtatctacaggtcacgccacccctcttcctgtcaccagcccttcctcagcatccacaggtcacgccacccctgttcctgtcaccagcacttcctcagcatccacaggtgacaccacccctcttcctgtcaccaatgcttcctcattatccacaggtcacgccacccctcttcatgtcaccagcccttcctcagcatccagaggtgacaccagcactcttcctgtcaccgatgcttcctcagcatccaccggtcacgccacccctcttcctctcaccagcctttcctcagtatccacaggtgacaccacgcctcttcctgtcaccgacacttcctctgcatccacaggtcaggccacccctcttcctgtcaccagcctttcctcagtatccacaggtgacaccacgcctcttcctgtcaccatcccttcctcagcatcctcaggtcacaccacctctcttcctgtcaccgacgcttcctcagtgtccacaggtcacggcacccctcttcctgtcaccagcacttcctcagcatccacaggtgacaccacccctcttcctgtcaccgacacttcctcagcatccacaggtcacgccacccctcttcctgtcaccgacacttcctcagcatccacaggtcacgccacccctcttcctgtcaccagcctttcctcagtatccacaggtcacgccacccctcttgctgtcagcagtgctacctcagcttccacagtatcctcggactcccctctgaagatggaaacaccaggaatgacaacaccgtcactgaagacagacggtgggagacgcacagccacatcaccaccccccacaacctcccagaccatcatttccaccattcccagcactgccatgcacacccgctccacagctgcccccatccccatcctgcctgagagaggagtttccctcttcccctatggggcaggcgccggggacctggagttcgtcaggaggaccgtggacttcacctccccactcttcaagccggcgactggcttcccccttggctcctctctccgtgattccctctacgcttcacaggccgggaccctgtggccctggtggctccgttctgggacgatgctgacttctccactggtcgggggaccacattttatcagagcaacacctaccaagccatcctctccacggacgggagcaggtcctatgccctgtttctctaccagagcggtgggatgcagtgggacgtggcccagcgctcagtggagatggctatttcgaaaacagcccactgatgtcccagccagtgtgggagaggtatcgccctgatagattcctgaattccaactcaggcctccaagggctgcagttctacaggctacaccgggaagaaaggcccaactaccgtctcgagtgcctgcagtggctgaagagccagcctcggtggcccagctggggctggaaccaggtctcctgcccttgttcctggcagcagggacgacgggacttacgattccaacccgtcagcataggtcgctggggcctcggcagtaggcagctgtgcagcttcacctcttggcgaggaggcgtgtgctgcagctacgggccctggggagagtttcgtgaaggctggcacgtgcagcgtccttggcagttggcccaggaactggagccacagagctggtgctgccgctggaatgacaagccctacctctgtgccctgtaccagcagaggcggccccacgtgggctgtgctacatacaggcccccacagcccgcctggatgttcggggacccccacatcaccaccttggatggtgtcagttacaccttcaatgggctgggggacttcctgctggtcggggcccaagacgggaactcctccttcctgcttcagggccgcaccgcccagactggctcagcccaggccaccaacttcatcgcctttgcggctcagtaccgctccagcagcctgggccccgtcacggtccaatggctccttgagcctcacgacgcaatccgtgtcctgctggataaccagactgtgacatttcagcctgaccatgaagacggcggaggccaggagacgttcaacgccaccggagtcctcctgagccgcaacggctctgaggtctcggccagcttcgacggctgggccaccgtctcggtgatcgcgctctccaacatcctccacgcctccgccagcctcccgcccgagtaccagaaccgcacggaggggctcctgggggtctggaataacaatccagaggacgacttcaggatgcccaatggctccaccattcccccagggagccctgaggagatgcttttccactttggaatgacctggcagatcaacgggacaggcctccttggcaagaggaatgaccagctgccttccaacttcacccctgttttctactcacaactgcaaaaaaacagctcctgggctgaacatttgatctccaactgtgacggagatagctcatgcatctatgacaccctggccctgcgcaacgcaagcatcggacttcacacgagggaagtcagtaaaaactacgagcaggcgaacgccaccctcaatcagtacccgccctccatcaatggtggtcgtgtgattgaagcctacaaggggcagaccacgctgattcagtacaccagcaatgctgaggatgccaacttcacgctcagagacagctgcaccgacttggagctctttgagaatgggacgttgctgtggacacccaagtcgctggagccattcactctggagattctagcaagaagtgccaagattggcttggcatctgcactccagcccaggactgtggtctgccattgcaatgcagagagccagtgtttgtacaatcagaccagcagggtgggcaactcctccctggaggtggctggctgcaagtgtgacgggggcaccttcggccgctactgcgagggctccgaggatgcctgtgaggagccgtgcttcccgagtgtccactgcgttcctgggaagggctgcgaggcctgccctccaaacctgactggggatgggcggcactgtgcggctctggggagctctttcctgtgtcagaaccagtcctgccctgtgaattactgctacaatcaaggccactgctacatctcccagactctgggctgtcagcccatgtgcacctgccccccagccttcactgacagccgctgcttcctggctgggaacaacttcagtccaactgtcaacctagaacttcccttaagagtcatccagctcttgctcagtgaagaggaaaatgcctccatggcagaagtcaacgcctcggtggcatacagactggggaccctggacatgcgggcctttctccgcaacagccaagtggaacgaatcgattctgcagcaccggcctcgggaagccccatccaacactggatggtcatctcggagttccagtaccgccctcggggcccggtcattgacttcctgaacaaccagctgctggccgcggtggtggaggcgttcttataccacgttccacggaggagtgaggagcccaggaacgacgtggtcttccagcccatctccggggaagacgtgcgcgatgtgacagccctgaacgtgagcacgctgaaggcttacttcagatgcgatggctacaagggctacgacctggtctacagcccccagagcggcttcacctgcgtgtccccgtgcagtaggggctactgtgaccatggaggccagtgccagcacctgcccagtgggccccgctgcagctgtgtgtccttctccatctacacggcctggggcgagcactgtgagcacctgagcatgaaactcgacgcgttcttcggcatcttctttggggccctgggcggcctcttgctgctgggggtcgggacgttcgtggtcctgcgcttctggggttgctccggggccaggttctcctatttcctgaactcagctgaggccttgccttgaaggggcagctgtggcctaggctacctcaagactcacctcatccttaccgcacatttaaggcgccattgcttttgggagactggaaaagggaaggtgactgaaggctgtcaggattctt

SEQ ID NO: 155695 - DNA, 16043 bp, Homo sapiens; identical to SEQ ID NO: 155693
  Payload ID: 10597
  Gene Symbol: MUC4
  Gene Name: mucin 4, cell surface associated
  ENST ID: ENST00000626318
  CDS Start-End: 1-13247

SEQ ID NO: 155696 - DNA, 3942 bp, Homo sapiens
  Payload ID: 10597
  Gene Symbol: MUC4
  Gene Name: mucin 4, cell surface associated
  ENST ID: ENST00000630176
  CDS Start-End: 1-494
ctctgaagatggaaacaccaggaatgacaacaccgtcactgaagacagacggtgggagacgcacagccacatcaccaccccccacaacctcccagaccatcatttccaccattcccagcactgccatgcacacccgctccacagctgcccccatccccatcctgcctgagagaggtgaggccatacaggagtttccctcttcccctatggggcaggcgccggggacctggagttcgtcaggaggaccgtggacttcacctccccactcttcaagccggcgactggcttcccccttggctcctctctccgtgattccctctacttcacagacaatggccagatcatcttcccagagtcagactaccagattttctcctaccccaacccactcccaacaggcttcacaggccgggaccctgtggccctggtggctccgttctgggacgatgctgacttctccactggtcgggggaccacattttatcaggctgtagggggtctatcctaacaagagtgagtcaagagggcccgtcctgtgctcctggactgggtgaataactccaatcagaggaaatgtgatgaaagctactgcaggaagtgtggaccgtgcccctgccacggacagggcagtgtggaggctccaagaggaagagactcacgcctgttctcaagaagctgcagattaggcatggggaggaatacgagacgttctatggtgaacacagcctgctagtccagcaggccgagtcttggattagaaagatgacaaacaacgggggctacaaggccaggtgggccctaaaggtcacgtgggtcaatgcccacgcctatcctgcccagtggaccctcgggagcaacacctaccaagccatcctctccacggacgggagcaggtcctatgccctgtttctctaccagagcggtgggatgcagtgggacgtggcccagcgctcaggcaacccggtgctcatgggcttctctagtggagatggctatttcgaaaacagcccactgatgtcccagccagtgtgggagaggtatcgccctgatagattcctgaattccaactcaggcctccaagggctgcagttctacaggctacaccgggaagaaaggcccaactaccgtctcgagtgcctgcagtggctgaagagccagcctcggtggcccagctggggctggaaccaggtctcctgcccttgttcctggcagcagggacgacgggacttacgattccaacccgtcagcataggtcgctggggcctcggcagtaggcagctgtgcagcttcacctcttggcgaggaggcgtgtgctgcagctacgggccctggggagagtttcgtgaaggctggcacgtgcagcgtccttggcagttggcccaggaactggagccacagagctggtgctgccgctggaatgacaagccctacctctgtgccctgtaccagcagaggcggccccacgtgggctgtgctacatacaggcccccacagcccgcctggatgttcggggacccccacatcaccaccttggatggtgtcagttacaccttcaatgggctgggggacttcctgctggtcggggcccaagacgggaactcctccttcctgcttcagggccgcaccgcccagactggctcagcccaggccaccaacttcatcgcctttgcggctcagtaccgctccagcagcctgggccccgtcacggtccaatggctccttgagcctcacgacgcaatccgtgtcctgctggataaccagactgtgacatttcagcctgaccatgaagacggcggaggccaggagacgttcaacgccaccggagtcctcctgagccgcaacggctctgaggtctcggccagcttcgacggctgggccaccgtctcggtgatcgcgctctccaacatcctccacgcctccgccagcctcccgcccgagtaccagaaccgcacggaggggctcctgggggtctggaataacaatccagaggacgacttcaggatgcccaatggctccaccattcccccagggagccctgaggagatgcttttccactttggaatgacctggcagatcaacgggacaggcctccttggcaagaggaatgaccagctgccttccaacttcacccctgttttctactcacaactgcaaaaaaacagctcctgggctgaacatttgatctccaactgtgacggagatagctcatgcatctatgacaccctggccctgcgcaacgcaagcatcggacttcacacgagggaagtcagtaaaaactacgagcaggcgaacgccaccctcaatcagtacccgccctccatcaatggtggtcgtgtgattgaagcctacaaggggcagaccacgctgattcagtacaccagcaatgctgaggatgccaacttcacgctcagagacagctgcaccgacttggagctctttgagaatgggacgttgctgtggacacccaagtcgctggagccattcactctggagattctagcaagaagtgccaagattggcttggcatctgcactccagcccaggactgtggtctgccattgcaatgcagagagccagtgtttgtacaatcagaccagcagggtgggcaactcctccctggagctctggggagctctttcctgtgtcagaaccagtcctgccctgtgaattactgctacaatcaaggccactgctacatctcccagactctgggctgtcagcccatgtgcacctgccccccagccttcactgacagccgctgcttcctggctgggaacaacttcagtccaactgtcaacctagaacttcccttaagagtcatccagctcttgctcagtgaagaggaaaatgcctccatggcagaagtcaacgcctcggtggcatacagactggggaccctggacatgcgggcctttctccgcaacagccaagtggaacgaatcgattctgcagcaccggcctcgggaagccccatccaacactggatggtcatctcggagttccagtaccgccctcggggcccggtcattgacttcctgaacaaccagctgctggccgcggtggtggaggcgttcttataccacgttccacggaggagtgaggagcccaggaacgacgtggtcttccagcccatctccggggaagacgtgcgcgatgtgacagccctgaacgtgagcacgctgaaggcttacttcagatgcgatggctacaagggctacgacctggtctacagcccccagagcggcttcacctgcgtgtccccgtgcagtaggggctactgtgaccatggaggccagtgccagcacctgcccagtgggccccgctgcagctgtgtgtccttctccatctacacggcctggggcgagcactgtgagcacctgagcatgaaactcgacgcgttcttcggcatcttctttggggccctgggcggcctcttgctgctgggggtcgggacgttcgtggtcctgcgcttctggggttgctccggggccaggttctcctatttcctgaactcagctgaggccttgccttgaaggggcagctgtggcctaggctacctcaagactcacctcatccttaccgcacatttaaggcgccattgcttttgggagactggaaaagggaaggtgactgaaggctgtcaggattcttcaaggagaatgaatactgggaatcaagacaagactataccttatccataggcgcaggtgcacagggggaggccataaagatcaaacatgcatggatgggtcctcacgcagacacacccacagaaggacactagcctgtgcacgcgcgcgtgcacacacacacacacacaagagttcataatgtggtgatggccctaagttaagcaaaatgcttctgcacacaaaactctctggtttacttcaaattaactctatttaaataaagtctctctgactttttgtgtcttcaaaa

SEQ ID NO: 155697 - DNA, 16122 bp, Homo sapiens
  Payload ID: 10597
  Gene Symbol: MUC4
  Gene Name: mucin 4, cell surface associated
  ENST ID: ENST00000627791
  CDS Start-End: 1-16004
gaaccacagaggacacattaataactggaagtaaaactgctgccccagtcacctcaacaggctcaacaacagcgacactagagggacaatcaactgcagcttcttcaaggacctctaatcaggacatatcagcttcatctcagaaccaccagactaagagcacggagaccaccagcaaagctcaaaccgacaccctcacgcagatgatgacatcaactcttttttcttccccaagtgtacacaatgtgatggagacagctcctccagatgaaatgaccacatcatttccctccagtgtcaccaacacactcatgatgacatcaaagactataacaatgacaacctccacagactccactcttggaaacacagaagagacatcaacagcaggaactgaaagttctaccccagtgacctcagcagtctcaataacagctggacaggaaggacaatcacgaacaacttcctggaggacctctatccaagacacatcagcttcttctcagaaccactggactcggagcacgcagaccaccagggaatctcaaaccagcaccctaacacacagaaccacttcaactccttctttctctccaagtgtacacaatgtgacagggactgtttctcagaagacatctccttcaggtgaaacagctacctcatccctctgtagtgtcacaaacacatccatgatgacatcagagaagataacagtgacaacctccacaggctccactcttggaaacccaggggagacatcatcagtacctgttactggaagtcttatgccagtcacctcagcagccttagtaacatttgatccagaaggacaatcaccagcaactttctcaaggacttctactcaggacacaacagctttttctaagaaccaccagactcagagcgtggagaccaccagagtatctcaaatcaacaccctcaacaccctcacaccggttacaacatcaactgttttatcctcaccaagtggattcaacccaagtggaacagtttctcaggagacattcccttctggtgaaacaaccacctcatccccttccagtgtcagcaatacattcctggtaacatcaaaggtgttcagaatgccaacctccagagactctactcttggaaacacagaggagacatcactatctgtaagtggaaccatttctgcaatcacttccaaagtttcaaccatatggtggtcagacactctgtcaacagcactctcccccagttctctacctccaaaaatatccacagctttccacacccagcagagtgaaggtgcagagaccacaggacggcctcatgagaggagctcattctctccaggtgtgtctcaagaaatatttactctacatgaaacaacaacatggccttcctcattctccagcaaaggccacacaacttggtcacaaacagaactgccctcaacatcaacaggtgctgccactaggcttgtcacaggaaatccatctacagggacagctggcactattccaagggtcccctctaaggtctcagcaataggggaaccaggagagcccaccacatactcctcccacagcacaactctcccaaaaacaacaggggcaggcgcccagacacaatggacacaagaaacggggaccactggagaggctcttctcagcagcccaagctacagtgtgactcagatgataaaaacggccacatccccatcttcttcacctatgctggatagacacacatcccaacaaattacaacggcaccatcaacaaatcattcaacaatacattccacaagcacctctcctcaggaatcaccagctgtttcccaaaggggtcacactcaagccccgcagaccacacaagaatcacaaaccacgaggtccgtctcccccatgactgacaccaagacagtcaccaccccaggttcttccttcacagccagtgggcactcgccctcagaaattgttcctcaggacgcacccaccataagtgcagcaacaacctttgccccagctcccaccggggatggtcacacaacccaggccccgaccacagcactgcaggcagcacccagcagccatgatgccaccctggggccctcaggaggcacgtcactttccaaaacaggtgcccttactctggccaactctgtagtgtcaacaccagggggcccagaaggacaatggacatcagcctctgccagcacctcacctgacacagcagcagccatgacccatacccaccaggctgagagcacagaggcctctggacaaacacagaccagcgaaccggcctcctcagggtcacgaaccacctcagcgggcacagctaccccttcctcatccggggcgagtggcacaacaccttcaggaagcgaaggaatatccacctcaggagagacgacaaggttttcatcaaacccctccagggacagtcacacaacccagtcaacaaccgaattgctgtccgcctcagccagtcatggtgccatcccagtaagcacaggaatggcgtcttcgatcgtccccggcacctttcatcccaccctctctgaggcctccactgcagggagaccgacaggacagtcaagcccaacttctcccagtgcctctcctcaggagacagccgccatttcccggatggcccagactcagaggacaagaaccagcagagggtctgacactatcagcctggcgtcccaggcaaccgacaccttctcaacagtcccacccacacctccatcgatcacatccactgggcttacatctccacaaaccgagacccacactctgtcaccttcagggtctggtaaaaccttcaccacggccctcatcagcaacgccacccctcttcctgtcacctacgcttcctcggcatccacaggtcacaccacccctcttcatgtcaccgatgcttcctcagtatccacaggtcacgccacccctcttcctgtcaccagcccttcctcagtatccacaggtcacaccacccctcttcctgtcaccgacacttcctcagaatccacaggtcacgtcacccctcttcctgtcaccagcttttcctcagcatccacaggtgacagcacccctcttcctgtcactgacacttcctcagcatccacaggtcacgtcacccctcttcctgtcaccagcctttcctcagcatccacaggtgacaccacccctcttcctgtcactgacacttcctcagcatccacaggtcacgccacctctcttcctgtcaccgacacttcctcagtatccacaggtcacaccacccctcttcctgtcaccgacacttcctcagcatccacaggtcacgccacctctcttcctgtcaccgacacttcctcagtatccacaggtcacaccacccctcttcatgtcactgatgcttcctcagcatccacaggtcaggccacccctcttcctgtcaccagcctttcctcagtatccacaggtgacaccacgcctcttcctgtcactagcccttcctcagcatccacaggtcacgccacccctcttcttgtcaccgacacttcctcagcatccacaggacacgccacccctcttcctgtcaccgacgcttcctcagtgtccacagatcacgccacctctcttcctgtaaccatcccttccgcagcatccacaggtcacaccacccctcttcctgtcaccgacacttcctcagcatccacaggtcaggccacctctcttcttgtcaccgacacttcctcagtatccacaggtgacaccacgcctcttcctgtcactagcacttcctcagcatccacaggtcacgtcactcctcttcatgtcaccagcccttcctcagcatccacaggtcacgccacccctcttcctgtcaccagcctttcctcagcatccacaggtgacaccatgcctcttcctgtcactagcccttcctcagcatccacaggtgacaccacccctcttcctgtcaccgacgcttcctcagtatccacaggtcacaccacccctcttcatgtcactgatgcttcctcagcatccacaggtcaggccacccctcttcctgtcaccagcctttcctcagtatccacaggtgacaccacgcctcttcctgtcactagcccttcctcagcatccacaggtcacgccacccctcttcttgtcaccgacacttcctcagcatccacaggacacgccacccctcttcctgtcaccgacgcttcctcagtgtccacagatcacgccacctctcttcctgtaaccatcccttccgcagcatccacaggtcacaccacccctcttcctgtcaccgacacttcctcagcatccacaggtcaggccacctctcttcttgtcaccgacacttcctcagtatccacaggtgacaccacgcctcttcctgtcactagcacttcctcagcatccacaggtcacgtcactcctcttcatgtcaccagcccttcctcagcatccacaggtcacgccacccctcttcctgtcaccagcctttcctcagcatccacaggtgacaccatgcctcttcctgtcactagcccttcctcagcatccacaggtgacaccacccctcttcctgtcaccgacgcttcctcagtatccacaggtcacaccacccctcttcctgtcaccagcccttcctcagcatctacaggtcacaccacccctcttcctgtcaccgacacttcctcagcatccaaaggtgacaccacccctcttcctgtcaccagcccttcctcagcatctacaggtcacaccacccctcttcctgtcaccgacacttcctcagcatccacaggtgacaccacccctcttcctgtcaccaatgcttcctcattatccacaggtcacgccacccctcttcatgtcaccagcccttcctcagcatccacaggtcacgccacccctcttcctgtcaccagcacttcctcagcatccaccggtcacgccacccctcttcctgtcaccggcctttcctcagctaccacagatgacaccacccgtcttcctgtcaccgacgtttcctcggcatccacaggtcaggccacccctcttcctgtcaccagcctttcctcagtatccacaggtgacaccacgcctcttcctgtcactagcccttcctcagcatccacaggtcacgccagccctcttcttgtcactgacgcttcctcagcatccacaggtcaggccacccctcttcctgtcaccgacacttcctcagtatccacagctcacgccaccccacttcctgtcaccggcctttcttcagcttccacagatgacaccacccgtcttcctgtcaccgacgtttcctcggcatccacaggtcaggccatccctcttcctgtcaccagcccttcctcagcatccacaggtgacaccacccctcttcctgtcaccgacgcttcctcagcatccacaggtgacaccacctctcttcctgtcaccatcccttcctcagcatcttcaggtcacaccacctctcttcctgtcaccgacgcttcctcagtgtccacaggtcacgccacctctcttcttgtcaccgacgcttcctcagtatccacaggtgacaccacccctcttcctgtcaccgacactaactcagcatccacaggtgacaccacccctcttcatgtcaccgacgcttcctcagtatccacaggtcacgccacctctcttcctgtcaccagcctttcctcagcatccacaggtgacaccacgcctcttcctgtcactagcccttcctcagcatcctcaggtcacaccacccctcttcctgtcaccgacgcttcctcagtacccacaggtcacgccacctctcttcctgtcaccgacgcttcctcagtgtccacaggtcacgccacccctcttcctgtcaccgacgcttcctcagtgtccacaggtcatgccacccctcttccggtcaccgacacttcctcagtatctacaggacaggccacccctcttcctgtcaccagcctttcctcagcatccacaggtgacaccacccctcttcctgtcaccgacacttcctcagcatccacaggtcacgccccccatcttcctgtcaccggcctttcctcagcttccacaggtgacaccacccgtcttcctgtcaccaacgtttcctcggcatccacaggtcatgccacccctcttcctgtcaccagcacttcctcagcatccacaggtgacaccacccctcttcctggcaccgacacttcctcagtatccacaggtcacaccacccctcttcttgtcaccgacgcttcgtcagtatccacaggtgacaccacccgtcttcctgtcaccagcccttcctcagcatctacaggtcacaccacccctcttcatgtcaccgatgcttcctcagtatccacaggtcacaccacccctcttcctgtcaccgacacttcctcagcatccacaggtcaggccacctctcttcttgtcaccgacacttcctcagtatccacaggtgacaccacgcctcttcctgtcactagcacttcctcagcatccacaggtcacgtcactcctcttcatgtcaccagcccttcctcagcatccacaggtcacgccacccctcttcctgtcaccagcctttcctcagcatccacaggtgacaccacccctcttcctgtcaccgacacttcctcagtatccacaggtcacaccacccctcttcctgtcaccagcccttcctcagcatctacaggtcacaccacccctcttcctgtcaccgacacttcctcagcatccaaaggtgacaccacccctcttcctgtcaccagcccttcctcagcatctacaggtcacaccacccctcttcctgtcaccgacacttcctcagcatccacaggtgacaccacccctcttcctgtcaccaatgcttcctcattatccacaggtcacgccacccctcttcatgtcaccagcccttcctcagcatccacaggtcacgccacccctcttcctgtcaccagcacttcctcagcatccaccggtcacgccacccctcttcctgtcaccagcacttcctcagcatccaccggtcacgccacccctcttcctgtcaccgacaattcctcagtatccacaggtcatgccacccctcttcctgtcaccggcctttcctcagctaccacagatgacaccacccgtcttcctgtcaccgacgtgtcctcggcatccacaggtcaggccacccctcttcctgtcaccagcctttcctcagtatccacaggtgacaccacgcctcttcctgtcactagcccttcctcagcatccacaggtcacgccagccctcttcttgtcactgacgcttcctcagcatccacaggtcaggccacccctcttcctgtcaccgacacttcctcagtatccacagctcacgccaccccacttcctgtcaccggcctttcctcagcttccacagatgacaccacccgtcttcctgtcaccgacgtttcctcggcatccacaggtcaggccatccctcttcctgtcaccagcccttcctcagcatccacaggtgacaccacccctcttcctgtcaccgacgcttcctcagcatccacaggtgacaccacctctcttcctgtcaccatcccttcctcagcatcttcaggtcacaccacctctcttcctgtcaccgacgcttcctcagtgtccacaggtcacgccacctctcttcttgtcaccgacgcttcctcagtatccacaggtgacaccacccctcttcctgtcaccgacactaactcagcatccacaggtgacaccacccctcttcatgtcaccgacgcttcctcagtatccacaggtcacgccacctctcttcctgtcaccagcctttcctcagcatccacaggtgacaccacgcctcttcctgtcactagcccttcctcagcatcctcaggtcacaccacctctcttcctgtcaccgacgcttcctcagtgtccacaggtcacgccacctctcttcctgtcaccatcccttcctcagcatcctcaggtcacaccacccctcttcctgtcaccgacgcttcctcagtacccacaggtcacgccacctctcttcctgtcaccgacgcttcctcagtgtccacaggtcacgccacccctcttcctgtcaccgacgcttcctcagtgtccacaggtcatgccacccctcttccggtcaccgacacttcctcagtatctacaggacaggccacccctcttcctgtcaccagcctttcctcagcatcatccactggtgacaccacgccgcttcctgtcactgatacttcctcagcatccacaggtcaggacacccctcttcctgtcaccagccttttctcagtatccacaggtgacaccacgcctcttcctgtcactagcccttcctcagcatccacaggtcacgccacccatcttcttgtcaccgacgcttcctcagtatccacaggtcacgccacctctcttcttgtcaccgacgcttcctcagtatccacaggtcacgccaccgctcttcatgtcaccgatgcttcctcattatccacaggggacaccacccctcttcctgtcaccagcccttcctcagcatccacaggtgacaccacccctcttcctgtcaccgacacttcctcagtatccacaggtcacgccacctctcttcctgtcactgacacttcctcagcatccacaggtcacgccacctctcttcctgtcaccgacacttcctcagcatccacaggtcaggccacccctcttcctgtcaccagcccttcctcagcatccacaggtcacgccatccctcttcttgtcaccgacacttcctcagcatccacaggacaggccacccctcttcctgtcaccagcctttcctcagcatccacaggtgacaccacccctcttcctgtcaccgatgcttcctcagtgtccacaggtcacgccacctctcttcctgtcaccagcctttcctcagtatccacaggtgacaccacccctcttcctgtcactagcccttcctcagcatccacaggtcacgccacccctcttcatgtcaccagcccttcctcagcatccacaggtcacgccacccctcttcctgtcaccagcctttcctcagcatccacaggtgacaccacgcctcttcctgtcactagcccttcctcagcatccacaggtcacgccacccctcttcatgtcaccgacgcttcctcagtatccacaggtgacaccacccctcttcctgtcaccagcccttcctcagcatcctcaggtcacaccacccctcttcctgtcaccgacgcttcctcagcatccacaggtgacaccacccctcttcctgtcaccgacacttcctcagcatccacaggtcacgccacccatcttcctgtcaccggcctttcctcagcttccacaggtgacaccacccgtcttcctgtcaccgacgtttcctcggcatccacaggtcatgccacccctcttcctgtcaccagcacttcctcagcatccacaggtgacaccacccctcttcctggcaccgacacttcctcagtatccacaggtcacaccacccctcttcttgtcaccgacgcttcgtcagtatccacaggtgacaccacccgtcttcctgtcaccagcccttcctcagcatctacaggtcacaccacccctctacctgtcaccgacactccctcagcatccacaggtgacaccacccctcttcctgtcaccaatgcttcctcattatccacacgtcacgccacctctcttcatgtcaccagcccttcctcagcatccaccggtcacgccacccctcttcctgttaccgacacttccgcagcatccacaggtcacgccacccctcttcctgtcaccagcacttcctcagcatccacaggtgacaccacccctcttcctgtcaccgacacttcctcagcatccacaggtcatgccacccctcttcctgtcaccaacacttcctcagtatccacaggtcacgccacccctcttcatgtcaccagcccttcctcagcatccacaggtcacaccacccctcttcctgtcaccgacgcttcgtcagtgtccacaggtcacgccacctctcttcctgtcaccgacgcttcctcagtgtccacaggtcacgccacccctcttcctgtcaccgacgcttcctcagtgtccacaggtcacgctacccctcttcctctcaccagcctttcctcagtatccacaggtgacaccacgcctcttcctgtcaccgacacttcctcagcatccacaggtcaggccacccctcttcctgtcaccagcctttcctcagtatccacaggtgacaccacccctcttcctgtcaccgacacttcctcagcatccacaggtcacgccacctctcttcctgtcaccgacacttcctcagcatccacaggtcacgccacccctcttcatgtcaccagcccttcctcagcatccaccggtcacgccaccccgcttcctgtcaccgacacttcctcagcatccacaggtcacgccacccctcttcctgtcaccagcctttcctcagtatccacaggtgacaccacgcctcttcctgtcactagcccttcctcagcatccacaggtcacgccactcctcttcttgtcaccgacgcttcctcagcatccacaggtcaggccacccctcttcctgtcaccagcctttcctcagtatccacaggtgacaccacgcctcttcctgtcactagcccttcctcagcatccaccggtcatgccacctctcttcctgtcaccgacacttcctcagcatccacaggtgacaccacctctcttcctgtcaccgacacttcctcagcatacacaggtgacaccacctctcttcctgtcaccgacacttcctcatcatccacaggtgacaccacccctcttcttgtcaccgagacttcctcagcatccacaggtgacaccacccctgtgcctgtcaccgacacttcctcagtatccacaggtcacgccacccctcttcctgtcaccggcctttcctcagcttccacaggtgacaccacccgtcttcctgtcaccgacatttcctcggcatccacaggtcaggccacccctcttcctgtcaccaacacttcctcagtatccacaggtgacaccatgcctcttcctgtcactagcccttcctcagcatccacaggtcacgccacccctcttcctgtcaccagcacttcctcagcatccaccggtcacgccacccctgttcctgtcaccagcacttcctcagcatccacaggtcacaccacccctcttcctgtcaccagcccttcctcagcatctacaggtcacaccacccctcttcctgtcaccgacacttcctcagcatccacaggtgacaccacccctcttcctgtcaccaatgcttcctcattatccacaggacacaccacccctcttcatgtcaccatcccttcctcagcatccacaggtgacaccagcactcttcctgtcaccggcgcttcctcagcatccaccggtcacgccacccctcttcctgtcaccgacacttcctcagtatccacaggtcacgccacccctcttcctgtcaccagcttttcctcagtatccacaggtgacaccacccctcttcctgtcaccgacgcttcctcggcatccaccggtcacgccacccctcttcctgtcaccgacacttcctcagcatccacaggtgacaccacccctcttcctgtcaccgacgcttcctcggcatccacaggtcaggccacccctcttcctgtcaccagcctttcctcagtatcaacaggtgacaccacgcctcttcctgtcaccatcccttcctcagcatcctcaggtcacaccacctctcttcctgtcagcgacacttcctcagcatccacaggtcaggccacccctcttcctgtcaccagcctttcctcagtatccacaggtgacaccacccctcttcttgtcaccgacgcttcctcagtatccacaggtcacgccacccctcttcctgtcaccgacacttcctcagcatccacaggtgacaccacccgtcttcctgtcacggacacttcctcagcatccacaggtcaggccacccctcttcctgtcaccagcctttcctcagtatccacaggtgacaccacccctcttcttgtcaccaacacttcctcagtatccacaggtcacgccacctctcttcctgtcaccatcccttcctcatcatcctcaggtcacaccacccctcttcctgtcaccagcacttcctcagtatctacaggtcacgtcacccctcttcatgtcaccagcccttcctcatcatccacaggtcaggccacccctcttcctgtcaccagcacttcctcatcatccacaggtcaggccacccctcttcctgtcaccagcacttcctcagcatccacaggtcacgccacccctcttcctgtcaccgacgcttcctcagtgtccacaggtcacgccacgcctcttcctgtcaccgacacttcctcagcatccacaggtgacaccacccctcttcctgtcaccgacacttcctcagcatccacaggtcaggccacccctcttcctgtcaccagcctttcctcagtatccacaggtcacgccacccctcttgctgtcagcagtgctacctcagcttccacagtatcctcggactcccctctgaagatggaaacatcaggaatgacaacaccgtcactgaagacagacggtgggagacgcacagccacatcaccaccccccacaacctcccagaccatcatttccaccattcccagcactgccatgcacacccgctccacagctgcccccatccccatcctgcctgagagaggagtttccctcttcccctatggggcagacgccggggacctggagttcgtcaggaggaccgtggacttcacctccccactcttcaagccggcgactggcttcccccttggctcctctctccgtgattccctctacttcacagacaatggccagatcatcttcccagagtcagactaccagattttctcctaccccaacccactcccaacaggcttcacaggccgggaccctgtggccctggtggctccgttctgggacgatgctgacttctccactggtcgggggaccacattttatcagagcaacacctaccaagccatcctctccacggacgggagcaggtcctatgccctgtttctctaccagagcggtgggatgcagtgggacgtggcccagcgctcaggcaagccggtgctcatgggcttctctagtggagatggctatttcgaaaacagcccactgatgtcccagccagtgtgggagaggtatcgccctgatagattcctgaattccaactcaggcctccaagggctgcagttctacaggctacaccgggaagaaaggcccaactaccgtctcgagtgcctgcagtggctgaagagccagcctcggtggcccagctggggctggaaccaggtctcctgcccttgttcctggcagcagggacgacgggacttacgattccaacccgtcagcataggtcgctggggcctcggcagtaggcagctgtgcagcttcacctcttggcgaggaggcgtgtgctgcagctacgggccctggggagagtttcgtgaaggctggcacgtgcagcgtccttggcagttggcccaggaactggagccacagagctggtgctgccgctggaatgacaagccctacctctgtgccctgtaccagcagaggcggccccacgtgggctgtgctacatacaggcccccacagcccgcctggatgttcggggacccccacatcaccaccttggatggtgtcagttacaccttcaatgggctgggggacttcctgctggtcggggcccaagacgggaactcctccttcctgcttcagggccgcaccgcccagactggctcagcccaggccaccaacttcatcgcctttgcggctcagtaccgctccagcagcctgggccccgtcacggtccaatggctccttgagcctcacgacgcaatccgtgtcctgctggataaccagactgtgacatttcagcctgaccatgaagacggcggaggccaggagacgttcaacgccaccggagtcctcctgagccgcaacggctctgaggtctccgccagcttcgacggctgggccaccgtctcggtgatcgcgctctccaacatcctccactcctccgccagcctcccgcccgagtaccagaaccgcacggaggggctcctgggggtctggaataacaatccagaggacgacttcaggatgcccaatggctccaccattcccccagggagccctgaggagatgcttttccactttggaatgacctggcagatcaacgggacaggcctccttggcaagaggaatgaccagctgccttccaacttcacccctgttttctactcacaactgcaaaaaaacagctcctgggctgaacatttgatctccaactgtgacggagatagctcatgcatctatgacaccctggccctgcgcaacgcaagcatcggacttcacacgagggaagtcagtaaaaactacgagcaggcgaacgccaccctcaatcagtacccgccctccatcaatggtggtcgtgtgattgaagcctacaaggggcagaccacgctgattcagtacaccagcaatgctgaggatgccaacttcacgctcagagacagctgcaccgacttggagctctttgagaatgggacgttgctgtggacacccaagtcgctggagccattcactctggagattctagcaagaagtgccaagattggcttggcatctgcactccagcccaggactgtggtctgccattgcaatgcagagagccagtgtttgtacaatcagaccagcagggtgggcaactcctccctggaggtggctggctgcaagtgtgacgggggcaccttcggccgctactgcgagggctccgaggatgcctgtgaggagccgtgcttcccgagtgtccactgcgttcctgggaagggctgcgaggcctgccctccaaacctgactggggatgggcggcactgtgcggctctggggagctctttcctgtgtcagaaccagtcctgccctgtgaattactgctacaatcaaggccactgctacatctcccagactctgggctgtcagcccatgtgcacctgccccccagccttcactgacagccgctgcttcctggctgggaacaacttcagtccaactgtcaacctagaacttcccttaagagtcatccagctcttgctcagtgaagaggaaaatgcctccatggcagaggtcaacgcctcggtggcatacagactggggaccctggacatgcgggcctttctccgcaacagccaagtggaacgaatcgattctgcagcaccggcctcgggaagccccatccaacactggatggtcatctcggagttccagtaccgccctcggggcccggtcattgacttcctgaacaaccagctgctggccgcggtggtggaggcgttcttataccacgttccacggaggagtgaggagcccaggaacgacgtggtcttccagcccatctccggggaagacgtgcgcgatgtgacagccctgaacgtgagcacgctgaaggcttacttcagatgcgatggctacaagggctacgacctggtctacagcccccagagcggcttcacctgcgtgtccccgtgcagtaggggctactgtgaccatggaggccagtgccagcacctgcccagtgggccccgctgcagctgtgtgtccttctccatctacacggcctggggcgagcactgtgagcacctgagcatgaaactcgacgcgttcttcggcatcttctttggggccctgggcggcctcttgctgctgggggtcgggacgttcgtggtcctgcgcttctggggttgctccggggccaggttctcctatttcctgaactcagctgaggccttgccttgaaggggcagctgtggcctaggctacctcaagactcacctcatccttaccgcacatttaaggcgccattgcttttgggagactggaaaagggaaggtgactgaaggctgtcaggattctt

SEQ ID NO: 155698 - DNA, 16566 bp, Homo sapiens; identical to SEQ ID NO: 155677
  Payload ID: 10597
  Gene Symbol: MUC4
  Gene Name: mucin 4, cell surface associated
  ENST ID: ENST00000631008
  CDS Start-End: 1-16157

SEQ ID NO: 155699 - DNA, 16015 bp, Homo sapiens
  Payload ID: 10597
  Gene Symbol: MUC4
  Gene Name: mucin 4, cell surface associated
  ENST ID: ENST00000628062
  CDS Start-End: 1-13253
gaaccacagaggacacattaataactggaagtaaaactgctgccccagtcacctcaacaggctcaacaacagcgacactagagggacaatcaactgcagcttcttcaaggacctctaatcaggacatatcagcttcatctcagaaccaccagactaagagcacggagaccaccagcaaagctcaaaccgacaccctcacgcagatgatgacatcaactcttttttcttccccaagtgtacacaatgtgatggagacagctcctccagatgaaatgaccacatcatttccctccagtgtcaccaacacactcatgatgacatcaaagactataacaatgacaacctccacagactccactcttggaaacacagaagagacatcaacagcaggaactgaaagttctaccccagtgacctcagcagtctcaataacagctggacaggaaggacaatcacgaacaacttcctggaggacctctatccaagacacatcagcttcttctcagaaccactggactcggagcacgcagaccaccagggaatctcaaaccagcaccctaacacacagaaccacttcaactccttctttctctccaagtgtacacaatgtgacagggactgtttctcagaagacatctccttcaggtgaaacagctacctcatccctctgtagtgtcacaaacacatccatgatgacatcagagaagataacagtgacaacctccacaggctccactcttggaaacccaggggagacatcatcagtacctgttactggaagtcttatgccagtcacctcagcagccttagtaacatttgatccagaaggacaatcaccagcaactttctcaaggacttctactcaggacacaacagctttttctaagaaccaccagactcagagcgtggagaccaccagagtatctcaaatcaacaccctcaacaccctcacaccggttacaacatcaactgttttatcctcaccaagtggattcaacccaagtggaacagtttctcaggagacattcccttctggtgaaacaaccacctcatccccttccagtgtcagcaatacattcctggtaacatcaaaggtgttcagaatgccaacctccagagactctactcttggaaacacagaggagacatcactatctgtaagtggaaccatttctgcaatcacttccaaagtttcaaccatatggtggtcagacactctgtcaacagcactctcccccagttctctacctccaaaaatatccacagctttccacacccagcagagtgaaggtgcagagaccacaggacggcctcatgagaggagctcattctctccaggtgtgtctcaagaaatatttactctacatgaaacaacaacatggccttcctcattctccagcaaaggccacacaacttggtcacaaacagaactgccctcaacatcaacaggtgctgccactaggcttgtcacaggaaatccatctacagggacagctggcactattccaagggtcccctctaaggtctcagcaataggggaaccaggagagcccaccacatactcctcccacagcacaactctcccaaaaacaacaggggcaggcgcccagacacaatggacacaagaaacggggaccactggagaggctcttctcagcagcccaagctacagtgtgactcagatgataaaaacggccacatccccatcttcttcacctatgctggatagacacacatcccaacaaattacaacggcaccatcaacaaatcattcaacaatacattccacaagcacctctcctcaggaatcaccagctgtttcccaaaggggtcacactcaagccccgcagaccacacaagaatcacaaaccacgaggtccgtctcccccatgactgacaccaagacagtcaccaccccaggttcttccttcacagccagtgggcactcgccctcagaaattgttcctcaggacgcacccaccataagtgcagcaacaacctttgccccagctcccaccggggatggtcacacaacccaggccccgaccacagcactgcaggcagcacccagcagccatgatgccaccctggggccctcaggaggcacgtcactttccaaaacaggtgcccttactctggccaactctgtagtgtcaacaccagggggcccagaaggacaatggacatcagcctctgccagcacctcacctgacacagcagcagccatgacccatacccaccaggctgagagcacagaggcctctggacaaacacagaccagcgaaccggcctcctcagggtcacgaaccacctcagcgggcacagctaccccttcctcatccggggcgagtggcacaacaccttcaggaagcgaaggaatatccacctcaggagagacgacaaggttttcatcaaacccctccagggacagtcacacaacccagtcaacaaccgaattgctgtccgcctcagccagtcatggtgccatcccagtaagcacaggaatggcgtcttcgatcgtccccggcacctttcatcccaccctctctgaggcctccactgcagggagaccgacaggacagtcaagcccaacttctcccagtgcctctcctcaggagacagccgccatttcccggatggcccagactcagaggacaagaaccagcagagggtctgacactatcagcctggcgtcccaggcaaccgacaccttctcaacagtcccacccacacctccatcgatcacatccactgggcttacatctccacaaaccgagacccacactctgtcaccttcagggtctggtaaaaccttcaccacggccctcatcagcaacgccacccctcttcctgtcacctacgcttcctcggcatccacaggtcacaccacccctcttcatgtcaccgatgcttcctcagtatccacaggtcacgccacccctcttcctgtcaccagcccttcctcagtatccacaggtcacaccacccctcttcctgtcaccgacacttcctcagaatccacaggtcacgtcacccctcttcctgtcaccagcttttcctcagcatccacaggtgacagcacccctcttcctgtcactgacacttcctcagcatccacaggtcacgtcacccctcttcctgtcaccagcctttcctcagcatccacaggtgacaccacccctcttcctgtcactgacacttcctcagcatccacaggtcacgccacctctcttcctgtcaccgacacttcctcagtatccacaggtcacaccacccctcttcctgtcaccgacacttcctcagcatccacaggtcacgccacctctcttcctgtcaccgacacttcctcagtatccacaggtcacaccacccctcttcatgtcactgatgcttcctcagcatccacaggtcaggccacccctcttcctgtcaccagcctttcctcagtatccacaggtgacaccacgcctcttcctgtcactagcccttcctcagcatccacaggtcacgccacccctcttcttgtcaccgacacttcctcagcatccacaggacacgccacccctcttcctgtcaccgacgcttcctcagtgtccacagatcacgccacctctcttcctgtaaccatcccttccgcagcatccacaggtcacaccacccctcttcctgtcaccgacacttcctcagcatccacaggtcaggccacctctcttcttgtcaccgacacttcctcagtatccacaggtgacaccacgcctcttcctgtcactagcacttcctcagcatccacaggtcacgtcactcctcttcatgtcaccagcccttcctcagcatccacaggtcacgccacccctcttcctgtcaccagcctttcctcagcatccacaggtgacaccatgcctcttcctgtcactagcccttcctcagcatccacaggtgacaccacccctcttcctgtcaccgacgcttcctcagtatccacaggtcacaccacccctcttcatgtcactgatgcttcctcagcatccacaggtcaggccacccctcttcctgtcaccagcctttcctcagtatccacaggtgacaccacgcctcttcctgtcactagcccttcctcagcatccacaggtcacgccacccctcttcttgtcaccgacacttcctcagcatccacaggacacgccacccctcttcctgtcaccgacgcttcctcagtgtccacagatcacgccacctctcttcctgtaaccatcccttccgcagcatccacaggtcacaccacccctcttcctgtcaccgacacttcctcagcatccacaggtcaggccacctctcttcttgtcaccgacacttcctcagtatccacaggtgacaccacgcctcttcctgtcactagcacttcctcagcatccacaggtcacgtcactcctcttcatgtcaccagcccttcctcagcatccacaggtcacgccacccctcttcctgtcaccagcctttcctcagcatccacaggtgacaccatgcctcttcctgtcactagcccttcctcagcatccacaggtgacaccacccctcttcctgtcaccgacgcttcctcagtatccacaggtcacaccacccctcttcctgtcaccagcccttcctcagcatctacaggtcacaccacccctcttcctgtcaccgacacttcctcagcatccaaaggtgacaccacccctcttcctgtcaccagcccttcctcagcatctacaggtcacaccacccctcttcctgtcaccgacacttcctcagcatccacaggtgacaccacccctcttcctgtcaccaatgcttcctcattatccacaggtcacgccacccctcttcatgtcaccagcccttcctcagcatccacaggtcacgccacccctcttcctgtcaccagcacttcctcagcatccaccggtcacgccacccctcttcctgtcaccggcctttcctcagctaccacagatgacaccacccgtcttcctgtcaccgacgtttcctcggcatccacaggtcaggccacccctcttcctgtcaccagcctttcctcagtatccacaggtgacaccacgcctcttcctgtcactagcccttcctcagcatccacaggtcacgccagccctcttcttgtcactgacgcttcctcagcatccacaggtcaggccacccctcttcctgtcaccgacacttcctcagtatccacagctcacgccaccccacttcctgtcaccggcctttcttcagcttccacagatgacaccacccgtcttcctgtcaccgacgtttcctcggcatccacaggtcaggccatccctcttcctgtcaccagcccttcctcagcatccacaggtgacaccacccctcttcctgtcaccgacgcttcctcagcatccacaggtgacaccacctctcttcctgtcaccatcccttcctcagcatcttcaggtcacaccacctctcttcctgtcaccgacgcttcctcagtgtccacaggtcacgccacctctcttcttgtcaccgacgcttcctcagtatccacaggtgacaccacccctcttcctgtcaccgacactaactcagcatccacaggtgacaccacccctcttcatgtcaccgacgcttcctcagtatccacaggtcacgccacctctcttcctgtcaccagcctttcctcagcatccacaggtgacaccacgcctcttcctgtcactagcccttcctcagcatcctcaggtcacaccacccctcttcctgtcaccgacgcttcctcagtacccacaggtcacgccacctctcttcctgtcaccgacgcttcctcagtgtccacaggtcacgccacccctcttcctgtcaccgacgcttcctcagtgtccacaggtcatgccacccctcttccggtcaccgacacttcctcagtatctacaggacaggccacccctcttcctgtcaccagcctttcctcagcatccactggtgacaccacgccgcttcctgtcaccgatacttcctcagcatccacaggtcaggacacccctcttcctgtcaccagcctttcctcagtatccacaggtgacaccacgcctcttcctgtcactaacccttcctcagcatccacaggtcacgccacccctcttcttgtcaccgacgcttcctcaatatccacaggtcacgccacctctcttcttgtcaccgacgcttcctcagtatccacaggtcacgccaccgctcttcatgacaccgatgcttcctcattatccacaggggacaccacccctcttcctgtcaccagcccttcctcaacatccacaggtgacaccacccctcttcctgtcaccgaaacttcctcagtatccacaggtcacgccacctctcttcctgtcaccgacacttcctcagcatccacaggtcacgccacctctcttcctgtcaccgacacttcctcagcatccacaggtcacgccacccctcttcctgtcaccgacacttcctcagcatccacaggtcaggccacccctcttcctgtcaccagcccttcctcagcatccacaggtcacgccatccctcttcttgtcaccgacacttcctcagcatccacaggacaggccacccctcttcctgtcaccagcctttcctcagcatccacaggtgacaccacccctcttcctgtcaccgacgcttcctcagtgtccacaggtcacgccacctctcttcctgtcaccagcctttcctcagtatccacaggtgacaccactcctcttcctgtcactagcccttcctcagcatccacaggtcacgccacccctcttcatgtcaccgacgcttcctcagcatccacaggtcacgccacccctcttcctgtcaccagcctttcctcagcatccacaggtgacaccacgcctcttcctgtcactagcccttcctcagcatccacaggtcacgccacccctcttcatgtcaccgacgcttcctcagtatccacaggtgacaccacccctcttcctgtcaccagctcttcctcagcatcctcaggtcacaccacccctcttcctgtcaccgacgcttcctcagcatccacaggtgacaccacccctcttcctgtcaccgacacttcctcagcatccacaggtcacgccacccatcttcctgtcaccggcctttcctcagcttccacaggtgacaccacccgtcttcctgtcaccaacgtttcctcggcatccacaggtcatgccacccctcttcctgtcaccagcacttcctcagcatccacaggtgacaccacccctcttcctggcaccgacacttcctcagtatccacaggtcacaccacccctcttcttgtcaccgacgcttcgtcagtatccacaggtgacaccacccgtcttcctgtcaccagcccttcctcagcatctacaggtcacaccacccctctacctgtcaccgacactccctcagcatccacaggtgacaccacccctcttcctgtcaccaatgcttcctcattatccacacgtcacgccacctctcttcatgtcaccagcccttcctcagcatccacaggtcacgccacctctcttcctgtcaccgacacttccgcagcatccacaggtcacgccacccctcttcctgtcaccagcacttcctcagcatccacaggtgacaccacccctcttcctgtcaccgacacttactcagcatccacaggtcaggccacccctcttcctgtcaccagcctttcctcagtatccacaggtgacaccacgcctcttcctgtcactagcccttcctcagcatccacaggtcacgccactcctcttcttgtcaccgacgcttcctcagcatccacaggtcaggccacccctcttcctgtcaccagcctttcctcagtatccacaggtgacaccacgcctcttcctgtcactagcccttcctcagcatccaccggtcatgccacctctcttcctgtcaccgacacttcctcagcatccacaggtgacaccacctctcttcctgtcaccgacacttcctcagcatacacaggtgacaccacctctcttcctgtcaccgacacttcctcatcatccacaggtgacaccacccctcttcttgtcaccgagacttcctcagtatccacaggtgacaccacccctcttcctgtcaccgacacttcctcagcatccacaggtcacgccacccctcttcctgtcaccaacacttcctcagtatccacaggtcacgccacccctcttcatgtcaccagcccttcctcagcatccacaggtcacaccacccctcttcctgtcaccgacgcttcgtcagtgtccacaggtcacgccacctctcttcctgtcaccgacgcttcctcagtgttcacaggtcatgccacctctcttcctgtcaccatcccttcctcagcatcctcaggtcacaccacccctcttcctgtcaccgacgcttcctcagtgtccacaggtcacgccacctctcttcctgtcaccgacgcttcctcagtgtccacaggtcatgccacccctcttcctgtcaccgacgcttcctcagtgtccacaggtcacgctacccctcttcctctcaccagcctttcctcagtatccacaggtgacaccacgcctcttcctgtcaccgacacttcctcagcatccacaggtcaggccacccctcttcctgtcaccagcctttcctcagtatccacaggtgacaccacccctcttcctgtcaccgacacttcctcagcatccacaggtcacgccacctctcttcctgtcaccgacacttcctcagcatccacaggtcacgccacccctcttcctgacaccgacacttcctcagcatccacaggtcacgccacccttcttcctgtcaccgacacttcctcagcatccataggtcacgccacctctcttcctgtcaccgacacttcctcaatatccacaggtcacgccacccctcttcatgtcaccagcccttcctcagcatccaccggtcacgccaccccgcttcctgtcaccgacacttcctcagcatccacaggtcacgccaaccctcttcatgtcaccagcccttcctcagcatccaccggtcacgccaccccgcttcctgtcaccgacacttcctcagcatccacaggtcacgccacccctcttcctgtcaccagcctttcctcagtatccacaggtgacaccacgcctcttcctgtcactagcccttcctcagcatccacaggtcacaccacccctcttcctgtcaccgacacttcctcagcatccacaggtcaggccaccgctcttcctgtcaccagcacttcctcagcatccacaggtgacaccacccctcttcctgtcaccgacacttcctcagcatccacaggtcaggccacccctcttcctgtcaccagcctttcctcagtatccacaggtgacaccacgcctcttcctgtcactagcccttcctcagcatccacaggtcacgccactcctcttcttgtcaccgacgcttcctcagcatccacaggtcaggccacccctcttcctgtcaccagcctttcctcagtatccacaggtgacaccacgcctcttcctgtcactagcccttcctcagcatccaccggtcatgccacctctcttcctgtcaccgacacttcctcagcatccacaggtgacaccacctctcttcctgtcaccgacacttcctcagcatacacaggtgacaccacctctcttcctgtcaccgacacttcctcatcatccacaggtgacaccacccctcttcttgtcaccgagacttcctcagtatccacaggtcacgccactcctcttcttgtcaccgacgcttcctcagcatccacaggtcacgccacccctcttcatgtcaccagcccttcctcagcatccacaggtgacaccacccctgtgcctgtcaccgacacttcctcagtatccacaggtcacgccacccctcttcctgtcaccggcctttcctcagcttccacaggtgacaccacccgtcttcctgtcaccgacatttcctcggcatccacaggtcaggccacccctcttcctgtcaccaacacttcctcagtatccacaggtgacaccatgcctcttcctgtcactagcccttcctcagcatccacaggtcacgccacccctcttcctgtcaccagcacttcctcagcatccaccggtcacgccacccctgttcctgtcaccagcacttcctcagcatctacaggtcacaccacccctcttcctgtcaccgacacttcctcagcatccacaggtgacaccacccctcttcctgtcaccagcccttcctcagcatctacaggtcacaccacccctcttcatgtcaccatcccttcctcagcatccacaggtgacaccagcactcttcctgtcaccggcgcttcctcagcatccaccggtcacgccacccctcttcctgtcaccgacacttcctcagtatccaccggtcacgccacgcctcttcctgtcaccagcctttcctcagtatccacaggtgacaccacccctcttcctgtcaccgacgcttcctcggcatccacaggtcaggccacccctcttcctgtcaccagcctttcctcagtatccacaggtgacaccacccctcttcttgtcaccgacgcttcctcagtatccacaggtcacgccacccctcttcctgtcaccgacacttcctcagcatccacaggtgacaccacccgtcttcctgtcacggacacttcctcagcatccacaggtcaggccacccctcttcctgtcaccagcctttcctcagtatccacaggtgacaccacccctcttcttgtcaccgacgcttcctcagtatccacaggtcacgccacccctcttcctgtcaccgacacttcctcagcatccacaggtgacaccacccgtcttcctgtcacggacacttcctcagcatccacaggtcaggccacccctcttcctgtcaccatcccttcctcatcatcctcaggtcacaccacccctcttcctgtcaccagcacttcctcagtatctacaggtcacgtcacccctcttcatgtcaccagcccttcctcagcatccacaggtcacgtcacccctcttcctgtcaccagcacttcctcagcatccacaggtcacgccacccctcttcttgtcaccgacgcttcctcagtgtccacaggtcacgccacgcctcttcctgtcaccgacgcttcctcagcatccacaggtgacaccacccctcttcctgtcaccgacacttcctcagcatccacaggtcaggccacccctcttcctgtcaccagcctttcctcagtatccacaggtgacaccacccctcttcctgtcaccgacgcttcctcagcatccacaggtcacgccacccctcttcctgtcaccatcccttcctcagtatccacaggtgacaccatgcctcttcctgtcactagcccttcctcagcatccacaggtcacgccacccctcttcctgttaccggcctttcctcagcttccacaggtgacaccacccctcttcctgtcaccgacacttcctcagcatccacacgtcacgccacccctcttcctgtcaccgacacttcctcagcttccacagatgacaccacccgtcttcctgtcaccgacgtttcctcggcatccacaggacatgccacccctcttcctgtcaccagcacttcctcagcatccacaggtgacaccacccctcttcctgtcaccgacacttcctcagtatccacaggtcacgccacctctcttcctgtcaccagccgttcctcagcatccacaggtcacgccaccccccttcctgtcaccgacacttcctcagtatccacaggtcacgccacccctcttcctgtcaccagcacttcctcagtatctacaggtcacgccacccctcttcctgtcaccagcccttcctcagcatccacaggtcacgccacccctgttcctgtcaccagcacttcctcagcatccacaggtgacaccacccctcttcctgtcaccaatgcttcctcattatccacaggtcacgccacccctcttcatgtcaccagcccttcctcagcatccagaggtgacaccagcactcttcctgtcaccgatgcttcctcagcatccaccggtcacgccacccctcttcctctcaccagcctttcctcagtatccacaggtgacaccacgcctcttcctgtcaccgacacttcctctgcatccacaggtcaggccacccctcttcctgtcaccagcctttcctcagtatccacaggtgacaccacgcctcttcctgtcaccatcccttcctcagcatcctcaggtcacaccacctctcttcctgtcaccgacgcttcctcagtgtccacaggtcacggcacccctcttcctgtcaccagcacttcctcagcatccacaggtgacaccacccctcttcctgtcaccgacacttcctcagcatccacaggtcacgccacccctcttcctgtcaccgacacttcctcagcatccacaggtcacgccacccctcttcctgtcaccagcctttcctcagtatccacaggtcacgccacccctcttgctgtcagcagtgctacctcagcttccacagtatcctcggactcccctctgaagatggaaacaccaggaatgacaacaccgtcactgaagacagacggtgggagacgcacagccacatcaccaccccccacaacctcccagaccatcatttccaccattcccagcactgccatgcacacccgctccacagctgcccccatccccatcctgcctgagagaggagtttccctcttcccctatggggcaggcgccggggacctggagttcgtcaggaggaccgtggacttcacctccccactcttcaagccggcgactggcttcccccttggctcctctctccgtgattccctctacgcttcacaggccgggaccctgtggccctggtggctccgttctgggacgatgctgacttctccactggtcgggggaccacattttatcagagcaacacctaccaagccatcctctccacggacgggagcaggtcctatgccctgtttctctaccagagcggtgggatgcagtgggacgtggcccagcgctcagtggagatggctatttcgaaaacagcccactgatgtcccagccagtgtgggagaggtatcgccctgatagattcctgaattccaactcaggcctccaagggctgcagttctacaggctacaccgggaagaaaggcccaactaccgtctcgagtgcctgcagtggctgaagagccagcctcggtggcccagctggggctggaaccaggtctcctgcccttgttcctggcagcagggacgacgggacttacgattccaacccgtcagcataggtcgctggggcctcggcagtaggcagctgtgcagcttcacctcttggcgaggaggcgtgtgctgcagctacgggccctggggagagtttcgtgaaggctggcacgtgcagcgtccttggcagttggcccaggaactggagccacagagctggtgctgccgctggaatgacaagccctacctctgtgccctgtaccagcagaggcggccccacgtgggctgtgctacatacaggcccccacagcccgcctggatgttcggggacccccacatcaccaccttggatggtgtcagttacaccttcaatgggctgggggacttcctgctggtcggggcccaagacgggaactcctccttcctgcttcagggccgcaccgcccagactggctcagcccaggccaccaacttcatcgcctttgcggctcagtaccgctccagcagcctgggccccgtcacggtccaatggctccttgagcctcacgacgcaatccgtgtcctgctggataaccagactgtgacatttcagcctgaccatgaagacggcggaggccaggagacgttcaacgccaccggagtcctcctgagccgcaacggctctgaggtctcggccagcttcgacggctgggccaccgtctcggtgatcgcgctctccaacatcctccacgcctccgccagcctcccgcccgagtaccagaaccgcacggaggggctcctgggggtctggaataacaatccagaggacgacttcaggatgcccaatggctccaccattcccccagggagccctgaggagatgcttttccactttggaatgacctggcagatcaacgggacaggcctccttggcaagaggaatgaccagctgccttccaacttcacccctgttttctactcacaactgcaaaaaaacagctcctgggctgaacatttgatctccaactgtgacggagatagctcatgcatctatgacaccctggccctgcgcaacgcaagcatcggacttcacacgagggaagtcagtaaaaactacgagcaggcgaacgccaccctcaatcagtacccgccctccatcaatggtggtcgtgtgattgaagcctacaaggggcagaccacgctgattcagtacaccagcaatgctgaggatgccaacttcacgctcagagacagctgcaccgacttggagctctttgagaatgggacgttgctgtggacacccaagtcgctggagccattcactctggagattctagcaagaagtgccaagattggcttggcatctgcactccagcccaggactgtggtctgccattgcaatgcagagagccagtgtttgtacaatcagaccagcagggtgggcaactcctccctggaggtggctggctgcaagtgtgacgggggcaccttcggccgctactgcgagggctccgaggatgcctgtgaggagccgtgcttcccgagtgtccactgcgttcctgggaagggctgcgaggcctgccctccaaacctgactggggatgggcggcactgtgcggctctggggagctctttcctgtgtcagaaccagtcctgccctgtgaattactgctacaatcaaggccactgctacatctcccagactctgggctgtcagcccatgtgcacctgccccccagccttcactgacagccgctgcttcctggctgggaacaacttcagtccaactgtcaacctagaacttcccttaagagtcatccagctcttgctcagtgaagaggaaaatgcctccatggcagaagtcaacgcctcggtggcatacagactggggaccctggacatgcgggcctttctccgcaacagccaagtggaacgaatcgattctgcagcaccggcctcgggaagccccatccaacactggatggtcatctcggagttccagtaccgccctcggggcccggtcattgacttcctgaacaaccagctgctggccgcggtggtggaggcgttcttataccacgttccacggaggagtgaggagcccaggaacgacgtggtcttccagcccatctccggggaagacgtgcgcgatgtgacagccctgaacgtgagcacgctgaaggcttacttcagatgcgatggctacaagggctacgacctggtctacagcccccagagcggcttcacctgcgtgtccccgtgcagtaggggctactgtgaccatggaggccagtgccaacacctgcccagtgggccccgctgcagctgtgtgtccttctccatctacacggcctggggcgagcactgtgagcacctgagcatgaaactcgacgcgttcttcggcatcttctttggggccctgggcggcctcttgctgctgggggtcgggacgttcgtggtcctgcgcttctggggttgctccggggccaggttctcctatttcctgaactcagctgaggccttgccttgaaggggcagctgtggcctaggctacctcaagactcacctcatccttaccgcacatttaaggcgccattgcttttgggagactggaaaagggaaggtgactgaaggctgtcaggattctt

SEQ ID NO: 155700 - DNA, 16406 bp, Homo sapiens
  Payload ID: 10597
  Gene Symbol: MUC4
  Gene Name: mucin 4, cell surface associated
  ENST ID: ENST00000626664
  CDS Start-End: 1-15131
gaaccacagaggacacattaataactggaagtaaaactgctgccccagtcacctcaacaggctcaacaacagcgacactagagggacaatcaactgcagcttcttcaaggacctctaatcaggacatatcagcttcatctcagaaccaccagactaagagcacggagaccaccagcaaagctcaaaccgacaccctcacgcagatgatgacatcaactcttttttcttccccaagtgtacacaatgtgatggagacagctcctccagatgaaatgaccacatcatttccctccagtgtcaccaacacactcatgatgacatcaaagactataacaatgacaacctccacagactccactcttggaaacacagaagagacatcaacagcaggaactgaaagttctaccccagtgacctcagcagtctcaataacagctggacaggaaggacaatcacgaacaacttcctggaggacctctatccaagacacatcagcttcttctcagaaccactggactcggagcacgcagaccaccagggaatctcaaaccagcaccctaacacacagaaccacttcaactccttctttctctccaagtgtacacaatgtgacagggactgtttctcagaagacatctccttcaggtgaaacagctacctcatccctctgtagtgtcacaaacacatccatgatgacatcagagaagataacagtgacaacctccacaggctccactcttggaaacccaggggagacatcatcagtacctgttactggaagtcttatgccagtcacctcagcagccttagtaacatttgatccagaaggacaatcaccagcaactttctcaaggacttctactcaggacacaacagctttttctaagaaccaccagactcagagcgtggagaccaccagagtatctcaaatcaacaccctcaacaccctcacaccggttacaacatcaactgttttatcctcaccaagtggattcaacccaagtggaacagtttctcaggagacattcccttctggtgaaacaaccacctcatccccttccagtgtcagcaatacattcctggtaacatcaaaggtgttcagaatgccaacctccagagactctactcttggaaacacagaggagacatcactatctgtaagtggaaccatttctgcaatcacttccaaagtttcaaccatatggtggtcagacactctgtcaacagcactctcccccagttctctacctccaaaaatatccacagctttccacacccagcagagtgaaggtgcagagaccacaggacggcctcatgagaggagctcattctctccaggtgtgtctcaagaaatatttactctacatgaaacaacaacatggccttcctcattctccagcaaaggccacacaacttggtcacaaacagaactgccctcaacatcaacaggtgctgccactaggcttgtcacaggaaatccatctacagggacagctggcactattccaagggtcccctctaaggtctcagcaataggggaaccaggagagcccaccacatactcctcccacagcacaactctcccaaaaacaacaggggcaggcgcccagacacaatggacacaagaaacggggaccactggagaggctcttctcagcagcccaagctacagtgtgactcagatgataaaaacggccacatccccatcttcttcacctatgctggatagacacacatcccaacaaattacaacggcaccatcaacaaatcattcaacaatacattccacaagcacctctcctcaggaatcaccagctgtttcccaaaggggtcacactcaagccccgcagaccacacaagaatcacaaaccacgaggtccgtctcccccatgactgacaccaagacagtcaccaccccaggttcttccttcacagccagtgggcactcgccctcagaaattgttcctcaggacgcacccaccataagtgcagcaacaacctttgccccagctcccaccggggatggtcacacaacccaggccccgaccacagcactgcaggcagcacccagcagccatgatgccaccctggggccctcaggaggcacgtcactttccaaaacaggtgcccttactctggccaactctgtagtgtcaacaccagggggcccagaaggacaatggacatcagcctctgccagcacctcacctgacacagcagcagccatgacccatacccaccaggctgagagcacagaggcctctggacaaacacagaccagcgaaccggcctcctcagggtcacgaaccacctcagcgggcacagctaccccttcctcatccggggcgagtggcacaacaccttcaggaagcgaaggaatatccacctcaggagagacgacaaggttttcatcaaacccctccagggacagtcacacaacccagtcaacaaccgaattgctgtccgcctcagccagtcatggtgccatcccagtaagcacaggaatggcgtcttcgatcgtccccggcacctttcatcccaccctctctgaggcctccactgcagggagaccgacaggacagtcaagcccaacttctcccagtgcctctcctcaggagacagccgccatttcccggatggcccagactcagaggacaagaaccagcagagggtctgacactatcagcctggcgtcccaggcaaccgacaccttctcaacagtcccacccacacctccatcgatcacatccactgggcttacatctccacaaaccgagacccacactctgtcaccttcagggtctggtaaaaccttcaccacggccctcatcagcaacgccacccctcttcctgtcacctacgcttcctcggcatccacaggtcacaccacccctcttcatgtcaccgatgcttcctcagtatccacaggtcacgccacccctcttcctgtcaccagcccttcctcagtatccacaggtcacaccacccctcttcctgtcaccgacacttcctcagaatccacaggtcacgtcacccctcttcctgtcaccagcttttcctcagcatccacaggtgacagcacccctcttcctgtcactgacacttcctcagcatccacaggtcacgtcacccctcttcctgtcaccagcctttcctcagcatccacaggtgacaccacccctcttcctgtcactgacacttcctcagcatccacaggtcacgccacctctcttcctgtcaccgacacttcctcagtatccacaggtcacaccacccctcttcctgtcaccgacacttcctcagcatccacaggtcacgccacctctcttcctgtcaccgacacttcctcagtatccacaggtcacaccacccctcttcatgtcactgatgcttcctcagcatccacaggtcaggccacccctcttcctgtcaccagcctttcctcagtatccacaggtgacaccacgcctcttcctgtcactagcccttcctcagcatccacaggtcacgccacccctcttcttgtcaccgacacttcctcagcatccacaggacacgccacccctcttcctgtcaccgacgcttcctcagtgtccacagatcacgccacctctcttcctgtaaccatcccttccgcagcatccacaggtcacaccacccctcttcctgtcaccgacacttcctcagcatccacaggtcaggccacctctcttcttgtcaccgacacttcctcagtatccacaggtgacaccacgcctcttcctgtcactagcacttcctcagcatccacaggtcacgtcactcctcttcatgtcaccagcccttcctcagcatccacaggtcacgccacccctcttcctgtcaccagcctttcctcagcatccacaggtgacaccatgcctcttcctgtcactagcccttcctcagcatccacaggtgacaccacccctcttcctgtcaccgacgcttcctcagtatccacaggtcacaccacccctcttcatgtcactgatgcttcctcagcatccacaggtcaggccacccctcttcctgtcaccagcctttcctcagtatccacaggtgacaccacgcctcttcctgtcactagcccttcctcagcatccacaggtcacgccacccctcttcttgtcaccgacacttcctcagcatccacaggacacgccacccctcttcctgtcaccgacgcttcctcagtgtccacagatcacgccacctctcttcctgtaaccatcccttccgcagcatccacaggtcacaccacccctcttcctgtcaccgacacttcctcagcatccacaggtcaggccacctctcttcttgtcaccgacacttcctcagtatccacaggtgacaccacgcctcttcctgtcactagcacttcctcagcatccacaggtcacgtcactcctcttcatgtcaccagcccttcctcagcatccacaggtcacgccacccctcttcctgtcaccagcctttcctcagcatccacaggtgacaccatgcctcttcctgtcactagcccttcctcagcatccacaggtgacaccacccctcttcctgtcaccgacgcttcctcagtatccacaggtcacaccacccctcttcctgtcaccagcccttcctcagcatctacaggtcacaccacccctcttcctgtcaccgacacttcctcagcatccaaaggtgacaccacccctcttcctgtcaccagcccttcctcagcatctacaggtcacaccacccctcttcctgtcaccgacacttcctcagcatccacaggtgacaccacccctcttcctgtcaccaatgcttcctcattatccacaggtcacgccacccctcttcatgtcaccagcccttcctcagcatccacaggtcacgccacccctcttcctgtcaccagcacttcctcagcatccaccggtcacgccacccctcttcctgtcaccggcctttcctcagctaccacagatgacaccacccgtcttcctgtcaccgacgtttcctcggcatccacaggtcaggccacccctcttcctgtcaccagcctttcctcagtatccacaggtgacaccacgcctcttcctgtcactagcccttcctcagcatccacaggtcacgccagccctcttcttgtcactgacgcttcctcagcatccacaggtcaggccacccctcttcctgtcaccgacacttcctcagtatccacagctcacgccaccccacttcctgtcaccggcctttcttcagcttccacagatgacaccacccgtcttcctgtcaccgacgtttcctcggcatccacaggtcaggccatccctcttcctgtcaccagcccttcctcagcatccacaggtgacaccacccctcttcctgtcaccgacgcttcctcagcatccacaggtgacaccacctctcttcctgtcaccatcccttcctcagcatcttcaggtcacaccacctctcttcctgtcaccgacgcttcctcagtgtccacaggtcacgccacctctcttcttgtcaccgacgcttcctcagtatccacaggtgacaccacccctcttcctgtcaccgacactaactcagcatccacaggtgacaccacccctcttcatgtcaccgacgcttcctcagtatccacaggtcacgccacctctcttcctgtcaccagcctttcctcagcatccacaggtgacaccacgcctcttcctgtcactagcccttcctcagcatcctcaggtcacaccacccctcttcctgtcaccgacgcttcctcagtacccacaggtcacgccacctctcttcctgtcaccgacgcttcctcagtgtccacaggtcacgccacccctcttcctgtcaccgacgcttcctcagtgtccacaggtcatgccacccctcttccggtcaccgacacttcctcagtatctacaggacaggccacccctcttcctgtcaccagcctttcctcagcatccactggtgacaccacgccgcttcctgtcaccgatacttcctcagcatccacaggtcaggacacccctcttcctgtcaccagcctttcctcagtatccacaggtgacaccacgcctcttcctgtcactaacccttcctcagcatccacaggtcacgccacccctcttcttgtcaccgacgcttcctcaatatccacaggtcacgccacctctcttcttgtcaccgacgcttcctcagtatccacaggtcacgccaccgctcttcatgacaccgatgcttcctcattatccacaggggacaccacccctcttcctgtcaccagcccttcctcaacatccacaggtgacaccacccctcttcctgtcaccgaaacttcctcagtatccacaggtcacgccacctctcttcctgtcaccgacacttcctcagcatccacaggtcacgccacctctcttcctgtcaccgacacttcctcagcatccacaggtcacgccacccctcttcctgtcaccgacacttcctcagcatccacaggtcaggccacccctcttcctgtcaccagcccttcctcagcatccacaggtcacgccatccctcttcttgtcaccgacacttcctcagcatccacaggacaggccacccctcttcctgtcaccagcctttcctcagcatccacaggtgacaccacccctcttcctgtcaccgacgcttcctcagtgtccacaggtcacgccacctctcttcctgtcaccagcctttcctcagtatccacaggtgacaccactcctcttcctgtcactagcccttcctcagcatccacaggtcacgccacccctcttcatgtcaccgacgcttcctcagcatccacaggtcacgccacccctcttcctgtcaccagcctttcctcagcatccacaggtgacaccacgcctcttcctgtcactagcccttcctcagcatccacaggtcacgccacccctcttcatgtcaccgacgcttcctcagtatccacaggtgacaccacccctcttcctgtcaccagctcttcctcagcatcctcaggtcacaccacccctcttcctgtcaccgacgcttcctcagcatccacaggtgacaccacccctcttcctgtcaccgacacttcctcagcatccacaggtcacgccacccatcttcctgtcaccggcctttcctcagcttccacaggtgacaccacccgtcttcctgtcaccaacgtttcctcggcatccacaggtcatgccacccctcttcctgtcaccagcacttcctcagcatccacaggtgacaccacccctcttcctggcaccgacacttcctcagtatccacaggtcacaccacccctcttcttgtcaccgacgcttcgtcagtatccacaggtgacaccacccgtcttcctgtcaccagcccttcctcagcatctacaggtcacaccacccctctacctgtcaccgacactccctcagcatccacaggtgacaccacccctcttcctgtcaccaatgcttcctcattatccacacgtcacgccacctctcttcatgtcaccagcccttcctcagcatccacaggtcacgccacctctcttcctgtcaccgacacttccgcagcatccacaggtcacgccacccctcttcctgtcaccagcacttcctcagcatccacaggtgacaccacccctcttcctgtcaccgacacttactcagcatccacaggtcaggccacccctcttcctgtcaccagcctttcctcagtatccacaggtgacaccacgcctcttcctgtcactagcccttcctcagcatccacaggtcacgccactcctcttcttgtcaccgacgcttcctcagcatccacaggtcaggccacccctcttcctgtcaccagcctttcctcagtatccacaggtgacaccacgcctcttcctgtcactagcccttcctcagcatccaccggtcatgccacctctcttcctgtcaccgacacttcctcagcatccacaggtgacaccacctctcttcctgtcaccgacacttcctcagcatacacaggtgacaccacctctcttcctgtcaccgacacttcctcatcatccacaggtgacaccacccctcttcttgtcaccgagacttcctcagtatccacaggtgacaccacccctcttcctgtcaccgacacttcctcagcatccacaggtcacgccacccctcttcctgtcaccaacacttcctcagtatccacaggtcacgccacccctcttcatgtcaccagcccttcctcagcatccacaggtcacaccacccctcttcctgtcaccgacgcttcgtcagtgtccacaggtcacgccacctctcttcctgtcaccgacgcttcctcagtgttcacaggtcatgccacctctcttcctgtcaccatcccttcctcagcatcctcaggtcacaccacccctcttcctgtcaccgacgcttcctcagtgtccacaggtcacgccacctctcttcctgtcaccgacgcttcctcagtgtccacaggtcatgccacccctcttcctgtcaccgacgcttcctcagtgtccacaggtcacgctacccctcttcctctcaccagcctttcctcagtatccacaggtgacaccacgcctcttcctgtcaccgacacttcctcagcatccacaggtcaggccacccctcttcctgtcaccagcctttcctcagtatccacaggtgacaccacccctcttcctgtcaccgacacttcctcagcatccacaggtcacgccacctctcttcctgtcaccgacacttcctcagcatccacaggtcacgccacccctcttcctgacaccgacacttcctcagcatccacaggtcacgccacccttcttcctgtcaccgacacttcctcagcatccataggtcacgccacctctcttcctgtcaccgacacttcctcaatatccacaggtcacgccacccctcttcatgtcaccagcccttcctcagcatccaccggtcacgccaccccgcttcctgtcaccgacacttcctcagcatccacaggtcacgccaaccctcttcatgtcaccagcccttcctcagcatccaccggtcacgccaccccgcttcctgtcaccgacacttcctcagcatccacaggtcacgccacccctcttcctgtcaccagcctttcctcagtatccacaggtgacaccacgcctcttcctgtcactagcccttcctcagcatccacaggtcacaccacccctcttcctgtcaccgacacttcctcagcatccacaggtcaggccaccgctcttcctgtcaccagcacttcctcagcatccacaggtgacaccacccctcttcctgtcaccgacacttcctcagcatccacaggtcaggccacccctcttcctgtcaccagcctttcctcagtatccacaggtgacaccacgcctcttcctgtcactagcccttcctcagcatccacaggtcacgccactcctcttcttgtcaccgacgcttcctcagcatccacaggtcaggccacccctcttcctgtcaccagcctttcctcagtatccacaggtgacaccacgcctcttcctgtcactagcccttcctcagcatccaccggtcatgccacctctcttcctgtcaccgacacttcctcagcatccacaggtgacaccacctctcttcctgtcaccgacacttcctcagcatacacaggtgacaccacctctcttcctgtcaccgacacttcctcatcatccacaggtgacaccacccctcttcttgtcaccgagacttcctcagtatccacaggtcacgccactcctcttcttgtcaccgacgcttcctcagcatccacaggtcacgccacccctcttcatgtcaccagcccttcctcagcatccacaggtgacaccacccctgtgcctgtcaccgacacttcctcagtatccacaggtcacgccacccctcttcctgtcaccggcctttcctcagcttccacaggtgacaccacccgtcttcctgtcaccgacatttcctcggcatccacaggtcaggccacccctcttcctgtcaccaacacttcctcagtatccacaggtgacaccatgcctcttcctgtcactagcccttcctcagcatccacaggtcacgccacccctcttcctgtcaccagcacttcctcagcatccaccggtcacgccacccctgttcctgtcaccagcacttcctcagcatctacaggtcacaccacccctcttcctgtcaccgacacttcctcagcatccacaggtgacaccacccctcttcctgtcaccagcccttcctcagcatctacaggtcacaccacccctcttcatgtcaccatcccttcctcagcatccacaggtgacaccagcactcttcctgtcaccggcgcttcctcagcatccaccggtcacgccacccctcttcctgtcaccgacacttcctcagtatccaccggtcacgccacgcctcttcctgtcaccagcctttcctcagtatccacaggtgacaccacccctcttcctgtcaccgacgcttcctcggcatccacaggtcaggccacccctcttcctgtcaccagcctttcctcagtatccacaggtgacaccacccctcttcttgtcaccgacgcttcctcagtatccacaggtcacgccacccctcttcctgtcaccgacacttcctcagcatccacaggtgacaccacccgtcttcctgtcacggacacttcctcagcatccacaggtcaggccacccctcttcctgtcaccagcctttcctcagtatccacaggtgacaccacccctcttcttgtcaccgacgcttcctcagtatccacaggtcacgccacccctcttcctgtcaccgacacttcctcagcatccacaggtgacaccacccgtcttcctgtcacggacacttcctcagcatccacaggtcaggccacccctcttcctgtcaccatcccttcctcatcatcctcaggtcacaccacccctcttcctgtcaccagcacttcctcagtatctacaggtcacgtcacccctcttcatgtcaccagcccttcctcagcatccacaggtcacgtcacccctcttcctgtcaccagcacttcctcagcatccacaggtcacgccacccctcttcttgtcaccgacgcttcctcagtgtccacaggtcacgccacgcctcttcctgtcaccgacgcttcctcagcatccacaggtgacaccacccctcttcctgtcaccgacacttcctcagcatccacaggtcaggccacccctcttcctgtcaccagcctttcctcagtatccacaggtgacaccacccctcttcctgtcaccgacgcttcctcagcatccacaggtcacgccacccctcttcctgtcaccatcccttcctcagtatccacaggtgacaccatgcctcttcctgtcactagcccttcctcagcatccacaggtcacgccacccctcttcctgttaccggcctttcctcagcttccacaggtgacaccacccctcttcctgtcaccgacacttcctcagcatccacacgtcacgccacccctcttcctgtcaccgacacttcctcagcttccacagatgacaccacccgtcttcctgtcaccgacgtttcctcggcatccacaggacatgccacccctcttcctgtcaccagcacttcctcagcatccacaggtgacaccacccctcttcctgtcaccgacacttcctcagtatccacaggtcacgccacctctcttcctgtcaccagccgttcctcagcatccacaggtcacgccaccccccttcctgtcaccgacacttcctcagtatccacaggtcacgccacccctcttcctgtcaccagcacttcctcagtatctacaggtcacgccacccctcttcctgtcaccagcccttcctcagcatccacaggtcacgccacccctgttcctgtcaccagcacttcctcagcatccacaggtgacaccacccctcttcctgtcaccaatgcttcctcattatccacaggtcacgccacccctcttcatgtcaccagcccttcctcagcatccagaggtgacaccagcactcttcctgtcaccgatgcttcctcagcatccaccggtcacgccacccctcttcctctcaccagcctttcctcagtatccacaggtgacaccacgcctcttcctgtcaccgacacttcctctgcatccacaggtcaggccacccctcttcctgtcaccagcctttcctcagtatccacaggtgacaccacgcctcttcctgtcaccatcccttcctcagcatcctcaggtcacaccacctctcttcctgtcaccgacgcttcctcagtgtccacaggtcacggcacccctcttcctgtcaccagcacttcctcagcatccacaggtgacaccacccctcttcctgtcaccgacacttcctcagcatccacaggtcacgccacccctcttcctgtcaccgacacttcctcagcatccacaggtcacgccacccctcttcctgtcaccagcctttcctcagtatccacaggtcacgccacccctcttgctgtcagcagtgctacctcagcttccacagtatcctcggactcccctctgaagatggaaacaccaggaatgacaacaccgtcactgaagacagacggtgggagacgcacagccacatcaccaccccccacaacctcccagaccatcatttccaccattcccagcactgccatgcacacccgctccacagctgcccccatccccatcctgcctgagagaggagtttccctcttcccctatggggcaggcgccggggacctggagttcgtcaggaggaccgtggacttcacctccccactcttcaagccggcgactggcttcccccttggctcctctctccgtgattccctctacttcacagacaatggccagatcatcttcccagagtcagactaccagattttctcctaccccaacccactcccaacaggcttcacaggccgggaccctgtggccctggtggctccgttctgggacgatgctgacttctccactggtcgggggaccacattttatcaggaatacgagacgttctatggtgaacacagcctgctagtccagcaggccgagtcttggattagaaagatgacaaacaacgggggctacaaggccaggtgggccctaaaggtcacgtgggtcaatgcccacgcctatcctgcccagtggaccctcgggagcaacacctaccaagccatcctctccacggacgggagcaggtcctatgccctgtttctctaccagagcggtgggatgcagtgggacgtggcccagcgctcaggcaacccggtgctcatgggcttctctagtggagatggctatttcgaaaacagcccactgatgtcccagccagtgtgggagaggtatcgccctgatagattcctgaattccaactcaggcctccaagggctgcagttctacaggctacaccgggaagaaaggcccaactaccgtctcgagtgcctgcagtggctgaagagccagcctcggtggcccagctggggctggaaccaggtctcctgcccttgttcctggcagcagggacgacgggacttacgattccaacccgtcagcataggtcgctggggcctcggcagtaggcagctgtgcagcttcacctcttggcgaggaggcgtgtgctgcagctacgggccctggggagagtttcgtgaaggctggcacgtgcagcgtccttggcagttggcccaggaactggagccacagagctggtgctgccgctggaatgacaagccctacctctgtgccctgtaccagcagaggcggccccacgtgggctgtgctacatacaggcccccacagcccgcctggatgttcggggacccccacatcaccaccttggatggtgtcagttacaccttcaatgggctgggggacttcctgctggtcggggcccaagacgggaactcctccttcctgcttcagggccgcaccgcccagactggctcagcccaggccaccaacttcatcgcctttgcggctcagtaccgctccagcagcctgggccccgtcacggtccaatggctccttgagcctcacgacgcaatccgtgtcctgctggataaccagactgtgacatttcagcctgaccatgaagacggcggaggccaggagacgttcaacgccaccggagtcctcctgagccgcaacggctctgaggtctcggccagcttcgacggctgggccaccgtctcggtgatcgcgctctccaacatcctccacgcctccgccagcctcccgcccgagtaccagaaccgcacggaggggctcctgggggtctggaataacaatccagaggacgacttcaggatgcccaatggctccaccattcccccagggagccctgaggagatgcttttccactttggaatgacctggcagatcaacgggacaggcctccttggcaagaggaatgaccagctgccttccaacttcacccctgttttctactcacaactgcaaaaaaacagctcctgggctgaacatttgatctccaactgtgacggagatagctcatgcatctatgacaccctggccctgcgcaacgcaagcatcggacttcacacgagggaagtcagtaaaaactacgagcaggcgaacgccaccctcaatcagtacccgccctccatcaatggtggtcgtgtgattgaagcctacaaggggcagaccacgctgattcagtacaccagcaatgctgaggatgccaacttcacgctcagagacagctgcaccgacttggagctctttgagaatgggacgttgctgtggacacccaagtcgctggagccattcactctggagattctagcaagaagtgccaagattggcttggcatctgcactccagcccaggactgtggtctgccattgcaatgcagagagccagtgtttgtacaatcagaccagcagggtgggcaactcctccctggagctctggggagctctttcctgtgtcagaaccagtcctgccctgtgaattactgctacaatcaaggccactgctacatctcccagactctgggctgtcagcccatgtgcacctgccccccagccttcactgacagccgctgcttcctggctgggaacaacttcagtccaactgtcaacctagaacttcccttaagagtcatccagctcttgctcagtgaagaggaaaatgcctccatggcagaagtcaacgcctcggtggcatacagactggggaccctggacatgcgggcctttctccgcaacagccaagtggaacgaatcgattctgcagcaccggcctcgggaagccccatccaacactggatggtcatctcggagttccagtaccgccctcggggcccggtcattgacttcctgaacaaccagctgctggccgcggtggtggaggcgttcttataccacgttccacggaggagtgaggagcccaggaacgacgtggtcttccagcccatctccggggaagacgtgcgcgatgtgacagccctgaacgtgagcacgctgaaggcttacttcagatgcgatggctacaagggctacgacctggtctacagcccccagagcggcttcacctgcgtgtccccgtgcagtaggggctactgtgaccatggaggccagtgccagcacctgcccagtgggccccgctgcagctgtgtgtccttctccatctacacggcctggggcgagcactgtgagcacctgagcatgaaactcgacgcgttcttcggcatcttctttggggccctgggcggcctcttgctgctgggggtcgggacgttcgtggtcctgcgcttctggggttgctccggggccaggttctcctatttcctgaactcagctgaggccttgccttgaaggggcagctgtggcctaggctacctcaagactcacctcatccttaccgcacatttaaggcgccattgcttttgggagactggaaaagggaaggtgactgaaggctgtcaggattcttcaaggagaatgaatactgggaatcaagacaagactataccttatccataggcgcaggtgcacagggggaggccataaagatcaaacatgcatggatgggtcctcacgcagacacacccacagaaggacactagcctgtgcacgcgcgcgtgcacacacacacacacacaagagttcataatgtggtgatggccctaagttaagcaaaatgcttctgcacacaaaactctctggtttacttcaaattaactctatttaaataaagtctctctgactttttgtgtcttcaaaa

SEQ ID NO: 155701 - DNA, 16015 bp, Homo sapiens; identical to SEQ ID NO: 155694
  Payload ID: 10597
  Gene Symbol: MUC4
  Gene Name: mucin 4, cell surface associated
  ENST ID: ENST00000627334
  CDS Start-End: 1-13253

SEQ ID NO: 155702 - DNA, 16043 bp, Homo sapiens
  Payload ID: 10597
  Gene Symbol: MUC4
  Gene Name: mucin 4, cell surface associated
  ENST ID: ENST00000627236
  CDS Start-End: 1-13247
gaaccacagaggacacattaataactggaagtaaaactgctgccccagtcacctcaacaggctcaacaacagcgacactagagggacaatcaactgcagcttcttcaaggacctctaatcaggacatatcagcttcatctcagaaccaccagactaagagcacggagaccaccagcaaagctcaaaccgacaccctcacgcagatgatgacatcaactcttttttcttccccaagtgtacacaatgtgatggagacagctcctccagatgaaatgaccacatcatttccctccagtgtcaccaacacactcatgatgacatcaaagactataacaatgacaacctccacagactccactcttggaaacacagaagagacatcaacagcaggaactgaaagttctaccccagtgacctcagcagtctcaataacagctggacaggaaggacaatcacgaacaacttcctggaggacctctatccaagacacatcagcttcttctcagaaccactggactcggagcacgcagaccaccagggaatctcaaaccagcaccctaacacacagaaccacttcaactccttctttctctccaagtgtacacaatgtgacagggactgtttctcagaagacatctccttcaggtgaaacagctacctcatccctctgtagtgtcacaaacacatccatgatgacatcagagaagataacagtgacaacctccacaggctccactcttggaaacccaggggagacatcatcagtacctgttactggaagtcttatgccagtcacctcagcagccttagtaacatttgatccagaaggacaatcaccagcaactttctcaaggacttctactcaggacacaacagctttttctaagaaccaccagactcagagcgtggagaccaccagagtatctcaaatcaacaccctcaacaccctcacaccggttacaacatcaactgttttatcctcaccaagtggattcaacccaagtggaacagtttctcaggagacattcccttctggtgaaacaaccacctcatccccttccagtgtcagcaatacattcctggtaacatcaaaggtgttcagaatgccaacctccagagactctactcttggaaacacagaggagacatcactatctgtaagtggaaccatttctgcaatcacttccaaagtttcaaccatatggtggtcagacactctgtcaacagcactctcccccagttctctacctccaaaaatatccacagctttccacacccagcagagtgaaggtgcagagaccacaggacggcctcatgagaggagctcattctctccaggtgtgtctcaagaaatatttactctacatgaaacaacaacatggccttcctcattctccagcaaaggccacacaacttggtcacaaacagaactgccctcaacatcaacaggtgctgccactaggcttgtcacaggaaatccatctacagggacagctggcactattccaagggtcccctctaaggtctcagcaataggggaaccaggagagcccaccacatactcctcccacagcacaactctcccaaaaacaacaggggcaggcgcccagacacaatggacacaagaaacggggaccactggagaggctcttctcagcagcccaagctacagtgtgactcagatgataaaaacggccacatccccatcttcttcacctatgctggatagacacacatcccaacaaattacaacggcaccatcaacaaatcattcaacaatacattccacaagcacctctcctcaggaatcaccagctgtttcccaaaggggtcacactcaagccccgcagaccacacaagaatcacaaaccacgaggtccgtctcccccatgactgacaccaagacagtcaccaccccaggttcttccttcacagccagtgggcactcgccctcagaaattgttcctcaggacgcacccaccataagtgcagcaacaacctttgccccagctcccaccggggatggtcacacaacccaggccccgaccacagcactgcaggcagcacccagcagccatgatgccaccctggggccctcaggaggcacgtcactttccaaaacaggtgcccttactctggccaactctgtagtgtcaacaccagggggcccagaaggacaatggacatcagcctctgccagcacctcacctgacacagcagcagccatgacccatacccaccaggctgagagcacagaggcctctggacaaacacagaccagcgaaccggcctcctcagggtcacgaaccacctcagcgggcacagctaccccttcctcatccggggcgagtggcacaacaccttcaggaagcgaaggaatatccacctcaggagagacgacaaggttttcatcaaacccctccagggacagtcacacaacccagtcaacaaccgaattgctgtccgcctcagccagtcatggtgccatcccagtaagcacaggaatggcgtcttcgatcgtccccggcacctttcatcccaccctctctgaggcctccactgcagggagaccgacaggacagtcaagcccaacttctcccagtgcctctcctcaggagacagccgccatttcccggatggcccagactcagaggacaagaaccagcagagggtctgacactatcagcctggcgtcccaggcaaccgacaccttctcaacagtcccacccacacctccatcgatcacatccactgggcttacatctccacaaaccgagacccacactctgtcaccttcagggtctggtaaaaccttcaccacggccctcatcagcaacgccacccctcttcctgtcacctacgcttcctcggcatccacaggtcacaccacccctcttcatgtcaccgatgcttcctcagtatccacaggtcacgccacccctcttcctgtcaccagcccttcctcagtatccacaggtcacaccacccctcttcctgtcaccgacacttcctcagaatccacaggtcacgtcacccctcttcctgtcaccagcttttcctcagcatccacaggtgacagcacccctcttcctgtcactgacacttcctcagcatccacaggtcacgtcacccctcttcctgtcaccagcctttcctcagcatccacaggtgacaccacccctcttcctgtcactgacacttcctcagcatccacaggtcacgccacctctcttcctgtcaccgacacttcctcagtatccacaggtcacaccacccctcttcctgtcaccgacacttcctcagcatccacaggtcacgccacctctcttcctgtcaccgacacttcctcagtatccacaggtcacaccacccctcttcatgtcactgatgcttcctcagcatccacaggtcaggccacccctcttcctgtcaccagcctttcctcagtatccacaggtgacaccacgcctcttcctgtcactagcccttcctcagcatccacaggtcacgccacccctcttcttgtcaccgacacttcctcagcatccacaggacacgccacccctcttcctgtcaccgacgcttcctcagtgtccacagatcacgccacctctcttcctgtaaccatcccttccgcagcatccacaggtcacaccacccctcttcctgtcaccgacacttcctcagcatccacaggtcaggccacctctcttcttgtcaccgacacttcctcagtatccacaggtgacaccacgcctcttcctgtcactagcacttcctcagcatccacaggtcacgtcactcctcttcatgtcaccagcccttcctcagcatccacaggtcacgccacccctcttcctgtcaccagcctttcctcagcatccacaggtgacaccatgcctcttcctgtcactagcccttcctcagcatccacaggtgacaccacccctcttcctgtcaccgacgcttcctcagtatccacaggtcacaccacccctcttcatgtcactgatgcttcctcagcatccacaggtcaggccacccctcttcctgtcaccagcctttcctcagtatccacaggtgacaccacgcctcttcctgtcactagcccttcctcagcatccacaggtcacgccacccctcttcttgtcaccgacacttcctcagcatccacaggacacgccacccctcttcctgtcaccgacgcttcctcagtgtccacagatcacgccacctctcttcctgtaaccatcccttccgcagcatccacaggtcacaccacccctcttcctgtcaccgacacttcctcagcatccacaggtcaggccacctctcttcttgtcaccgacacttcctcagtatccacaggtgacaccacgcctcttcctgtcactagcacttcctcagcatccacaggtcacgtcactcctcttcatgtcaccagcccttcctcagcatccacaggtcacgccacccctcttcctgtcaccagcctttcctcagcatccacaggtgacaccatgcctcttcctgtcactagcccttcctcagcatccacaggtgacaccacccctcttcctgtcaccgacgcttcctcagtatccacaggtcacaccacccctcttcctgtcaccagcccttcctcagcatctacaggtcacaccacccctcttcctgtcaccgacacttcctcagcatccaaaggtgacaccacccctcttcctgtcaccagcccttcctcagcatctacaggtcacaccacccctcttcctgtcaccgacacttcctcagcatccacaggtgacaccacccctcttcctgtcaccaatgcttcctcattatccacaggtcacgccacccctcttcatgtcaccagcccttcctcagcatccacaggtcacgccacccctcttcctgtcaccagcacttcctcagcatccaccggtcacgccacccctcttcctgtcaccggcctttcctcagctaccacagatgacaccacccgtcttcctgtcaccgacgtttcctcggcatccacaggtcaggccacccctcttcctgtcaccagcctttcctcagtatccacaggtgacaccacgcctcttcctgtcactagcccttcctcagcatccacaggtcacgccagccctcttcttgtcactgacgcttcctcagcatccacaggtcaggccacccctcttcctgtcaccgacacttcctcagtatccacagctcacgccaccccacttcctgtcaccggcctttcttcagcttccacagatgacaccacccgtcttcctgtcaccgacgtttcctcggcatccacaggtcaggccatccctcttcctgtcaccagcccttcctcagcatccacaggtgacaccacccctcttcctgtcaccgacgcttcctcagcatccacaggtgacaccacctctcttcctgtcaccatcccttcctcagcatcttcaggtcacaccacctctcttcctgtcaccgacgcttcctcagtgtccacaggtcacgccacctctcttcttgtcaccgacgcttcctcagtatccacaggtgacaccacccctcttcctgtcaccgacactaactcagcatccacaggtgacaccacccctcttcatgtcaccgacgcttcctcagtatccacaggtcacgccacctctcttcctgtcaccagcctttcctcagcatccacaggtgacaccacgcctcttcctgtcactagcccttcctcagcatcctcaggtcacaccacccctcttcctgtcaccgacgcttcctcagtacccacaggtcacgccacctctcttcctgtcaccgacgcttcctcagtgtccacaggtcacgccacccctcttcctgtcaccgacgcttcctcagtgtccacaggtcatgccacccctcttccggtcaccgacacttcctcagtatctacaggacaggccacccctcttcctgtcaccagcctttcctcagcatccactggtgacaccacgccgcttcctgtcaccgatacttcctcagcatccacaggtcaggacacccctcttcctgtcaccagcctttcctcagtatccacaggtgacaccacgcctcttcctgtcactaacccttcctcagcatccacaggtcacgccacccctcttcttgtcaccgacgcttcctcaatatccacaggtcacgccacctctcttcttgtcaccgacgcttcctcagtatccacaggtcacgccaccgctcttcatgacaccgatgcttcctcattatccacaggggacaccacccctcttcctgtcaccagcccttcctcaacatccacaggtgacaccacccctcttcctgtcaccgaaacttcctcagtatccacaggtcacgccacctctcttcctgtcaccgacacttcctcagcatccacaggtcacgccacctctcttcctgtcaccgacacttcctcagcatccacaggtcacgccacccctcttcctgtcaccgacacttcctcagcatccacaggtcaggccacccctcttcctgtcaccagcccttcctcagcatccacaggtcacgccatccctcttcttgtcaccgacacttcctcagcatccacaggacaggccacccctcttcctgtcaccagcctttcctcagcatccacaggtgacaccacccctcttcctgtcaccgacgcttcctcagtgtccacaggtcacgccacctctcttcctgtcaccagcctttcctcagtatccacaggtgacaccactcctcttcctgtcactagcccttcctcagcatccacaggtcacgccacccctcttcatgtcaccgacgcttcctcagcatccacaggtcacgccacccctcttcctgtcaccagcctttcctcagcatccacaggtgacaccacgcctcttcctgtcactagcccttcctcagcatccacaggtcacgccacccctcttcatgtcaccgacgcttcctcagtatccacaggtgacaccacccctcttcctgtcaccagctcttcctcagcatcctcaggtcacaccacccctcttcctgtcaccgacgcttcctcagcatccacaggtgacaccacccctcttcctgtcaccgacacttcctcagcatccacaggtcacgccacccatcttcctgtcaccggcctttcctcagcttccacaggtgacaccacccgtcttcctgtcaccaacgtttcctcggcatccacaggtcatgccacccctcttcctgtcaccagcacttcctcagcatccacaggtgacaccacccctcttcctggcaccgacacttcctcagtatccacaggtcacaccacccctcttcttgtcaccgacgcttcgtcagtatccacaggtgacaccacccgtcttcctgtcaccagcccttcctcagcatctacaggtcacaccacccctctacctgtcaccgacactccctcagcatccacaggtgacaccacccctcttcctgtcaccaatgcttcctcattatccacacgtcacgccacctctcttcatgtcaccagcccttcctcagcatccacaggtcacgccacctctcttcctgtcaccgacacttccgcagcatccacaggtcacgccacccctcttcctgtcaccagcacttcctcagcatccacaggtgacaccacccctcttcctgtcaccgacacttactcagcatccacaggtcaggccacccctcttcctgtcaccagcctttcctcagtatccacaggtgacaccacgcctcttcctgtcactagcccttcctcagcatccacaggtcacgccactcctcttcttgtcaccgacgcttcctcagcatccacaggtcaggccacccctcttcctgtcaccagcctttcctcagtatccacaggtgacaccacgcctcttcctgtcactagcccttcctcagcatccaccggtcatgccacctctcttcctgtcaccgacacttcctcagcatccacaggtgacaccacctctcttcctgtcaccgacacttcctcagcatacacaggtgacaccacctctcttcctgtcaccgacacttcctcatcatccacaggtgacaccacccctcttcttgtcaccgagacttcctcagtatccacaggtgacaccacccctcttcctgtcaccgacacttcctcagcatccacaggtcacgccacccctcttcctgtcaccaacacttcctcagtatccacaggtcacgccacccctcttcatgtcaccagcccttcctcagcatccacaggtcacaccacccctcttcctgtcaccgacgcttcgtcagtgtccacaggtcacgccacctctcttcctgtcaccgacgcttcctcagtgttcacaggtcatgccacctctcttcctgtcaccatcccttcctcagcatcctcaggtcacaccacccctcttcctgtcaccgacgcttcctcagtgtccacaggtcacgccacctctcttcctgtcaccgacgcttcctcagtgtccacaggtcatgccacccctcttcctgtcaccgacgcttcctcagtgtccacaggtcacgctacccctcttcctctcaccagcctttcctcagtatccacaggtgacaccacgcctcttcctgtcaccgacacttcctcagcatccacaggtcaggccacccctcttcctgtcaccagcctttcctcagtatccacaggtgacaccacccctcttcctgtcaccgacacttcctcagcatccacaggtcacgccacctctcttcctgtcaccgacacttcctcagcatccacaggtcacgccacccctcttcctgacaccgacacttcctcagcatccacaggtcacgccacccttcttcctgtcaccgacacttcctcagcatccataggtcacgccacctctcttcctgtcaccgacacttcctcaatatccacaggtcacgccacccctcttcatgtcaccagcccttcctcagcatccaccggtcacgccaccccgcttcctgtcaccgacacttcctcagcatccacaggtcacgccaaccctcttcatgtcaccagcccttcctcagcatccaccggtcacgccaccccgcttcctgtcaccgacacttcctcagcatccacaggtcacgccacccctcttcctgtcaccagcctttcctcagtatccacaggtgacaccacgcctcttcctgtcactagcccttcctcagcatccacaggtcacaccacccctcttcctgtcaccgacacttcctcagcatccacaggtcaggccaccgctcttcctgtcaccagcacttcctcagcatccacaggtgacaccacccctcttcctgtcaccgacacttcctcagcatccacaggtcaggccacccctcttcctgtcaccagcctttcctcagtatccacaggtgacaccacgcctcttcctgtcactagcccttcctcagcatccacaggtcacgccactcctcttcttgtcaccgacgcttcctcagcatccacaggtcaggccacccctcttcctgtcaccagcctttcctcagtatccacaggtgacaccacgcctcttcctgtcactagcccttcctcagcatccaccggtcatgccacctctcttcctgtcaccgacacttcctcagcatccacaggtgacaccacctctcttcctgtcaccgacacttcctcagcatacacaggtgacaccacctctcttcctgtcaccgacacttcctcatcatccacaggtgacaccacccctcttcttgtcaccgagacttcctcagtatccacaggtcacgccactcctcttcttgtcaccgacgcttcctcagcatccacaggtcacgccacccctcttcatgtcaccagcccttcctcagcatccacaggtgacaccacccctgtgcctgtcaccgacacttcctcagtatccacaggtcacgccacccctcttcctgtcaccggcctttcctcagcttccacaggtgacaccacccgtcttcctgtcaccgacatttcctcggcatccacaggtcaggccacccctcttcctgtcaccaacacttcctcagtatccacaggtgacaccatgcctcttcctgtcactagcccttcctcagcatccacaggtcacgccacccctcttcctgtcaccagcacttcctcagcatccaccggtcacgccacccctgttcctgtcaccagcacttcctcagcatctacaggtcacaccacccctcttcctgtcaccgacacttcctcagcatccacaggtgacaccacccctcttcctgtcaccagcccttcctcagcatctacaggtcacaccacccctcttcatgtcaccatcccttcctcagcatccacaggtgacaccagcactcttcctgtcaccggcgcttcctcagcatccaccggtcacgccacccctcttcctgtcaccgacacttcctcagtatccaccggtcacgccacgcctcttcctgtcaccagcctttcctcagtatccacaggtgacaccacccctcttcctgtcaccgacgcttcctcggcatccacaggtcaggccacccctcttcctgtcaccagcctttcctcagtatccacaggtgacaccacccctcttcttgtcaccgacgcttcctcagtatccacaggtcacgccacccctcttcctgtcaccgacacttcctcagcatccacaggtgacaccacccgtcttcctgtcacggacacttcctcagcatccacaggtcaggccacccctcttcctgtcaccagcctttcctcagtatccacaggtgacaccacccctcttcttgtcaccgacgcttcctcagtatccacaggtcacgccacccctcttcctgtcaccgacacttcctcagcatccacaggtgacaccacccgtcttcctgtcacggacacttcctcagcatccacaggtcaggccacccctcttcctgtcaccatcccttcctcatcatcctcaggtcacaccacccctcttcctgtcaccagcacttcctcagtatctacaggtcacgtcacccctcttcatgtcaccagcccttcctcagcatccacaggtcacgtcacccctcttcctgtcaccagcacttcctcagcatccacaggtcacgccacccctcttcttgtcaccgacgcttcctcagtgtccacaggtcacgccacgcctcttcctgtcaccgacgcttcctcagcatccacaggtgacaccacccctcttcctgtcaccgacacttcctcagcatccacaggtcaggccacccctcttcctgtcaccagcctttcctcagtatccacaggtgacaccacccctcttcctgtcaccgacgcttcctcagcatccacaggtcacgccacccctcttcctgtcaccatcccttcctcagtatccacaggtgacaccatgcctcttcctgtcactagcccttcctcagcatccacaggtcacgccacccctcttcctgttaccggcctttcctcagcttccacaggtgacaccacccctcttcctgtcaccgacacttcctcagcatccacacgtcacgccacccctcttcctgtcaccgacacttcctcagcttccacagatgacaccacccgtcttcctgtcaccgacgtttcctcggcatccacaggacatgccacccctcttcctgtcaccagcacttcctcagcatccacaggtgacaccacccctcttcctgtcaccgacacttcctcagtatccacaggtcacgccacctctcttcctgtcaccagccgttcctcagcatccacaggtcacgccaccccccttcctgtcaccgacacttcctcagtatccacaggtcacgccacccctcttcctgtcaccagcacttcctcagtatctacaggtcacgccacccctcttcctgtcaccagcccttcctcagcatccacaggtcacgccacccctgttcctgtcaccagcacttcctcagcatccacaggtgacaccacccctcttcctgtcaccaatgcttcctcattatccacaggtcacgccacccctcttcatgtcaccagcccttcctcagcatccagaggtgacaccagcactcttcctgtcaccgatgcttcctcagcatccaccggtcacgccacccctcttcctctcaccagcctttcctcagtatccacaggtgacaccacgcctcttcctgtcaccgacacttcctctgcatccacaggtcaggccacccctcttcctgtcaccagcctttcctcagtatccacaggtgacaccacgcctcttcctgtcaccatcccttcctcagcatcctcaggtcacaccacctctcttcctgtcaccgacgcttcctcagtgtccacaggtcacggcacccctcttcctgtcaccagcacttcctcagcatccacaggtgacaccacccctcttcctgtcaccgacacttcctcagcatccacaggtcacgccacccctcttcctgtcaccgacacttcctcagcatccacaggtcacgccacccctcttcctgtcaccagcctttcctcagtatccacaggtcacgccacccctcttgctgtcagcagtgctacctcagcttccacagtatcctcggactcccctctgaagatggaaacaccaggaatgacaacaccgtcactgaagacagacggtgggagacgcacagccacatcaccaccccccacaacctcccagaccatcatttccaccattcccagcactgccatgcacacccgctccacagctgcccccatccccatcctgcctgagagaggagtttccctcttcccctatggggcaggcgccggggacctggagttcgtcaggaggaccgtggacttcacctccccactcttcaagccggcgactggcttcccccttggctcctctctccgtgattccctctacgcttcacaggccgggaccctgtggccctggtggctccgttctgggacgatgctgacttctccactggtcgggggaccacattttatcagagcaacacctaccaagccatcctctccacggacgggagcaggtcctatgccctgtttctctaccagagcggtgggatgcagtgggacgtggcccagcgctcaggcaacccggtgctcatgggcttctctagtggagatggctatttcgaaaacagcccactgatgtcccagccagtgtgggagaggtatcgccctgatagattcctgaattccaactcaggcctccaagggctgcagttctacaggctacaccgggaagaaaggcccaactaccgtctcgagtgcctgcagtggctgaagagccagcctcggtggcccagctggggctggaaccaggtctcctgcccttgttcctggcagcagggacgacgggacttacgattccaacccgtcagcataggtcgctggggcctcggcagtaggcagctgtgcagcttcacctcttggcgaggaggcgtgtgctgcagctacgggccctggggagagtttcgtgaaggctggcacgtgcagcgtccttggcagttggcccaggaactggagccacagagctggtgctgccgctggaatgacaagccctacctctgtgccctgtaccagcagaggcggccccacgtgggctgtgctacatacaggcccccacagcccgcctggatgttcggggacccccacatcaccaccttggatggtgtcagttacaccttcaatgggctgggggacttcctgctggtcggggcccaagacgggaactcctccttcctgcttcagggccgcaccgcccagactggctcagcccaggccaccaacttcatcgcctttgcggctcagtaccgctccagcagcctgggccccgtcacggtccaatggctccttgagcctcacgacgcaatccgtgtcctgctggataaccagactgtgacatttcagcctgaccatgaagacggcggaggccaggagacgttcaacgccaccggagtcctcctgagccgcaacggctctgaggtctcggccagcttcgacggctgggccaccgtctcggtgatcgcgctctccaacatcctccacgcctccgccagcctcccgcccgagtaccagaaccgcacggaggggctcctgggggtctggaataacaatccagaggacgacttcaggatgcccaatggctccaccattcccccagggagccctgaggagatgcttttccactttggaatgacctggcagatcaacgggacaggcctccttggcaagaggaatgaccagctgccttccaacttcacccctgttttctactcacaactgcaaaaaaacagctcctgggctgaacatttgatctccaactgtgacggagatagctcatgcatctatgacaccctggccctgcgcaacgcaagcatcggacttcacacgagggaagtcagtaaaaactacgagcaggcgaacgccaccctcaatcagtacccgccctccatcaatggtggtcgtgtgattgaagcctacaaggggcagaccacgctgattcagtacaccagcaatgctgaggatgccaacttcacgctcagagacagctgcaccgacttggagctctttgagaatgggacgttgctgtggacacccaagtcgctggagccattcactctggagattctagcaagaagtgccaagattggcttggcatctgcactccagcccaggactgtggtctgccattgcaatgcagagagccagtgtttgtacaatcagaccagcagggtgggcaactcctccctggaggtggctggctgcaagtgtgacgggggcaccttcggccgctactgcgagggctccgaggatgcctgtgaggagccgtgcttcccgagtgtccactgcgttcctgggaagggctgcgaggcctgccctccaaacctgactggggatgggcggcactgtgcggctctggggagctctttcctgtgtcagaaccagtcctgccctgtgaattactgctacaatcaaggccactgctacatctcccagactctgggctgtcagcccatgtgcacctgccccccagccttcactgacagccgctgcttcctggctgggaacaacttcagtccaactgtcaacctagaacttcccttaagagtcatccagctcttgctcagtgaagaggaaaatgcctccatggcagaagtcaacgcctcggtggcatacagactggggaccctggacatgcgggcctttctccgcaacagccaagtggaacgaatcgattctgcagcaccggcctcgggaagccccatccaacactggatggtcatctcggagttccagtaccgccctcggggcccggtcattgacttcctgaacaaccagctgctggccgcggtggtggaggcgttcttataccacgttccacggaggagtgaggagcccaggaacgacgtggtcttccagcccatctccggggaagacgtgcgcgatgtgacagccctgaacgtgagcacgctgaaggcttacttcagatgcgatggctacaagggctacgacctggtctacagcccccagagcggcttcacctgcgtgtccccgtgcagtaggggctactgtgaccatggaggccagtgccaacacctgcccagtgggccccgctgcagctgtgtgtccttctccatctacacggcctggggcgagcactgtgagcacctgagcatgaaactcgacgcgttcttcggcatcttctttggggccctgggcggcctcttgctgctgggggtcgggacgttcgtggtcctgcgcttctggggttgctccggggccaggttctcctatttcctgaactcagctgaggccttgccttgaaggggcagctgtggcctaggctacctcaagactcacctcatccttaccgcacatttaaggcgccattgcttttgggagactggaaaagggaaggtgactgaaggctgtcaggattctt

SEQ ID NO: 155703 - DNA, 3804 bp, Homo sapiens; identical to SEQ ID NO: 155690
  Payload ID: 10597
  Gene Symbol: MUC4
  Gene Name: mucin 4, cell surface associated
  ENST ID: ENST00000627153
  CDS Start-End: 1-524

SEQ ID NO: 155704 - DNA, 16091 bp, Homo sapiens
  Payload ID: 10597
  Gene Symbol: MUC4
  Gene Name: mucin 4, cell surface associated
  ENST ID: ENST00000630081
  CDS Start-End: 1-13295
gaaccacagaggacacattaataactggaagtaaaactgctgccccagtcacctcaacaggctcaacaacagcgacactagagggacaatcaactgcagcttcttcaaggacctctaatcaggacatatcagcttcatctcagaaccaccagactaagagcacggagaccaccagcaaagctcaaaccgacaccctcacgcagatgatgacatcaactcttttttcttccccaagtgtacacaatgtgatggagacagctcctccagatgaaatgaccacatcatttccctccagtgtcaccaacacactcatgatgacatcaaagactataacaatgacaacctccacagactccactcttggaaacacagaagagacatcaacagcaggaactgaaagttctaccccagtgacctcagcagtctcaataacagctggacaggaaggacaatcacgaacaacttcctggaggacctctatccaagacacatcagcttcttctcagaaccactggactcggagcacgcagaccaccagggaatctcaaaccagcaccctaacacacagaaccacttcaactccttctttctctccaagtgtacacaatgtgacagggactgtttctcagaagacatctccttcaggtgaaacagctacctcatccctctgtagtgtcacaaacacatccatgatgacatcagagaagataacagtgacaacctccacaggctccactcttggaaacccaggggagacatcatcagtacctgttactggaagtcttatgccagtcacctcagcagccttagtaacatttgatccagaaggacaatcaccagcaactttctcaaggacttctactcaggacacaacagctttttctaagaaccaccagactcagagcgtggagaccaccagagtatctcaaatcaacaccctcaacaccctcacaccggttacaacatcaactgttttatcctcaccaagtggattcaacccaagtggaacagtttctcaggagacattcccttctggtgaaacaaccacctcatccccttccagtgtcagcaatacattcctggtaacatcaaaggtgttcagaatgccaacctccagagactctactcttggaaacacagaggagacatcactatctgtaagtggaaccatttctgcaatcacttccaaagtttcaaccatatggtggtcagacactctgtcaacagcactctcccccagttctctacctccaaaaatatccacagctttccacacccagcagagtgaaggtgcagagaccacaggacggcctcatgagaggagctcattctctccaggtgtgtctcaagaaatatttactctacatgaaacaacaacatggccttcctcattctccagcaaaggccacacaacttggtcacaaacagaactgccctcaacatcaacaggtgctgccactaggcttgtcacaggaaatccatctacagggacagctggcactattccaagggtcccctctaaggtctcagcaataggggaaccaggagagcccaccacatactcctcccacagcacaactctcccaaaaacaacaggggcaggcgcccagacacaatggacacaagaaacggggaccactggagaggctcttctcagcagcccaagctacagtgtgactcagatgataaaaacggccacatccccatcttcttcacctatgctggatagacacacatcccaacaaattacaacggcaccatcaacaaatcattcaacaatacattccacaagcacctctcctcaggaatcaccagctgtttcccaaaggggtcacactcaagccccgcagaccacacaagaatcacaaaccacgaggtccgtctcccccatgactgacaccaagacagtcaccaccccaggttcttccttcacagccagtgggcactcgccctcagaaattgttcctcaggacgcacccaccataagtgcagcaacaacctttgccccagctcccaccggggatggtcacacaacccaggccccgaccacagcactgcaggcagcacccagcagccatgatgccaccctggggccctcaggaggcacgtcactttccaaaacaggtgcccttactctggccaactctgtagtgtcaacaccagggggcccagaaggacaatggacatcagcctctgccagcacctcacctgacacagcagcagccatgacccatacccaccaggctgagagcacagaggcctctggacaaacacagaccagcgaaccggcctcctcagggtcacgaaccacctcagcgggcacagctaccccttcctcatccggggcgagtggcacaacaccttcaggaagcgaaggaatatccacctcaggagagacgacaaggttttcatcaaacccctccagggacagtcacacaacccagtcaacaaccgaattgctgtccgcctcagccagtcatggtgccatcccagtaagcacaggaatggcgtcttcgatcgtccccggcacctttcatcccaccctctctgaggcctccactgcagggagaccgacaggacagtcaagcccaacttctcccagtgcctctcctcaggagacagccgccatttcccggatggcccagactcagaggacaagaaccagcagagggtctgacactatcagcctggcgtcccaggcaaccgacaccttctcaacagtcccacccacacctccatcgatcacatccactgggcttacatctccacaaaccgagacccacactctgtcaccttcagggtctggtaaaaccttcaccacggccctcatcagcaacgccacccctcttcctgtcacctacgcttcctcggcatccacaggtcacaccacccctcttcatgtcaccgatgcttcctcagtatccacaggtcacgccacccctcttcctgtcaccagcccttcctcagtatccacaggtcacaccacccctcttcctgtcaccgacacttcctcagaatccacaggtcacgtcacccctcttcctgtcaccagcttttcctcagcatccacaggtgacagcacccctcttcctgtcactgacacttcctcagcatccacaggtcacgtcacccctcttcctgtcaccagcctttcctcagcatccacaggtgacaccacccctcttcctgtcactgacacttcctcagcatccacaggtcacgccacctctcttcctgtcaccgacacttcctcagtatccacaggtcacaccacccctcttcctgtcaccgacacttcctcagcatccacaggtcacgccacctctcttcctgtcaccgacacttcctcagtatccacaggtcacaccacccctcttcatgtcactgatgcttcctcagcatccacaggtcaggccacccctcttcctgtcaccagcctttcctcagtatccacaggtgacaccacgcctcttcctgtcactagcccttcctcagcatccacaggtcacgccacccctcttcttgtcaccgacacttcctcagcatccacaggacacgccacccctcttcctgtcaccgacgcttcctcagtgtccacagatcacgccacctctcttcctgtaaccatcccttccgcagcatccacaggtcacaccacccctcttcctgtcaccgacacttcctcagcatccacaggtcaggccacctctcttcttgtcaccgacacttcctcagtatccacaggtgacaccacgcctcttcctgtcactagcacttcctcagcatccacaggtcacgtcactcctcttcatgtcaccagcccttcctcagcatccacaggtcacgccacccctcttcctgtcaccagcctttcctcagcatccacaggtgacaccatgcctcttcctgtcactagcccttcctcagcatccacaggtgacaccacccctcttcctgtcaccgacgcttcctcagtatccacaggtcacaccacccctcttcatgtcactgatgcttcctcagcatccacaggtcaggccacccctcttcctgtcaccagcctttcctcagtatccacaggtgacaccacgcctcttcctgtcactagcccttcctcagcatccacaggtcacgccacccctcttcttgtcaccgacacttcctcagcatccacaggacacgccacccctcttcctgtcaccgacgcttcctcagtgtccacagatcacgccacctctcttcctgtaaccatcccttccgcagcatccacaggtcacaccacccctcttcctgtcaccgacacttcctcagcatccacaggtcaggccacctctcttcttgtcaccgacacttcctcagtatccacaggtgacaccacgcctcttcctgtcactagcacttcctcagcatccacaggtcacgtcactcctcttcatgtcaccagcccttcctcagcatccacaggtcacgccacccctcttcctgtcaccagcctttcctcagcatccacaggtgacaccatgcctcttcctgtcactagcccttcctcagcatccacaggtgacaccacccctcttcctgtcaccgacgcttcctcagtatccacaggtcacaccacccctcttcctgtcaccagcccttcctcagcatctacaggtcacaccacccctcttcctgtcaccgacacttcctcagcatccaaaggtgacaccacccctcttcctgtcaccagcccttcctcagcatctacaggtcacaccacccctcttcctgtcaccgacacttcctcagcatccacaggtgacaccacccctcttcctgtcaccaatgcttcctcattatccacaggtcacgccacccctcttcatgtcaccagcccttcctcagcatccacaggtcacgccacccctcttcctgtcaccagcacttcctcagcatccaccggtcacgccacccctcttcctgtcaccggcctttcctcagctaccacagatgacaccacccgtcttcctgtcaccgacgtttcctcggcatccacaggtcaggccacccctcttcctgtcaccagcctttcctcagtatccacaggtgacaccacgcctcttcctgtcactagcccttcctcagcatccacaggtcacgccagccctcttcttgtcactgacgcttcctcagcatccacaggtcaggccacccctcttcctgtcaccgacacttcctcagtatccacagctcacgccaccccacttcctgtcaccggcctttcttcagcttccacagatgacaccacccgtcttcctgtcaccgacgtttcctcggcatccacaggtcaggccatccctcttcctgtcaccagcccttcctcagcatccacaggtgacaccacccctcttcctgtcaccgacgcttcctcagcatccacaggtgacaccacctctcttcctgtcaccatcccttcctcagcatcttcaggtcacaccacctctcttcctgtcaccgacgcttcctcagtgtccacaggtcacgccacctctcttcttgtcaccgacgcttcctcagtatccacaggtgacaccacccctcttcctgtcaccgacactaactcagcatccacaggtgacaccacccctcttcatgtcaccgacgcttcctcagtatccacaggtcacgccacctctcttcctgtcaccagcctttcctcagcatccacaggtgacaccacgcctcttcctgtcactagcccttcctcagcatcctcaggtcacaccacccctcttcctgtcaccgacgcttcctcagtacccacaggtcacgccacctctcttcctgtcaccgacgcttcctcagtgtccacaggtcacgccacccctcttcctgtcaccgacgcttcctcagtgtccacaggtcatgccacccctcttccggtcaccgacacttcctcagtatctacaggacaggccacccctcttcctgtcaccagcctttcctcagcatccactggtgacaccacgccgcttcctgtcaccgatacttcctcagcatccacaggtcaggacacccctcttcctgtcaccagcctttcctcagtatccacaggtgacaccacgcctcttcctgtcactaacccttcctcagcatccacaggtcacgccacccctcttcttgtcaccgacgcttcctcaatatccacaggtcacgccacctctcttcttgtcaccgacgcttcctcagtatccacaggtcacgccaccgctcttcatgacaccgatgcttcctcattatccacaggggacaccacccctcttcctgtcaccagcccttcctcaacatccacaggtgacaccacccctcttcctgtcaccgaaacttcctcagtatccacaggtcacgccacctctcttcctgtcaccgacacttcctcagcatccacaggtcacgccacctctcttcctgtcaccgacacttcctcagcatccacaggtcacgccacccctcttcctgtcaccgacacttcctcagcatccacaggtcaggccacccctcttcctgtcaccagcccttcctcagcatccacaggtcacgccatccctcttcttgtcaccgacacttcctcagcatccacaggacaggccacccctcttcctgtcaccagcctttcctcagcatccacaggtgacaccacccctcttcctgtcaccgacgcttcctcagtgtccacaggtcacgccacctctcttcctgtcaccagcctttcctcagtatccacaggtgacaccactcctcttcctgtcactagcccttcctcagcatccacaggtcacgccacccctcttcatgtcaccgacgcttcctcagcatccacaggtcacgccacccctcttcctgtcaccagcctttcctcagcatccacaggtgacaccacgcctcttcctgtcactagcccttcctcagcatccacaggtcacgccacccctcttcatgtcaccgacgcttcctcagtatccacaggtgacaccacccctcttcctgtcaccagctcttcctcagcatcctcaggtcacaccacccctcttcctgtcaccgacgcttcctcagcatccacaggtgacaccacccctcttcctgtcaccgacacttcctcagcatccacaggtcacgccacccatcttcctgtcaccggcctttcctcagcttccacaggtgacaccacccgtcttcctgtcaccaacgtttcctcggcatccacaggtcatgccacccctcttcctgtcaccagcacttcctcagcatccacaggtgacaccacccctcttcctggcaccgacacttcctcagtatccacaggtcacaccacccctcttcttgtcaccgacgcttcgtcagtatccacaggtgacaccacccgtcttcctgtcaccagcccttcctcagcatctacaggtcacaccacccctctacctgtcaccgacactccctcagcatccacaggtgacaccacccctcttcctgtcaccaatgcttcctcattatccacacgtcacgccacctctcttcatgtcaccagcccttcctcagcatccacaggtcacgccacctctcttcctgtcaccgacacttccgcagcatccacaggtcacgccacccctcttcctgtcaccagcacttcctcagcatccacaggtgacaccacccctcttcctgtcaccgacacttactcagcatccacaggtcaggccacccctcttcctgtcaccagcctttcctcagtatccacaggtgacaccacgcctcttcctgtcactagcccttcctcagcatccacaggtcacgccactcctcttcttgtcaccgacgcttcctcagcatccacaggtcaggccacccctcttcctgtcaccagcctttcctcagtatccacaggtgacaccacgcctcttcctgtcactagcccttcctcagcatccaccggtcatgccacctctcttcctgtcaccgacacttcctcagcatccacaggtgacaccacctctcttcctgtcaccgacacttcctcagcatacacaggtgacaccacctctcttcctgtcaccgacacttcctcatcatccacaggtgacaccacccctcttcttgtcaccgagacttcctcagtatccacaggtgacaccacccctcttcctgtcaccgacacttcctcagcatccacaggtcacgccacccctcttcctgtcaccaacacttcctcagtatccacaggtcacgccacccctcttcatgtcaccagcccttcctcagcatccacaggtcacaccacccctcttcctgtcaccgacgcttcgtcagtgtccacaggtcacgccacctctcttcctgtcaccgacgcttcctcagtgttcacaggtcatgccacctctcttcctgtcaccatcccttcctcagcatcctcaggtcacaccacccctcttcctgtcaccgacgcttcctcagtgtccacaggtcacgccacctctcttcctgtcaccgacgcttcctcagtgtccacaggtcatgccacccctcttcctgtcaccgacgcttcctcagtgtccacaggtcacgctacccctcttcctctcaccagcctttcctcagtatccacaggtgacaccacgcctcttcctgtcaccgacacttcctcagcatccacaggtcaggccacccctcttcctgtcaccagcctttcctcagtatccacaggtgacaccacccctcttcctgtcaccgacacttcctcagcatccacaggtcacgccacctctcttcctgtcaccgacacttcctcagcatccacaggtcacgccacccctcttcctgacaccgacacttcctcagcatccacaggtcacgccacccttcttcctgtcaccgacacttcctcagcatccataggtcacgccacctctcttcctgtcaccgacacttcctcaatatccacaggtcacgccacccctcttcatgtcaccagcccttcctcagcatccaccggtcacgccaccccgcttcctgtcaccgacacttcctcagcatccacaggtcacgccaaccctcttcatgtcaccagcccttcctcagcatccaccggtcacgccaccccgcttcctgtcaccgacacttcctcagcatccacaggtcacgccacccctcttcctgtcaccagcctttcctcagtatccacaggtgacaccacgcctcttcctgtcactagcccttcctcagcatccacaggtcacaccacccctcttcctgtcaccgacacttcctcagcatccacaggtcaggccaccgctcttcctgtcaccagcacttcctcagcatccacaggtgacaccacccctcttcctgtcaccgacacttcctcagcatccacaggtcaggccacccctcttcctgtcaccagcctttcctcagtatccacaggtgacaccacgcctcttcctgtcactagcccttcctcagcatccacaggtcacgccactcctcttcttgtcaccgacgcttcctcagcatccacaggtcaggccacccctcttcctgtcaccagcctttcctcagtatccacaggtgacaccacgcctcttcctgtcactagcccttcctcagcatccaccggtcatgccacctctcttcctgtcaccgacacttcctcagcatccacaggtgacaccacctctcttcctgtcaccgacacttcctcagcatacacaggtgacaccacctctcttcctgtcaccgacacttcctcatcatccacaggtgacaccacccctcttcttgtcaccgagacttcctcagtatccacaggtcacgccactcctcttcttgtcaccgacgcttcctcagcatccacaggtcacgccacccctcttcatgtcaccagcccttcctcagcatccacaggtgacaccacccctgtgcctgtcaccgacacttcctcagtatccacaggtcacgccacccctcttcctgtcaccggcctttcctcagcttccacaggtgacaccacccgtcttcctgtcaccgacatttcctcggcatccacaggtcaggccacccctcttcctgtcaccaacacttcctcagtatccacaggtgacaccatgcctcttcctgtcactagcccttcctcagcatccacaggtcacgccacccctcttcctgtcaccagcacttcctcagcatccaccggtcacgccacccctgttcctgtcaccagcacttcctcagcatctacaggtcacaccacccctcttcctgtcaccgacacttcctcagcatccacaggtgacaccacccctcttcctgtcaccagcccttcctcagcatctacaggtcacaccacccctcttcatgtcaccatcccttcctcagcatccacaggtgacaccagcactcttcctgtcaccggcgcttcctcagcatccaccggtcacgccacccctcttcctgtcaccgacacttcctcagtatccaccggtcacgccacgcctcttcctgtcaccagcctttcctcagtatccacaggtgacaccacccctcttcctgtcaccgacgcttcctcggcatccacaggtcaggccacccctcttcctgtcaccagcctttcctcagtatccacaggtgacaccacccctcttcttgtcaccgacgcttcctcagtatccacaggtcacgccacccctcttcctgtcaccgacacttcctcagcatccacaggtgacaccacccgtcttcctgtcacggacacttcctcagcatccacaggtcaggccacccctcttcctgtcaccagcctttcctcagtatccacaggtgacaccacccctcttcttgtcaccgacgcttcctcagtatccacaggtcacgccacccctcttcctgtcaccgacacttcctcagcatccacaggtgacaccacccgtcttcctgtcacggacacttcctcagcatccacaggtcaggccacccctcttcctgtcaccatcccttcctcatcatcctcaggtcacaccacccctcttcctgtcaccagcacttcctcagtatctacaggtcacgtcacccctcttcatgtcaccagcccttcctcagcatccacaggtcacgtcacccctcttcctgtcaccagcacttcctcagcatccacaggtcacgccacccctcttcttgtcaccgacgcttcctcagtgtccacaggtcacgccacgcctcttcctgtcaccgacgcttcctcagcatccacaggtgacaccacccctcttcctgtcaccgacacttcctcagcatccacaggtcaggccacccctcttcctgtcaccagcctttcctcagtatccacaggtgacaccacccctcttcctgtcaccgacgcttcctcagcatccacaggtcacgccacccctcttcctgtcaccatcccttcctcagtatccacaggtgacaccatgcctcttcctgtcactagcccttcctcagcatccacaggtcacgccacccctcttcctgttaccggcctttcctcagcttccacaggtgacaccacccctcttcctgtcaccgacacttcctcagcatccacacgtcacgccacccctcttcctgtcaccgacacttcctcagcttccacagatgacaccacccgtcttcctgtcaccgacgtttcctcggcatccacaggacatgccacccctcttcctgtcaccagcacttcctcagcatccacaggtgacaccacccctcttcctgtcaccgacacttcctcagtatccacaggtcacgccacctctcttcctgtcaccagccgttcctcagcatccacaggtcacgccaccccccttcctgtcaccgacacttcctcagtatccacaggtcacgccacccctcttcctgtcaccagcacttcctcagtatctacaggtcacgccacccctcttcctgtcaccagcccttcctcagcatccacaggtcacgccacccctgttcctgtcaccagcacttcctcagcatccacaggtgacaccacccctcttcctgtcaccaatgcttcctcattatccacaggtcacgccacccctcttcatgtcaccagcccttcctcagcatccagaggtgacaccagcactcttcctgtcaccgatgcttcctcagcatccaccggtcacgccacccctcttcctctcaccagcctttcctcagtatccacaggtgacaccacgcctcttcctgtcaccgacacttcctctgcatccacaggtcaggccacccctcttcctgtcaccagcctttcctcagtatccacaggtgacaccacgcctcttcctgtcaccatcccttcctcagcatcctcaggtcacaccacctctcttcctgtcaccgacgcttcctcagtgtccacaggtcacggcacccctcttcctgtcaccagcacttcctcagcatccacaggtgacaccacccctcttcctgtcaccgacacttcctcagcatccacaggtcacgccacccctcttcctgtcaccgacacttcctcagcatccacaggtcacgccacccctcttcctgtcaccagcctttcctcagtatccacaggtcacgccacccctcttgctgtcagcagtgctacctcagcttccacagtatcctcggactcccctctgaagatggaaacaccaggaatgacaacaccgtcactgaagacagacggtgggagacgcacagccacatcaccaccccccacaacctcccagaccatcatttccaccattcccagcactgccatgcacacccgctccacagctgcccccatccccatcctgcctgagagaggagtttccctcttcccctatggggcaggcgccggggacctggagttcgtcaggaggaccgtggacttcacctccccactcttcaagccggcgactggcttcccccttggctcctctctccgtgattccctctacttcacagacaatggccagatcatcttcccagagtcagactaccagattttctcctaccccaacccactcccaacaggcttcacaggccgggaccctgtggccctggtggctccgttctgggacgatgctgacttctccactggtcgggggaccacattttatcagagcaacacctaccaagccatcctctccacggacgggagcaggtcctatgccctgtttctctaccagagcggtgggatgcagtgggacgtggcccagcgctcagtggagatggctatttcgaaaacagcccactgatgtcccagccagtgtgggagaggtatcgccctgatagattcctgaattccaactcaggcctccaagggctgcagttctacaggctacaccgggaagaaaggcccaactaccgtctcgagtgcctgcagtggctgaagagccagcctcggtggcccagctggggctggaaccaggtctcctgcccttgttcctggcagcagggacgacgggacttacgattccaacccgtcagcataggtcgctggggcctcggcagtaggcagctgtgcagcttcacctcttggcgaggaggcgtgtgctgcagctacgggccctggggagagtttcgtgaaggctggcacgtgcagcgtccttggcagttggcccaggaactggagccacagagctggtgctgccgctggaatgacaagccctacctctgtgccctgtaccagcagaggcggccccacgtgggctgtgctacatacaggcccccacagcccgcctggatgttcggggacccccacatcaccaccttggatggtgtcagttacaccttcaatgggctgggggacttcctgctggtcggggcccaagacgggaactcctccttcctgcttcagggccgcaccgcccagactggctcagcccaggccaccaacttcatcgcctttgcggctcagtaccgctccagcagcctgggccccgtcacggtccaatggctccttgagcctcacgacgcaatccgtgtcctgctggataaccagactgtgacatttcagcctgaccatgaagacggcggaggccaggagacgttcaacgccaccggagtcctcctgagccgcaacggctctgaggtctcggccagcttcgacggctgggccaccgtctcggtgatcgcgctctccaacatcctccacgcctccgccagcctcccgcccgagtaccagaaccgcacggaggggctcctgggggtctggaataacaatccagaggacgacttcaggatgcccaatggctccaccattcccccagggagccctgaggagatgcttttccactttggaatgacctggcagatcaacgggacaggcctccttggcaagaggaatgaccagctgccttccaacttcacccctgttttctactcacaactgcaaaaaaacagctcctgggctgaacatttgatctccaactgtgacggagatagctcatgcatctatgacaccctggccctgcgcaacgcaagcatcggacttcacacgagggaagtcagtaaaaactacgagcaggcgaacgccaccctcaatcagtacccgccctccatcaatggtggtcgtgtgattgaagcctacaaggggcagaccacgctgattcagtacaccagcaatgctgaggatgccaacttcacgctcagagacagctgcaccgacttggagctctttgagaatgggacgttgctgtggacacccaagtcgctggagccattcactctggagattctagcaagaagtgccaagattggcttggcatctgcactccagcccaggactgtggtctgccattgcaatgcagagagccagtgtttgtacaatcagaccagcagggtgggcaactcctccctggaggtggctggctgcaagtgtgacgggggcaccttcggccgctactgcgagggctccgaggatgcctgtgaggagccgtgcttcccgagtgtccactgcgttcctgggaagggctgcgaggcctgccctccaaacctgactggggatgggcggcactgtgcggctctggggagctctttcctgtgtcagaaccagtcctgccctgtgaattactgctacaatcaaggccactgctacatctcccagactctgggctgtcagcccatgtgcacctgccccccagccttcactgacagccgctgcttcctggctgggaacaacttcagtccaactgtcaacctagaacttcccttaagagtcatccagctcttgctcagtgaagaggaaaatgcctccatggcagaagtcaacgcctcggtggcatacagactggggaccctggacatgcgggcctttctccgcaacagccaagtggaacgaatcgattctgcagcaccggcctcgggaagccccatccaacactggatggtcatctcggagttccagtaccgccctcggggcccggtcattgacttcctgaacaaccagctgctggccgcggtggtggaggcgttcttataccacgttccacggaggagtgaggagcccaggaacgacgtggtcttccagcccatctccggggaagacgtgcgcgatgtgacagccctgaacgtgagcacgctgaaggcttacttcagatgcgatggctacaagggctacgacctggtctacagcccccagagcggcttcacctgcgtgtccccgtgcagtaggggctactgtgaccatggaggccagtgccaacacctgcccagtgggccccgctgcagctgtgtgtccttctccatctacacggcctggggcgagcactgtgagcacctgagcatgaaactcgacgcgttcttcggcatcttctttggggccctgggcggcctcttgctgctgggggtcgggacgttcgtggtcctgcgcttctggggttgctccggggccaggttctcctatttcctgaactcagctgaggccttgccttgaaggggcagctgtggcctaggctacctcaagactcacctcatccttaccgcacatttaaggcgccattgcttttgggagactggaaaagggaaggtgactgaaggctgtcaggattctt

SEQ ID NO: 155705 - DNA, 3944 bp, Homo sapiens
  Payload ID: 10597
  Gene Symbol: MUC4
  Gene Name: mucin 4, cell surface associated
  ENST ID: ENST00000627577
  CDS Start-End: 1-494
ctctgaagatggaaacaccaggaatgacaacaccgtcactgaagacagacggtgggagacgcacagccacatcaccaccccccacaacctcccagaccatcatttccaccattcccagcactgccatgcacacccgctccacagctgcccccatccccatcctgcctgagagaggtgaggccatacaggagtttccctcttcccctatggggcaggcgccggggacctggagttcgtcaggaggaccgtggacttcacctccccactcttcaagccggcgactggcttcccccttggctcctctctccgtgattccctctacttcacagacaatggccagatcatcttcccagagtcagactaccagattttctcctaccccaacccactcccaacaggcttcacaggccgggaccctgtggccctggtggctccgttctgggacgatgctgacttctccactggtcgggggaccacattttatcaggctgtagggggtctatcctaacaagagtgagtcaagagggcccgtcctgtgctcctggactgggtgaataactccaatcagaggaaatgtgatgaaagctactgcaggaagtgtggaccgtgcccctgccacggacagggcagtgtggaggctccaagaggaagagactcacgcctgttctcaagaagctgcagattaggcatggggaggaatacgagacgttctatggtgaacacagcctgctagtccagcaggccgagtcttggattagaaagatgacaaacaacgggggctacaaggccaggtgggccctaaaggtcacgtgggtcaatgcccacgcctatcctgcccagtggaccctcgggagcaacacctaccaagccatcctctccacggacgggagcaggtcctatgccctgtttctctaccagagcggtgggatgcagtgggacgtggcccagcgctcaggcaacccggtgctcatgggcttctctagtggagatggctatttcgaaaacagcccactgatgtcccagccagtgtgggagaggtatcgccctgatagattcctgaattccaactcaggcctccaagggctgcagttctacaggctacaccgggaagaaaggcccaactaccgtctcgagtgcctgcagtggctgaagagccagcctcggtggcccagctggggctggaaccaggtctcctgcccttgttcctggcagcagggacgacgggacttacgattccaacccgtcagcataggtcgctggggcctcggcagtaggcagctgtgcagcttcacctcttggcgaggaggcgtgtgctgcagctacgggccctggggagagtttcgtgaaggctggcacgtgcagcgtccttggcagttggcccaggaactggagccacagagctggtgctgccgctggaatgacaagccctacctctgtgccctgtaccagcagaggcggccccacgtgggctgtgctacatacaggcccccacagcccgcctggatgttcggggacccccacatcaccaccttggatggtgtcagttacaccttcaatgggctgggggacttcctgctggtcggggcccaagacgggaactcctccttcctgcttcagggccgcaccgcccagactggctcagcccaggccaccaacttcatcgcctttgcggctcagtaccgctccagcagcctgggccccgtcacggtccaatggctccttgagcctcacgacgcaatccgtgtcctgctggataaccagactgtgacatttcagcctgaccatgaagacggcggaggccaggagacgttcaacgccaccggagtcctcctgagccgcaacggctctgaggtctcggccagcttcgacggctgggccaccgtctcggtgatcgcgctctccaacatcctccacgcctccgccagcctcccgcccgagtaccagaaccgcacggaggggctcctgggggtctggaataacaatccagaggacgacttcaggatgcccaatggctccaccattcccccagggagccctgaggagatgcttttccactttggaatgacctggcagatcaacgggacaggcctccttggcaagaggaatgaccagctgccttccaacttcacccctgttttctactcacaactgcaaaaaaacagctcctgggctgaacatttgatctccaactgtgacggagatagctcatgcatctatgacaccctggccctgcgcaacgcaagcatcggacttcacacgagggaagtcagtaaaaactacgagcaggcgaacgccaccctcaatcagtacccgccctccatcaatggtggtcgtgtgattgaagcctacaaggggcagaccacgctgattcagtacaccagcaatgctgaggatgccaacttcacgctcagagacagctgcaccgacttggagctctttgagaatgggacgttgctgtggacacccaagtcgctggagccattcactctggagattctagcaagaagtgccaagattggcttggcatctgcactccagcccaggactgtggtctgccattgcaatgcagagagccagtgtttgtacaatcagaccagcagggtgggcaactcctccctggagctctggggagctctttcctgtgtcagaaccagtcctgccctgtgaattactgctacaatcaaggccactgctacatctcccagactctgggctgtcagcccatgtgcacctgccccccagccttcactgacagccgctgcttcctggctgggaacaacttcagtccaactgtcaacctagaacttcccttaagagtcatccagctcttgctcagtgaagaggaaaatgcctccatggcagaagtcaacgcctcggtggcatacagactggggaccctggacatgcgggcctttctccgcaacagccaagtggaacgaatcgattctgcagcaccggcctcgggaagccccatccaacactggatggtcatctcggagttccagtaccgccctcggggcccggtcattgacttcctgaacaaccagctgctggccgcggtggtggaggcgttcttataccacgttccacggaggagtgaggagcccaggaacgacgtggtcttccagcccatctccggggaagacgtgcgcgatgtgacagccctgaacgtgagcacgctgaaggcttacttcagatgcgatggctacaagggctacgacctggtctacagcccccagagcggcttcacctgcgtgtccccgtgcagtaggggctactgtgaccatggaggccagtgccaacacctgcccagtgggccccgctgcagctgtgtgtccttctccatctacacggcctggggcgagcactgtgagcacctgagcatgaaactcgacgcgttcttcggcatcttctttggggccctgggcggcctcttgctgctgggggtcgggacgttcgtggtcctgcgcttctggggttgctccggggccaggttctcctatttcctgaactcagctgaggccttgccttgaaggggcagctgtggcctaggctacctcaagactcacctcatccttaccgcacatttaaggcgccattgcttttgggagactggaaaagggaaggtgactgaaggctgtcaggattcttcaaggagaatgaatactgggaatcaagacaagactataccttatccataggcgcaggtgcacagggggaggccataaagatcaaacatgcatggatgggtcctcacgcagacacacccacagaaggacactagcctgtgcacgcgcgcgtgcacacacacacacacacacacgagttcataatgtggtgatggccctaagttaagcaaaatgcttctgcacacaaaactctctggtttacttcaaattaactctatttaaataaagtctctctgactttttgtgtcttcaaaa

SEQ ID NO: 155706 - DNA, 3695 bp, Homo sapiens
  Payload ID: 10597
  Gene Symbol: MUC4
  Gene Name: mucin 4, cell surface associated
  ENST ID: ENST00000627017
  CDS Start-End: 1-413
gaatgacaacaccgtcactgaagacagacggtgggagacgcacagccacatcaccaccccccacaacctcccagaccatcatttccaccattcccagcactgccatgcacacccgctccacagctgcccccatccccatcctgcctgagagaggagtttccctcttcccctatggggcagacgccggggacctggagttcgtcaggaggaccgtggacttcacctccccactcttcaagccggcgactggcttcccccttggctcctctctccgtgattccctctacgcttcacaggccgggaccctgtggccctggtggctccgttctgggacgatgctgacttctccactggtcgggggaccacattttatcaggaatacgagacgttctatggtgaacacagcctgctagtccagcaggccgagtcttggattagaaagatgacaaacaacgggggctacaaggccaggtgggccctaaaggtcacgtgggtcaatgcccacgcctatcctgcccagtggaccctcgggagcaacacctaccaagccatcctctccacggacgggagcaggtcctatgccctgtttctctaccagagcggtgggatgcagtgggacgtggcccagcgctcaggcaacccggtgctcatgggcttctctaggcctccaagggctgcagttctacaggctacaccgggaagaaaggcccaactaccgtctcgagtgcctgcagtggctgaagagccagcctcggtggcccagctggggctggaaccaggtctcctgcccttgttcctggcagcagggacgacgggacttacgattccaacccgtcagcataggtcgctggggcctcggcagtaggcagctgtgcagcttcacctcttggcgaggaggcgtgtgctgcagctacgggccctggggagagtttcgtgaaggctggcacgtgcagcgtccttggcagttggcccaggaactggagccacagagctggtgctgccgctggaatgacaagccctacctctgtgccctgtaccagcagaggcggccccacgtgggctgtgctacatacaggcccccacagcccgcctggatgttcggggacccccacatcaccaccttggatggtgtcagttacaccttcaatgggctgggggacttcctgctggtcggggcccaagacgggaactcctccttcctgcttcagggccgcaccgcccagactggctcagcccaggccaccaacttcatcgcctttgcggctcagtaccgctccagcagcctgggccccgtcacggtccaatggctccttgagcctcacgacgcaatccgtgtcctgctggataaccagactgtgacatttcagcctgaccatgaagacggcggaggccaggagacgttcaacgccaccggagtcctcctgagccgcaacggctctgaggtctcggccagcttcgacggctgggccaccgtctcggtgatcgcgctctccaacatcctccacgcctccgccagcctcccgcccgagtaccagaaccgcacggaggggctcctgggggtctggaataacaatccagaggacgacttcaggatgcccaatggctccaccattcccccagggagccctgaggagatgcttttccactttggaatgacctggcagatcaacgggacaggcctccttggcaagaggaatgaccagctgccttccaacttcacccctgttttctactcacaactgcaaaaaaacagctcctgggctgaacatttgatctccaactgtgacggagatagctcatgcatctatgacaccctggccctgcgcaacgcaagcatcggacttcacacgagggaagtcagtaaaaactacgagcaggcgaacgccaccctcaatcagtacccgccctccatcaatggtggtcgtgtgattgaagcctacaaggggcagaccacgctgattcagtacaccagcaatgctgaggatgccaacttcacgctcagagacagctgcaccgacttggagctctttgagaatgggacgttgctgtggacacccaagtcgctggagccattcactctggagattctagcaagaagtgccaagattggcttggcatctgcactccagcccaggactgtggtctgccattgcaatgcagagagccagtgtttgtacaatcagaccagcagggtgggcaactcctccctggaggtggctggctgcaagtgtgacgggggcaccttcggccgctactgcgagggctccgaggatgcctgtgaggagccgtgcttcccgagtgtccactgcgttcctgggaagggctgcgaggcctgccctccaaacctgactggggatgggcggcactgtgcggctctggggagctctttcctgtgtcagaaccagtcctgccctgtgaattactgctacaatcaaggccactgctacatctcccagactctgggctgtcagcccatgtgcacctgccccccagccttcactgacagccgctgcttcctggctgggaacaacttcagtccaactgtcaacctagaacttcccttaagagtcatccagctcttgctcagtgaagaggaaaatgcctccatggcagaagtcaacgcctcggtggcatacagactggggaccctggacatgcgggcctttctccgcaacagccaagtggaacgaatcgattctgcagcaccggcctcgggaagccccatccaacactggatggtcatctcggagttccagtaccgccctcggggcccggtcattgacttcctgaacaaccagctgctggccgcggtggtggaggcgttcttataccacgttccacggaggagtgaggagcccaggaacgacgtggtcttccagcccatctccggggaagacgtgcgcgatgtgacagccctgaacgtgagcacgctgaaggcttacttcagatgcgatggctacaagggctacgacctggtctacagcccccagagcggcttcacctgcgtgtccccgtgcagtaggggctactgtgaccatggaggccagtgccagcacctgcccagtgggccccgctgcagctgtgtgtccttctccatctacacggcctggggcgagcactgtgagcacctgagcatgaaactcgacgcgttcttcggcatcttctttggggccctgggcggcctcttgctgctgggggtcgggacgttcgtggtcctgcgcttctggggttgctccggggccaggttctcctatttcctgaactcagctgaggccttgccttgaaggggcagctgtggcctaggctacctcaagactcacctcatccttaccgcacatttaaggcgccattgcttttgggagactggaaaagggaaggtgactgaaggctgtcaggattcttcaaggagaatgaatactgggaatcaagacaagactataccttatccataggcgcaggtgcacagggggaggccataaagatcaaacatgcatggatgggtcctcacgcagacacacccacagaaggacactagcctgtgcacgcgcgcgtgcacacacacacacacacacacgagttcataatgtggtgatggccctaagttaagcaaaatgcttctgcacacaaaactctctggtttacttcaaattaactctatttaaataaagtctctctgactttttgtgtctccaaaa

SEQ ID NO: 155707 - DNA, 16250 bp, Homo sapiens
  Payload ID: 10597
  Gene Symbol: MUC4
  Gene Name: mucin 4, cell surface associated
  ENST ID: ENST00000627411
  CDS Start-End: 1-13454
gaaccacagaggacacattaataactggaagtaaaactgctgccccagtcacctcaacaggctcaacaacagcgacactagagggacaatcaactgcagcttcttcaaggacctctaatcaggacatatcagcttcatctcagaaccaccagactaagagcacggagaccaccagcaaagctcaaaccgacaccctcacgcagatgatgacatcaactcttttttcttccccaagtgtacacaatgtgatggagacagctcctccagatgaaatgaccacatcatttccctccagtgtcaccaacacactcatgatgacatcaaagactataacaatgacaacctccacagactccactcttggaaacacagaagagacatcaacagcaggaactgaaagttctaccccagtgacctcagcagtctcaataacagctggacaggaaggacaatcacgaacaacttcctggaggacctctatccaagacacatcagcttcttctcagaaccactggactcggagcacgcagaccaccagggaatctcaaaccagcaccctaacacacagaaccacttcaactccttctttctctccaagtgtacacaatgtgacagggactgtttctcagaagacatctccttcaggtgaaacagctacctcatccctctgtagtgtcacaaacacatccatgatgacatcagagaagataacagtgacaacctccacaggctccactcttggaaacccaggggagacatcatcagtacctgttactggaagtcttatgccagtcacctcagcagccttagtaacatttgatccagaaggacaatcaccagcaactttctcaaggacttctactcaggacacaacagctttttctaagaaccaccagactcagagcgtggagaccaccagagtatctcaaatcaacaccctcaacaccctcacaccggttacaacatcaactgttttatcctcaccaagtggattcaacccaagtggaacagtttctcaggagacattcccttctggtgaaacaaccacctcatccccttccagtgtcagcaatacattcctggtaacatcaaaggtgttcagaatgccaacctccagagactctactcttggaaacacagaggagacatcactatctgtaagtggaaccatttctgcaatcacttccaaagtttcaaccatatggtggtcagacactctgtcaacagcactctcccccagttctctacctccaaaaatatccacagctttccacacccagcagagtgaaggtgcagagaccacaggacggcctcatgagaggagctcattctctccaggtgtgtctcaagaaatatttactctacatgaaacaacaacatggccttcctcattctccagcaaaggccacacaacttggtcacaaacagaactgccctcaacatcaacaggtgctgccactaggcttgtcacaggaaatccatctacagggacagctggcactattccaagggtcccctctaaggtctcagcaataggggaaccaggagagcccaccacatactcctcccacagcacaactctcccaaaaacaacaggggcaggcgcccagacacaatggacacaagaaacggggaccactggagaggctcttctcagcagcccaagctacagtgtgactcagatgataaaaacggccacatccccatcttcttcacctatgctggatagacacacatcccaacaaattacaacggcaccatcaacaaatcattcaacaatacattccacaagcacctctcctcaggaatcaccagctgtttcccaaaggggtcacactcaagccccgcagaccacacaagaatcacaaaccacgaggtccgtctcccccatgactgacaccaagacagtcaccaccccaggttcttccttcacagccagtgggcactcgccctcagaaattgttcctcaggacgcacccaccataagtgcagcaacaacctttgccccagctcccaccggggatggtcacacaacccaggccccgaccacagcactgcaggcagcacccagcagccatgatgccaccctggggccctcaggaggcacgtcactttccaaaacaggtgcccttactctggccaactctgtagtgtcaacaccagggggcccagaaggacaatggacatcagcctctgccagcacctcacctgacacagcagcagccatgacccatacccaccaggctgagagcacagaggcctctggacaaacacagaccagcgaaccggcctcctcagggtcacgaaccacctcagcgggcacagctaccccttcctcatccggggcgagtggcacaacaccttcaggaagcgaaggaatatccacctcaggagagacgacaaggttttcatcaaacccctccagggacagtcacacaacccagtcaacaaccgaattgctgtccgcctcagccagtcatggtgccatcccagtaagcacaggaatggcgtcttcgatcgtccccggcacctttcatcccaccctctctgaggcctccactgcagggagaccgacaggacagtcaagcccaacttctcccagtgcctctcctcaggagacagccgccatttcccggatggcccagactcagaggacaagaaccagcagagggtctgacactatcagcctggcgtcccaggcaaccgacaccttctcaacagtcccacccacacctccatcgatcacatccactgggcttacatctccacaaaccgagacccacactctgtcaccttcagggtctggtaaaaccttcaccacggccctcatcagcaacgccacccctcttcctgtcacctacgcttcctcggcatccacaggtcacaccacccctcttcatgtcaccgatgcttcctcagtatccacaggtcacgccacccctcttcctgtcaccagcccttcctcagtatccacaggtcacaccacccctcttcctgtcaccgacacttcctcagaatccacaggtcacgtcacccctcttcctgtcaccagcttttcctcagcatccacaggtgacagcacccctcttcctgtcactgacacttcctcagcatccacaggtcacgtcacccctcttcctgtcaccagcctttcctcagcatccacaggtgacaccacccctcttcctgtcactgacacttcctcagcatccacaggtcacgccacctctcttcctgtcaccgacacttcctcagtatccacaggtcacaccacccctcttcctgtcaccgacacttcctcagcatccacaggtcacgccacctctcttcctgtcaccgacacttcctcagtatccacaggtcacaccacccctcttcatgtcactgatgcttcctcagcatccacaggtcaggccacccctcttcctgtcaccagcctttcctcagtatccacaggtgacaccacgcctcttcctgtcactagcccttcctcagcatccacaggtcacgccacccctcttcttgtcaccgacacttcctcagcatccacaggacacgccacccctcttcctgtcaccgacgcttcctcagtgtccacagatcacgccacctctcttcctgtaaccatcccttccgcagcatccacaggtcacaccacccctcttcctgtcaccgacacttcctcagcatccacaggtcaggccacctctcttcttgtcaccgacacttcctcagtatccacaggtgacaccacgcctcttcctgtcactagcacttcctcagcatccacaggtcacgtcactcctcttcatgtcaccagcccttcctcagcatccacaggtcacgccacccctcttcctgtcaccagcctttcctcagcatccacaggtgacaccatgcctcttcctgtcactagcccttcctcagcatccacaggtgacaccacccctcttcctgtcaccgacgcttcctcagtatccacaggtcacaccacccctcttcatgtcactgatgcttcctcagcatccacaggtcaggccacccctcttcctgtcaccagcctttcctcagtatccacaggtgacaccacgcctcttcctgtcactagcccttcctcagcatccacaggtcacgccacccctcttcttgtcaccgacacttcctcagcatccacaggacacgccacccctcttcctgtcaccgacgcttcctcagtgtccacagatcacgccacctctcttcctgtaaccatcccttccgcagcatccacaggtcacaccacccctcttcctgtcaccgacacttcctcagcatccacaggtcaggccacctctcttcttgtcaccgacacttcctcagtatccacaggtgacaccacgcctcttcctgtcactagcacttcctcagcatccacaggtcacgtcactcctcttcatgtcaccagcccttcctcagcatccacaggtcacgccacccctcttcctgtcaccagcctttcctcagcatccacaggtgacaccatgcctcttcctgtcactagcccttcctcagcatccacaggtgacaccacccctcttcctgtcaccgacgcttcctcagtatccacaggtcacaccacccctcttcctgtcaccagcccttcctcagcatctacaggtcacaccacccctcttcctgtcaccgacacttcctcagcatccaaaggtgacaccacccctcttcctgtcaccagcccttcctcagcatctacaggtcacaccacccctcttcctgtcaccgacacttcctcagcatccacaggtgacaccacccctcttcctgtcaccaatgcttcctcattatccacaggtcacgccacccctcttcatgtcaccagcccttcctcagcatccacaggtcacgccacccctcttcctgtcaccagcacttcctcagcatccaccggtcacgccacccctcttcctgtcaccggcctttcctcagctaccacagatgacaccacccgtcttcctgtcaccgacgtttcctcggcatccacaggtcaggccacccctcttcctgtcaccagcctttcctcagtatccacaggtgacaccacgcctcttcctgtcactagcccttcctcagcatccacaggtcacgccagccctcttcttgtcactgacgcttcctcagcatccacaggtcaggccacccctcttcctgtcaccgacacttcctcagtatccacagctcacgccaccccacttcctgtcaccggcctttcttcagcttccacagatgacaccacccgtcttcctgtcaccgacgtttcctcggcatccacaggtcaggccatccctcttcctgtcaccagcccttcctcagcatccacaggtgacaccacccctcttcctgtcaccgacgcttcctcagcatccacaggtgacaccacctctcttcctgtcaccatcccttcctcagcatcttcaggtcacaccacctctcttcctgtcaccgacgcttcctcagtgtccacaggtcacgccacctctcttcttgtcaccgacgcttcctcagtatccacaggtgacaccacccctcttcctgtcaccgacactaactcagcatccacaggtgacaccacccctcttcatgtcaccgacgcttcctcagtatccacaggtcacgccacctctcttcctgtcaccagcctttcctcagcatccacaggtgacaccacgcctcttcctgtcactagcccttcctcagcatcctcaggtcacaccacccctcttcctgtcaccgacgcttcctcagtacccacaggtcacgccacctctcttcctgtcaccgacgcttcctcagtgtccacaggtcacgccacccctcttcctgtcaccgacgcttcctcagtgtccacaggtcatgccacccctcttccggtcaccgacacttcctcagtatctacaggacaggccacccctcttcctgtcaccagcctttcctcagcatccacaggtgacaccacccctcttcctgtcaccgacacttcctcagcatccacaggtcacgccccccatcttcctgtcaccggcctttcctcagcttccacaggtgacaccacccgtcttcctgtcaccaacgtttcctcggcatccacaggtcatgccacccctcttcctgtcaccagcacttcctcagcatccacaggtgacaccacccctcttcctggcaccgacacttcctcagtatccacaggtcacaccacccctcttcttgtcaccgacgcttcgtcagtatccacaggtgacaccacccgtcttcctgtcaccagcccttcctcagcatctacaggtcacaccacccctcttcatgtcaccgatgcttcctcagtatccacaggtcacaccacccctcttcctgtcaccgacacttcctcagcatccacaggtcaggccacctctcttcttgtcaccgacacttcctcagtatccacaggtgacaccacgcctcttcctgtcactagcacttcctcagcatccacaggtcacgtcactcctcttcatgtcaccagcccttcctcagcatccacaggtcacgccacccctcttcctgtcaccagcctttcctcagcatccacaggtgacaccacccctcttcctgtcaccgacacttcctcagtatccacaggtcacaccacccctcttcctgtcaccagcccttcctcagcatctacaggtcacaccacccctcttcctgtcaccgacacttcctcagcatccaaaggtgacaccacccctcttcctgtcaccagcccttcctcagcatctacaggtcacaccacccctcttcctgtcaccgacacttcctcagcatccacaggtgacaccacccctcttcctgtcaccaatgcttcctcattatccacaggtcacgccacccctcttcatgtcaccagcccttcctcagcatccacaggtcacgccacccctcttcctgtcaccagcacttcctcagcatccaccggtcacgccacccctcttcctgtcaccagcacttcctcagcatccaccggtcacgccacccctcttcctgtcaccgacaattcctcagtatccacaggtcatgccacccctcttcctgtcaccggcctttcctcagctaccacagatgacaccacccgtcttcctgtcaccgacgtgtcctcggcatccacaggtcaggccacccctcttcctgtcaccagcctttcctcagtatccacaggtgacaccacgcctcttcctgtcactagcccttcctcagcatccacaggtcacgccagccctcttcttgtcactgacgcttcctcagcatccacaggtcaggccacccctcttcctgtcaccgacacttcctcagtatccacagctcacgccaccccacttcctgtcaccggcctttcctcagcttccacagatgacaccacccgtcttcctgtcaccgacgtttcctcggcatccacaggtcaggccatccctcttcctgtcaccagcccttcctcagcatccacaggtgacaccacccctcttcctgtcaccgacgcttcctcagcatccacaggtgacaccacctctcttcctgtcaccatcccttcctcagcatcttcaggtcacaccacctctcttcctgtcaccgacgcttcctcagtgtccacaggtcacgccacctctcttcttgtcaccgacgcttcctcagtatccacaggtgacaccacccctcttcctgtcaccgacactaactcagcatccacaggtgacaccacccctcttcatgtcaccgacgcttcctcagtatccacaggtcacgccacctctcttcctgtcaccagcctttcctcagcatccacaggtgacaccacgcctcttcctgtcactagcccttcctcagcatcctcaggtcacaccacctctcttcctgtcaccgacgcttcctcagtgtccacaggtcacgccacctctcttcctgtcaccatcccttcctcagcatcctcaggtcacaccacccctcttcctgtcaccgacgcttcctcagtacccacaggtcacgccacctctcttcctgtcaccgacgcttcctcagtgtccacaggtcacgccacccctcttcctgtcaccgacgcttcctcagtgtccacaggtcatgccacccctcttccggtcaccgacacttcctcagtatctacaggacaggccacccctcttcctgtcaccagcctttcctcagcatcatccactggtgacaccacgccgcttcctgtcactgatacttcctcagcatccacaggtcaggacacccctcttcctgtcaccagccttttctcagtatccacaggtgacaccacgcctcttcctgtcactagcccttcctcagcatccacaggtcacgccacccatcttcttgtcaccgacgcttcctcagtatccacaggtcacgccacctctcttcttgtcaccgacgcttcctcagtatccacaggtcacgccaccgctcttcatgtcaccgatgcttcctcattatccacaggggacaccacccctcttcctgtcaccagcccttcctcagcatccacaggtgacaccacccctcttcctgtcaccgacacttcctcagtatccacaggtcacgccacctctcttcctgtcactgacacttcctcagcatccacaggtcacgccacctctcttcctgtcaccgacacttcctcagcatccacaggtcaggccacccctcttcctgtcaccagcccttcctcagcatccacaggtcacgccatccctcttcttgtcaccgacacttcctcagcatccacaggacaggccacccctcttcctgtcaccagcctttcctcagcatccacaggtgacaccacccctcttcctgtcaccgatgcttcctcagtgtccacaggtcacgccacctctcttcctgtcaccagcctttcctcagtatccacaggtgacaccacccctcttcctgtcactagcccttcctcagcatccacaggtcacgccacccctcttcatgtcaccagcccttcctcagcatccacaggtcacgccacccctcttcctgtcaccagcctttcctcagcatccacaggtgacaccacgcctcttcctgtcactagcccttcctcagcatccacaggtcacgccacccctcttcatgtcaccgacgcttcctcagtatccacaggtgacaccacccctcttcctgtcaccagcccttcctcagcatcctcaggtcacaccacccctcttcctgtcaccgacgcttcctcagcatccacaggtgacaccacccctcttcctgtcaccgacacttcctcagcatccacaggtcacgccacccatcttcctgtcaccggcctttcctcagcttccacaggtgacaccacccgtcttcctgtcaccgacgtttcctcggcatccacaggtcatgccacccctcttcctgtcaccagcacttcctcagcatccacaggtgacaccacccctcttcctggcaccgacacttcctcagtatccacaggtcacaccacccctcttcttgtcaccgacgcttcgtcagtatccacaggtgacaccacccgtcttcctgtcaccagcccttcctcagcatctacaggtcacaccacccctctacctgtcaccgacactccctcagcatccacaggtgacaccacccctcttcctgtcaccaatgcttcctcattatccacacgtcacgccacctctcttcatgtcaccagcccttcctcagcatccaccggtcacgccacccctcttcctgttaccgacacttccgcagcatccacaggtcacgccacccctcttcctgtcaccagcacttcctcagcatccacaggtgacaccacccctcttcctgtcaccgacacttcctcagcatccacaggtcatgccacccctcttcctgtcaccaacacttcctcagtatccacaggtcacgccacccctcttcatgtcaccagcccttcctcagcatccacaggtcacaccacccctcttcctgtcaccgacgcttcgtcagtgtccacaggtcacgccacctctcttcctgtcaccgacgcttcctcagtgtccacaggtcacgccacccctcttcctgtcaccgacgcttcctcagtgtccacaggtcacgctacccctcttcctctcaccagcctttcctcagtatccacaggtgacaccacgcctcttcctgtcaccgacacttcctcagcatccacaggtcaggccacccctcttcctgtcaccagcctttcctcagtatccacaggtgacaccacccctcttcctgtcaccgacacttcctcagcatccacaggtcacgccacctctcttcctgtcaccgacacttcctcagcatccacaggtcacgccacccctcttcatgtcaccagcccttcctcagcatccaccggtcacgccaccccgcttcctgtcaccgacacttcctcagcatccacaggtcacgccacccctcttcctgtcaccagcctttcctcagtatccacaggtgacaccacgcctcttcctgtcactagcccttcctcagcatccacaggtcacgccactcctcttcttgtcaccgacgcttcctcagcatccacaggtcaggccacccctcttcctgtcaccagcctttcctcagtatccacaggtgacaccacgcctcttcctgtcactagcccttcctcagcatccaccggtcatgccacctctcttcctgtcaccgacacttcctcagcatccacaggtgacaccacctctcttcctgtcaccgacacttcctcagcatacacaggtgacaccacctctcttcctgtcaccgacacttcctcatcatccacaggtgacaccacccctcttcttgtcaccgagacttcctcagcatccacaggtgacaccacccctgtgcctgtcaccgacacttcctcagtatccacaggtcacgccacccctcttcctgtcaccggcctttcctcagcttccacaggtgacaccacccgtcttcctgtcaccgacatttcctcggcatccacaggtcaggccacccctcttcctgtcaccaacacttcctcagtatccacaggtgacaccatgcctcttcctgtcactagcccttcctcagcatccacaggtcacgccacccctcttcctgtcaccagcacttcctcagcatccaccggtcacgccacccctgttcctgtcaccagcacttcctcagcatccacaggtcacaccacccctcttcctgtcaccagcccttcctcagcatctacaggtcacaccacccctcttcctgtcaccgacacttcctcagcatccacaggtgacaccacccctcttcctgtcaccaatgcttcctcattatccacaggacacaccacccctcttcatgtcaccatcccttcctcagcatccacaggtgacaccagcactcttcctgtcaccggcgcttcctcagcatccaccggtcacgccacccctcttcctgtcaccgacacttcctcagtatccacaggtcacgccacccctcttcctgtcaccagcttttcctcagtatccacaggtgacaccacccctcttcctgtcaccgacgcttcctcggcatccaccggtcacgccacccctcttcctgtcaccgacacttcctcagcatccacaggtgacaccacccctcttcctgtcaccgacgcttcctcggcatccacaggtcaggccacccctcttcctgtcaccagcctttcctcagtatcaacaggtgacaccacgcctcttcctgtcaccatcccttcctcagcatcctcaggtcacaccacctctcttcctgtcagcgacacttcctcagcatccacaggtcaggccacccctcttcctgtcaccagcctttcctcagtatccacaggtgacaccacccctcttcttgtcaccgacgcttcctcagtatccacaggtcacgccacccctcttcctgtcaccgacacttcctcagcatccacaggtgacaccacccgtcttcctgtcacggacacttcctcagcatccacaggtcaggccacccctcttcctgtcaccagcctttcctcagtatccacaggtgacaccacccctcttcttgtcaccaacacttcctcagtatccacaggtcacgccacctctcttcctgtcaccatcccttcctcatcatcctcaggtcacaccacccctcttcctgtcaccagcacttcctcagtatctacaggtcacgtcacccctcttcatgtcaccagcccttcctcatcatccacaggtcaggccacccctcttcctgtcaccagcacttcctcatcatccacaggtcaggccacccctcttcctgtcaccagcacttcctcagcatccacaggtcacgccacccctcttcctgtcaccgacgcttcctcagtgtccacaggtcacgccacgcctcttcctgtcaccgacacttcctcagcatccacaggtgacaccacccctcttcctgtcaccgacacttcctcagcatccacaggtcaggccacccctcttcctgtcaccagcctttcctcagtatccacaggtcacgccacccctcttgctgtcagcagtgctacctcagcttccacagtatcctcggactcccctctgaagatggaaacatcaggaatgacaacaccgtcactgaagacagacggtgggagacgcacagccacatcaccaccccccacaacctcccagaccatcatttccaccattcccagcactgccatgcacacccgctccacagctgcccccatccccatcctgcctgagagaggagtttccctcttcccctatggggcagacgccggggacctggagttcgtcaggaggaccgtggacttcacctccccactcttcaagccggcgactggcttcccccttggctcctctctccgtgattccctctacttcacagacaatggccagatcatcttcccagagtcagactaccagattttctcctaccccaacccactcccaacaggcttcacaggccgggaccctgtggccctggtggctccgttctgggacgatgctgacttctccactggtcgggggaccacattttatcaggaatacgagacgttctatggtgaacacagcctgctagtccagcaggccgagtcttggattagaaagatcacaaacaacgggggctacaaggccaggtgggccctaaaggtcacgtgggtcaatgcccacgcctatcctgcccagtggaccctcgggagcaacacctaccaagccatcctctccacggacgggagcaggtcctatgccctgtttctctaccagagcggtgggatgcagtgggacgtggcccagcgctcagtggagatggctatttcgaaaacagcccactgatgtcccagccagtgtgggagaggtatcgccctgatagattcctgaattccaactcaggcctccaagggctgcagttctacaggctacaccgggaagaaaggcccaactaccgtctcgagtgcctgcagtggctgaagagccagcctcggtggcccagctggggctggaaccaggtctcctgcccttgttcctggcagcagggacgacgggacttacgattccaacccgtcagcataggtcgctggggcctcggcagtaggcagctgtgcagcttcacctcttggcgaggaggcgtgtgctgcagctacgggccctggggagagtttcgtgaaggctggcacgtgcagcgtccttggcagttggcccaggaactggagccacagagctggtgctgccgctggaatgacaagccctacctctgtgccctgtaccagcagaggcggccccacgtgggctgtgctacatacaggcccccacagcccgcctggatgttcggggacccccacatcaccaccttggatggtgtcagttacaccttcaatgggctgggggacttcctgctggtcggggcccaagacgggaactcctccttcctgcttcagggccgcaccgcccagactggctcagcccaggccaccaacttcatcgcctttgcggctcagtaccgctccagcagcctgggccccgtcacggtccaatggctccttgagcctcacgacgcaatccgtgtcctgctggataaccagactgtgacatttcagcctgaccatgaagacggcggaggccaggagacgttcaacgccaccggagtcctcctgagccgcaacggctctgaggtctccgccagcttcgacggctgggccaccgtctcggtgatcgcgctctccaacatcctccactcctccgccagcctcccgcccgagtaccagaaccgcacggaggggctcctgggggtctggaataacaatccagaggacgacttcaggatgcccaatggctccaccattcccccagggagccctgaggagatgcttttccactttggaatgacctggcagatcaacgggacaggcctccttggcaagaggaatgaccagctgccttccaacttcacccctgttttctactcacaactgcaaaaaaacagctcctgggctgaacatttgatctccaactgtgacggagatagctcatgcatctatgacaccctggccctgcgcaacgcaagcatcggacttcacacgagggaagtcagtaaaaactacgagcaggcgaacgccaccctcaatcagtacccgccctccatcaatggtggtcgtgtgattgaagcctacaaggggcagaccacgctgattcagtacaccagcaatgctgaggatgccaacttcacgctcagagacagctgcaccgacttggagctctttgagaatgggacgttgctgtggacacccaagtcgctggagccattcactctggagattctagcaagaagtgccaagattggcttggcatctgcactccagcccaggactgtggtctgccattgcaatgcagagagccagtgtttgtacaatcagaccagcagggtgggcaactcctccctggaggtggctggctgcaagtgtgacgggggcaccttcggccgctactgcgagggctccgaggatgcctgtgaggagccgtgcttcccgagtgtccactgcgttcctgggaagggctgcgaggcctgccctccaaacctgactggggatgggcggcactgtgcggctctggggagctctttcctgtgtcagaaccagtcctgccctgtgaattactgctacaatcaaggccactgctacatctcccagactctgggctgtcagcccatgtgcacctgccccccagccttcactgacagccgctgcttcctggctgggaacaacttcagtccaactgtcaacctagaacttcccttaagagtcatccagctcttgctcagtgaagaggaaaatgcctccatggcagaggtcaacgcctcggtggcatacagactggggaccctggacatgcgggcctttctccgcaacagccaagtggaacgaatcgattctgcagcaccggcctcgggaagccccatccaacactggatggtcatctcggagttccagtaccgccctcggggcccggtcattgacttcctgaacaaccagctgctggccgcggtggtggaggcgttcttataccacgttccacggaggagtgaggagcccaggaacgacgtggtcttccagcccatctccggggaagacgtgcgcgatgtgacagccctgaacgtgagcacgctgaaggcttacttcagatgcgatggctacaagggctacgacctggtctacagcccccagagcggcttcacctgcgtgtccccgtgcagtaggggctactgtgaccatggaggccagtgccagcacctgcccagtgggccccgctgcagctgtgtgtccttctccatctacacggcctggggcgagcactgtgagcacctgagcatgaaactcgacgcgttcttcggcatcttctttggggccctgggcggcctcttgctgctgggggtcgggacgttcgtggtcctgcgcttctggggttgctccggggccaggttctcctatttcctgaactcagctgaggccttgccttgaaggggcagctgtggcctaggctacctcaagactcacctcatccttaccgcacatttaaggcgccattgcttttgggagactggaaaagggaaggtgactgaaggctgtcaggattctt

SEQ ID NO: 155708 - DNA, 22093 bp, Homo sapiens
  Payload ID: 10597
  Gene Symbol: MUC4
  Gene Name: mucin 4, cell surface associated
  ENST ID: ENST00000630966
  CDS Start-End: 73-19383
gtctgctcctcacactgcagctgctgggccgtggagcttccccagggagccagggggacttttgccgcagccatgaagggggcacgctggaggagggtcccctgggtgtccctgagctgcctgtgtctctgcctccttccgcatgtggtcccaggaaccacagaggacacattaataactggaagtaaaactcctgccccagtcacctcaacaggctcaacaacagcgacactagagggacaatcaactgcagcttcttcaaggacctctaatcaggacatatcagcttcatctcagaaccaccagactaagagcacggagaccaccagcaaagctcaaaccgacaccctcacgcagatgatgacatcaactcttttttcttccccaagtgtacacaatgtgatggagactgttacgcaggagacagctcctccagatgaaatgaccacatcatttccctccagtgtcaccaacacactcatgatgacatcaaagactataacaatgacaacctccacagactccactcttggaaacacagaagagacatcaacagcaggaactgaaagttctaccccagtgacctcagcagtctcaataacagctggacaggaaggacaatcacgaacaacttcctggaggacctctatccaagacacatcagcttcttctcagaaccactggactcggagcacgcagaccaccagggaatctcaaaccagcaccctaacacacagaaccacttcaactccttctttctctccaagtgtacacaatgtgacagggactgtttctcagaagacatctccttcaggtgaaacagctacctcatccctctgtagtgtcacaaacacatccatgatgacatcagagaagataacagtgacaacctccacaggctccactcttggaaacccaggggagacatcatcagtacctgttactggaagtcttatgccagtcacctcagcagccttagtaacagttgatccagaaggacaatcaccagtaactttctcaaggacttctactcaggacacaacagctttttctaagaaccaccagactcagagcgtggagaccaccagagtatctcaaatcaacaccctcaacaccctcacaccggttacaacatcaactgttttatcctcaccaagtggattcaacccaagtggaacagtttctcaggagacattcccttctggtgaaacaaccatctcatccccttccagtgtcagcaatacattcctggtaacatcaaaggtgttcagaatgccaatctccagagactctactcttggaaacacagaggagacatcactatctgtaagtggaaccatttctgcaatcacttccaaagtttcaaccatatggtggtcagacactctgtcaacagcactctcccccagttctctacctccaaaaatatccacagctttccacacccagcagagtgaaggtgcagagaccacaggacggcctcatgagaggagctcattctctccaggtgtgtctcaagaaatatttactctacatgaaacaacaacatggccttcctcattctccagcaaaggccacacaacttggtcacaaacagaactgccctcaacatcaacaggtgctgccactaggcttgtcacaggaaatccatctacaggggcagctggcactattccaagggtcccctctaaggtctcagcaataggggaaccaggagagcccaccacatactcctcccacagcacaactctcccaaaaacaacaggggcaggcgcccagacacaatggacacaagaaacggggaccactggagaggctcttctcagcagcccaagctacagtgtgactcagatgataaaaacggccacatccccatcttcttcacctatgctggatagacacacatcacaacaaattacaacggcaccatcaacaaatcattcaacaatacattccacaagcacctctcctcaggaatcaccagctgtttcccaaaggggtcacactcaagccccgcagaccacacaagaatcacaaaccacgaggtccgtctcccccatgactgacaccaagacagtcaccaccccaggttcttccttcacagccagtgggcactcgccctcagaaattgttcctcaggacgcacccaccataagtgcagcaacaacctttgccccagctcccaccggggatggtcacacaacccaggccccgaccacagcactgcaggcagcacccagcagccatgatgccaccctggggccctcaggaggcacgtcactttccaaaacaggtgcccttactctggccaactctgtagtgtcaacaccagggggcccagaaggacaatggacatcagcctctgccagcacctcacctgacacagcagcagccatgacccatacccaccaggctgagagcacagaggcctctggacaaacacagaccagcgaaccggcctcctcagggtcacgaaccacctcagcgggcacagctaccccttcctcatccggggcgagtggcacaacaccttcaggaagcgaaggaatatccacctcaggagagacgacaaggttttcatcaaacccctccagggacagtcacacaacccagtcaacaaccgaattgctgtccgcctcagccagtcatggtgccatcccagtaagcacaggaatggcgtcttcgatcgtccccggcacctttcatcccaccctctctgaggcctccactgcagggagaccgacaggacagtcaagcccaacttctcccagtgcctctcctcaggagacagccgccatttcccggatggcccagactcagaggacaagaaccagcagagggtctgacactatcagcctggcgtcccaggcaaccgacaccttctcaacagtcccacccacacctccatcgatcacatccagtgggcttacatctccacaaacccagacccacactctgtcaccttcagggtctggtaaaaccttcaccacggccctcatcagcaacgccacccctcttcctgtcacctacgcttcctcggcatccacaggtcacaccacccctcttcatgtcaccgatgcttcctcagtatccacaggtcacgccacccctcttcctgtcaccgacacttcctcagaatccacaggtcacgccacccctcttcctgtcaccagcccttcctcagtatccacaggtcacaccacccctcttcctgtcaccgacacttcctcagaatccacaggtcatgtcacccctcttcctgtcaccagcctttcctcagcatccacaggtgacagcacccctcttcctgtcactgacacttcctcagcatccacaggtcacgtcacccctcttcctgtcaccagcctttcctcagcatccacaggtgacaccacccctcttcctgtcactgacacttcctcagcatccacaggtcacgccacctctcttcctgtcaccgacacttcctcagtatccacaggtcacaccacccctcttcctgtcaccgacacttcctcagcatccacaggtcacgccacctctcttcctgtcaccgacacttcctcagtatccacagctcacgccaccccacttcctgtcaccggcctttcttcagcttccacagatgacaccacccgtcttcctgtcaccgacgtttcctcggcatccacaggtcaggccatccctcttcctgtcaccagcccttcctcagcatccacaggtgacaccacccctcttcctgtcaccgacgcttcctcagcatccacaggtgacaccacctctcttcctgtcaccatcccttcctcagcatcttcaggtcacaccacctctcttcctgtcaccgacgcttcctcagtgtccacaggtcacgccacctctcttcttgtcaccgacgcttcctcagtatccacaggtgacaccacccctcttcctgtcaccgacactaactcagcatccacaggtgacaccacccctcttcatgtcaccgacgcttcctcagtatccacaggtcacgccacctctcttcctgtcaccagcctttcctcagcatccacaggtgacaccacgcctcttcctgtcactagcccttcctcagcatcctcaggtcacaccacccctcttcctgtcaccgacgcttcctcagtacccacaggtcacgccacctctcttcctgtcaccgacgcttcctcagtgtccacaggtcacgccacccctcttcctgtcaccgacgcttcctcagtgtccacaggtcatgccacccctcttccggtcaccgacacttcctcagtatctacaggacaggccacccctcttcctgtcaccagcctttcctcagcatccactggtgacaccacgccgcttcctgtcaccgatacttcctcagcatccacaggtcaggacacccctcttcctgtcaccagcctttcctcagtatccacaggtgacaccacgcctcttcctgtcactagcccttcctcagcatccacaggtcacgccacccctcttcttgtcaccgacgcttcctcagtatccacaggtcacgccacctctcttcttgtcaccgacgcttcctcagtatccacaggtcacgccaccgctcttcatgtcaccgatgcttcctcattatccacaggggacaccacccctcttcctgtcaccagcccttcctcagcatccacaggtgacaccacccctcttcctgtcaccgacacttcctcagcatccacaggtcacgccacctctcttcctgtcaccgacacttcctcagcatccacaggtcacgccacccctcttcctgtcaccgacacttcctcagcatccacaggtcaggccacccctcttcctgtcaccggcccttcctcagcatccacaggtcacgccatccctcttcttgtcaccgacacttcctcagcatccacaggacaggccacccctcttcctgtcaccagcctttcctcagcatccacaggtgacaccacccctcttcctgtcaccgacgcttcctcagtgtccacaggtcacgccacctctcttcctgtcaccagcctttcctcagtatccacaggtgacaccacccctcttcctgtcaccagcccttcctcagcatcctcaggtcacaccacccctcttcctgtcaccgacgcttcctcagtatccacaggtgacaccacccctcttcctgtcaccagcccttcctcagcatcctcaggtcacaccacccctcttcctgtcaccagcccttcctcagcatcctcaggtcacaccacccctcttcctgtcaccgacgcttcctcagcatccacaggtgacaccacccctcttcctgtcaccgacacttcctcagcatccacaggtcacgccacccatcttcctgtcaccggcctttcctcagcttccacaggtgacaccacccgtcttcctgtcaccaacgtttcctcggcatccacaggtcatgccacccctcttcctgtcaccagcacttcctcagcatccacaggtgacaccacccctcttcctggcaccgacacttcctcagtatccacaggtcacaccacccctcttcttgtcaccgacgcttcgtcagtatccacaggtgacaccacccgtcttcctgtcaccagcccttcctcagcatctacaggtcacaccacccctctacctgtcaccgacactccctcagcatccacaggtgacaccacccctcttcctgtcaccaatgcttcctcattatccacacgtcacaccacctctcttcatgtcaccagcccttcctcagcatccacaggtcacgccacctctcttcctgtcaccgacacttcctcagtatccacaggtcatgccacccctcttcatgtcaccagcccttcctcagcatccacaggtgacaccacccctcttcctgtcaccgacacttactcagcatccacaggtcaggccacccctcttcctgtcaccgacacttcctcagcatccacaggtgacaccacccctcttcctgtcaccgacacttcctcagcatccacaggtcacgccacccctcttcctgtcaccaacacttcctcagtatccacaggtcacgccacccctcttcatgtcaccagcccttcctcagcatccacaggtcacaccacccctcttcctgtcaccgacgcttcgtcagtgtccacaggtcacgccacctctcttcctgtcaccgacgcttcctcagtgttcacaggtcacgccacctcgcttcctgtcaccatcccttcctcagcatcctcaggtcacaccacccctcttcctgtcaccgacgcttcctcagtgtccacaggtcacgccacctctcttcctgtcaccgacgcttcctcagtgtccacaggtcacgccacccctcttcctgtcaccgacgcttcctcagtgtccacaggtcacgctacccctcttcctgtcaccgacacttcctcagtatccacaggtcacgccacccctcttcctctcaccagcctttcctcagtatccacaggtgacaccacgcctcttcctgtcaccgacacttcctcagcatccacaggtcaggccacccctcttcctgtcaccagcctttcctcagtatccacaggtgacaccacccctcttcctgtcaccgacacttcctcagcatccacaggtcacgccacctctcttcctgtcaccgacacttcctcagcatccacaggtcacgccacccctcttcctgacaccgacacttcctcagcatccacaggtcacgccacccctcttcctgtcaccgacacttcctcagcatccacaggtcacgccacccttcttcctgtcaccgacacttcctcagcatccataggtcacgccacccctcttcctgtcaccgacacttcctcaatatccacaggtcacgccacccctcttcatgtcaccagcccttcctcagcatccaccggtcacgccaccccgcttcctgtcaccgacacttcctcagcatccacaggtcacgccaaccctcttcatgtcaccagcccttcctcagcatccaccggtcacgccaccccgcttcctgtcaccgacacttcctcagcatccacaggtcacgccacccctcttcctgtcaccagcctttcctcagtatccacaggtgacaccacgcctcttcctgtcactagcccttcctcagcatccacaggtcacaccacccctcttcctgtcaccgacacttcctcagcatccacaggtcaggccaccgctcttcctgtcaccagcacttcctcagcatccacaggtgacaccacccctcttcctgttaccgacacttcctcagcatccacaggtcaggccacccctcttcctgtcaccagcctttcctcagtatccacaggtgacaccacgcctcttcctgtcactagcccttcctcagcatccacaggtcacgccactcctcttcttgtcaccgacgcttcctcagcatccacaggtcaggccacccctcttcctgtcaccgacacttcctcagcatacacaggtgacaccacctctcttcctgtcaccgacacttcctcatcatccacaggtgacaccacccctcttcttgtcaccgagacttcctcagcatccacaggtcacgccacccctcttcatgtcaccagcccttcctcagcatccacaggtgacaccacccctgtgcctgtcaccgacacttcctcagtatccacaggtcacgccacccctcttcctgtcaccggcctttcctcagcttccacaggtgacaccacccgtcttcctgtcaccgacatttcctcggcatccacaggtcaggccacccctcttcctgtcaccaacacttcctcagcatccacaggtcacgccacccctcttcctgtcaccggcctttcctcagcttccacaggtgacaccacccgtcttcctgtcaccgacatttcctcggcatccacaggtcaggccacccctcttcctgtcaccaacacttcctcagtatccacaggtgacaccatgcctcttcctgtcactagcccttcctcagcatccacaggtcacgccacccctcttcctgtcaccagcacttcctcagcatccaccggtcacgccacccctgttcctgtcaccagcacttcctcagcatctacaggtcacaccacccctcttcctgtcaccgacacttcctcagcatccacaggtgacaccacccctcttcctgtcaccagcccttcctcagcatctacaggtcacaccacccctcttcatgtcaccatcccttcctcagcatccacaggtgacaccagcactcttcctgtcaccggcgcttcctcagcatccaccggtcacgccacccctcttcctgtcaccgacacttcctcagtatccacaggtcacgccacccctcttcctgtcaccagcttttcctcagtatccacaggtgacaccacgcctcttcctgtcaccgacacttcctcagtatccacaggtcacgccacccctcttcctgtcaccagcttttcctcagtatccacaggtgacaccacccctcttcctgtcaccgacgcttcctcggcatccaccggtcacgccacccctcttcctgtcaccgacacttcctcagtatccacaggtcacgccacccctcttcctctcaccagcctttcctcagtatccacaggtgacaccacgactcttcctgtcaccgacacttcctcagtatccacaggtcacgccacccctcttcctgtcaccagcttttcctcagtatccacaggtgacaccacccctcttcctgtcaccgacgcttcctcggcatccaccggtcacgccacccctcttcctgtcaccgacacttcctcagtatccaccggtcacgccacgcctcttcctgtcaccagcctttcctcagtatccacaggtgacaccacccctcttcctgtcaccgacgcttcctcggcatccacaggtcaggccacccctcttcctgtcaccagcctttcctcagtatcaacaggtgacaccacgcctcttcctgtcaccatcccttcctcagcatcctcaggtcacaccacctctcttcctgtcaccgacacttcctcagcatccacaggtcaggccacccctcttcctgtcaccagcctttcctcagtatccacaggtgacaccacccctcttcttgtcaccgacgcttcctcagtatccacaggtcacgccacccctcttcctgtcaccgacacttcctcagcatccacaggtgacaccacccgtcttcctgtcacagacacttcctcagcatccacaggtcaggccacccctcttcctgtcaccagcctttcctcagtatccacaggtgacaccacccctcttcttgtcaccaacacttcctcagtatccagaggtcacgccacctctcttcctgtcaccatcccttcctcatcatcctcaggtcacaccacccctcttcctgtcaccagcacttcctcagtatctacaggtcacgtcacccctcttcctgtcaccagcacttcctcagcatccacaggtcacgccacctctcttcctgtcaccgacacttcctcagtatccacaggtcacgccacctctcttcctgtcaccgacacttcctcagtatccacaggtcacgccacccctcttcctgtcaccgacgcttcctcagtgtccacaggtcacgccacgcctcttcctgtcaccgacgcttcctcagcatccacaggtgacaccacccctcttcctgtcaccaacacttcctcagcatccacaggtcaggccacccctcttcctgtcaccagcctttcctcagtatccacaggtgacaccatgcctcttcctgtcactagcccttcctcagcatccacaggtcacgccacccctcttcctgttaccggcctttcctcagcttccacaggtgacaccacccctcttcctgtcactgacacttcctcagcatccacaggtcacgtcacccctcttcctgtcaccagcctttcctcagcatccacaggtgacagcacccctcttcctgtcactgacacttcctcagcatccacaggtcacgtcacccctcttcctgtcaccagcctttcctcagcatccacaggtgacaccacccctcttcctgtcactgacacttcctcagcatccacaggtcacgccacccctcttcatgtcactgatgcttcctcagcatccacaggtcaggccacccttcttcctgtcaccagcctttcctcagtatccacaggtgacaccacgcctcttcctgtcactagcccttcctcagcatccacaggtcacgccacccctcttcttgtcaccgacacttcctcagcatccacaggacacgccacccctcttcctgtcacggacgcttcctcagtgtccacaggtcacgccacctctcttcctgtaaccatccgttcctcaggttccacaggtcacaccacccctcttcctgtcaccgacacttcctcagcatccacaggtcaggccacctctcttcttgtcaccgacacttcctcagtatccacaggtgacaccacgcctcttcctgtcactagcacttcctcagcatccacaggtcacgtcactcctcttcatgtcaccagcccttcctcagcatccacaggtcacgccacccctcttcctgtcaccagcctttcctcagcatccacaggtgacaccatgcctcttcctgtcactagcccttcctcagcatccacaggtgacaccacccctcttcctgtcaccgacgcttcctcagtatccacaggtcacaccacccctcttcctgtcaccagcccttcctcagcatctacaggtcacaccacccctcttcctgtcaccgacactacctcagcatccaaaggtgacaccacccctcttcctgtcaccagcccttcctcagcatctacaggtcacaccacccctcttcctgtcaccgacacttcctcagcatccacaggtgacaccacccctcttcctgtcaccagcccttcctcagcatccacaggtcacgccacccctcttcctgtcaccaatgcttcctcattatccacaggtcacgccacccctcttcatgtcaccagcccttcctcagcatccacaggtcacgccacccctcttcctgtcaccagcacttcctcagcatccaccggtcacgccacctctcttcctgtcaccagcacttcctcagcatccaccggtcacgccacccctcttcctgtcaccgacaattcctcagtatccacaggtcacgccacccctcttcctgtcaccggcctttcctcagctaccacagatgacaccacccgtcttcctgtcaccgacgtttcctcggcatccacaggtcaggccacccctcttcctgtcaccagcctttcctcagtatccacaggtgacaccacgcctcttcctgtcactagcccttcctcagcatccacaggtcacgccagccctcttcttgtcactgacgcttcctcagcatccacaggtcaggccacccctcttcctgtcaccgacacttcctcagtatccacagctcacgccaccccacttcctgtcaccggcctttcttcagcttccacagatgacaccacccgtcttcctgtcaccgacgtttcctcggcatccacaggtcaggccatccctcttcctgtcaccagcccttcctcagcatccacaggtgacaccacccctcttcctgtcaccgacgcttcctcagcatccacaggtgacaccacctctcttcctgtcaccatcccttcctcagcatcttcaggtcacaccacctctcttcctgtcaccgacgcttcctcagtgtccacaggtcacgccacctctcttcttgtcaccgacgcttcctcagtatccacaggtgacaccacccctcttcctgtcaccgacactaactcagcatccacaggtgacaccacccctcttcatgtcaccgacgcttcctcagtatccacaggtcacgccacctctcttcctgtcaccagcctttcctcagcatccacaggtgacaccacgcctcttcctgtcactagcccttcctcagcatcctcaggtgacaccacccctcttcctgtcaccgacacttcctcagcatccacaggtcacgccacccatcttcctgtcaccggcctttcctcagcttccacaggtgacaccacccgtcttcctgtcaccaacgtttcctcggcatccacaggtcatgccacccctcttcctgtcaccagcacttcctcagcatccacaggtgacaccacccctcttcctggcaccgacacttcctcagtatccacaggtcacaccacccctcttcttgtcaccgacgcttcgtcagtatccacaggtgacaccacccgtcttcctgtcaccagcccttcctcagcatctacaggtcacaccacccctcttcatgtcaccgatgcttcctcagtatccacaggtcacaccacccctcttcctgtcaccgacacttcctcagcatccacaggtcaggccacctctcttcttgtcaccgacacttcctcagtatccacaggtgacaccacgcctcttcctgtcactagcacttcctcagcatccacaggtcacgtcactcctcttcatgtcaccagcccttcctcagcatccacaggtcacgccacccctcttcctgtcaccagcctttcctcagcatccacaggtgacaccacccctcttcctgtcaccgacacttcctcagtatccacaggtcacaccacccctcttcctgtcaccagcccttcctcagcatctacaggtcacaccacccctcttcctgtcaccgacacttcctcagcatccaaaggtgacaccacccctcttcctgtcaccagcccttcctcagcatctacaggtcacaccacccctcttcctgtcaccgacacttcctcagcatccacaggtgacaccacccctcttcctgtcaccaatgcttcctcattatccacaggtcacgccacccctcttcatgtcaccagcccttcctcagcatccacaggtcacgccacccctcttcctgtcaccagcacttcctcagcatccaccggtcacgccacccctcttcctgtcaccagcacttcctcagcatccaccggtcacgccacccctcttcctgtcaccgacaattcctcagtatccacaggtcatgccacccctcttcctgtcaccggcctttcctcagctaccacagatgacaccacccgtcttcctgtcaccgacgtgtcctcggcatccacaggtcaggccacccctcttcctgtcaccagcctttcctcagtatccacaggtgacaccacgcctcttcctgtcactagcccttcctcagcatccacaggtcacgccagccctcttcttgtcactgacgcttcctcagcatccacaggtcaggccacccctcttcctgtcaccgacacttcctcagtatccacagctcacgccaccccacttcctgtcaccggcctttcctcagcttccacagatgacaccacccgtcttcctgtcaccgacgtttcctcggcatccacaggtcaggccatccctcttcctgtcaccagcccttcctcagcatccacaggtgacaccacccctcttcctgtcaccgacgcttcctcagcatccacaggtgacaccacctctcttcctgtcaccatcccttcctcagcatcttcaggtcacaccacctctcttcctgtcaccgacgcttcctcagtgtccacaggtcacgccacctctcttcttgtcaccgacgcttcctcagtatccacaggtgacaccacccctcttcctgtcaccgacactaactcagcatccacaggtgacaccacccctcttcatgtcaccgacgcttcctcagtatccacaggtcacgccacctctcttcctgtcaccagcctttcctcagcatccacaggtgacaccacgcctcttcctgtcactagcccttcctcagcatcctcaggtcacaccacctctcttcctgtcaccgacgcttcctcagtgtccacaggtcacgccacctctcttcctgtcaccatcccttcctcagcatcctcaggtcacaccacccctcttcctgtcaccgacgcttcctcagtacccacaggtcacgccacctctcttcctgtcaccgacgcttcctcagtgtccacaggtcacgccacccctcttcctgtcaccgacgcttcctcagtgtccacaggtcatgccacccctcttccggtcaccgacacttcctcagtatctacaggacaggccacccctcttcctgtcaccagcctttcctcagcatcatccactggtgacaccacgccgcttcctgtcactgatacttcctcagcatccacaggtcaggacacccctcttcctgtcaccagccttttctcagtatccacaggtgacaccacgcctcttcctgtcactagcccttcctcagcatccacaggtcacgccacccatcttcttgtcaccgacgcttcctcagtatccacaggtcacgccacctctcttcttgtcaccgacgcttcctcagtatccacaggtcacgccaccgctcttcatgtcaccgatgcttcctcattatccacaggggacaccacccctcttcctgtcaccagcccttcctcagcatccacaggtgacaccacccctcttcctgtcaccgacacttcctcagtatccacaggtcacgccacctctcttcctgtcactgacacttcctcagcatccacaggtcacgccacctctcttcctgtcaccgacacttcctcagcatccacaggtcaggccacccctcttcctgtcaccagcccttcctcagcatccacaggtcacgccatccctcttcttgtcaccgacacttcctcagcatccacaggacaggccacccctcttcctgtcaccagcctttcctcagcatccacaggtgacaccacccctcttcctgtcaccgatgcttcctcagtgtccacaggtcacgccacctctcttcctgtcaccagcctttcctcagtatccacaggtgacaccacccctcttcctgtcactagcccttcctcagcatccacaggtcacgccacccctcttcatgtcaccagcccttcctcagcatccacaggtcacgccacccctcttcctgtcaccagcctttcctcagcatccacaggtgacaccacgcctcttcctgtcactagcccttcctcagcatccacaggtcacgccacccctcttcatgtcaccgacgcttcctcagtatccacaggtgacaccacccctcttcctgtcaccagcccttcctcagcatcctcaggtcacaccacccctcttcctgtcaccgacgcttcctcagcatccacaggtgacaccacccctcttcctgtcaccgacacttcctcagcatccacaggtcacgccacccatcttcctgtcaccggcctttcctcagcttccacaggtgacaccacccgtcttcctgtcaccgacgtttcctcggcatccacaggtcatgccacccctcttcctgtcaccagcacttcctcagcatccacaggtgacaccacccctcttcctggcaccgacacttcctcagtatccacaggtcacaccacccctcttcttgtcaccgacgcttcgtcagtatccacaggtgacaccacccgtcttcctgtcaccagcccttcctcagcatctacaggtcacaccacccctctacctgtcaccgacactccctcagcatccacaggtgacaccacccctcttcctgtcaccaatgcttcctcattatccacacgtcacgccacctctcttcatgtcaccagcccttcctcagcatccaccggtcacgccacccctcttcctgttaccgacacttccgcagcatccacaggtcacgccacccctcttcctgtcaccagcacttcctcagcatccacaggtgacaccacccctcttcctgtcaccgacacttcctcagcatccacaggtcacgccacccctcttcctgtcaccaacacttcctcagtatccacaggtcacgccacccctcttcatgtcaccagcccttcctcagcatccacaggtcacaccacccctcttcctgtcaccgacgcttcgtcagtgtccacaggtcacgccacctctcttcctgtcaccgacgcttcctcagtgtccacaggtcacgccacccctcttcctgtcaccgacgcttcctcagtgtccacaggtcacgctacccctcttcctctcaccagcctttcctcagtatccacaggtgacaccacgcctcttcctgtcaccgacacttcctcagcatccacaggtcaggccacccctcttcctgtcaccagcctttcctcagtatccacaggtgacaccacccctcttcctgtcaccgacacttcctcagcatccacaggtcacgccacctctcttcctgtcaccgacacttcctcagcatccacaggtcacgccacccctcttcctgtcaccgacacttcctcaatatccacaggtcacgccacccctcttcatgtcaccagcccttcctcagcatccaccggtcacgccaccccgcttcctgtcaccgacacttcctcagcatccacaggtcacgccacccctcttcctgtcaccagcctttcctcagtatccacaggtgacaccacgcctcttcctgtcactagcccttcctcagcatccacaggtcacgccactcctcttcttgtcaccgacgcttcctcagcatccacaggtcaggccacccctcttcctgtcaccagcctttcctcagtatccacaggtgacaccacgcctcttcctgtcactagcccttcctcagcatccaccggtcatgccacctctcttcctgtcaccgacacttcctcagcatccacaggtgacaccacctctcttcctgtcaccgacacttcctcagcatacacaggtgacaccacctctcttcctgtcaccgacacttcctcatcatccacaggtgacaccacccctcttcttgtcaccgagacttcctcagcatccacaggtgacaccacccctgtgcctgtcaccgacacttcctcagtatccacaggtcacgccacccctcttcctgtcaccggcctttcctcagcttccacaggtgacaccacccgtcttcctgtcaccgacatttcctcggcatccacaggtcaggccacccctcttcctgtcaccaacacttcctcagtatccacaggtgacaccatgcctcttcctgtcactagcccttcctcagcatccacaggtcacgccacccctcttcctgtcaccagcacttcctcagcatccaccggtcacgccacccctgttcctgtcaccagcacttccttagcatccacaggtcacaccacccctcttcctgtcaccagcccttcctcagcatctacaggtcacaccacccctcttcctgtcaccgacacttcctcagcatccacaggtgacaccacccctcttcctgtcaccaatgcttcctcattatccacaggacacaccacccctcttcatgtcaccatcccttcctcagcatccacaggtgacaccagcactcttcctgtcaccggcgcttcctcagcatccaccggtcacgccacccctcttcctgtcaccgacacttcctcagtatccacaggtcacgccacccctcttcctgtcaccagcttttcctcagtatccacaggtgacaccacccctcttcctgtcaccgacgcttcctcggcatccaccggtcacgccacccctcttcctgtcaccgacacttcctcagcatccacaggtgacaccacccctcttcctgtcaccgacgcttcctcggcatccacaggtcaggccacccctcttcctgtcaccagcctttcctcagtatcaacaggtgacaccacgcctcttcctgtcaccatcccttcctcagcatcctcaggtcacaccacctctcttcctgtcagcgacacttcctcagcatccacaggtcaggccacccctcttcctgtcaccagcctttcctcagtatccacaggtgacaccacccctcttcttgtcaccgacgcttcctcagtatccacaggtcacgccacccctcttcctgtcaccgacacttcctcagcatccacaggtgacaccacccgtcttcctgtcacggacacttcctcagcatccacaggtcaggccacccctcttcctgtcaccagcctttcctcagtatccacaggtgacaccacccctcttcttgtcaccaacacttcctcagtatccacaggtcacgccacctctcttcctgtcaccatcccttcctcatcatcctcaggtcacaccacccctcttcctgtcaccagcacttcctcagtatctacaggtcacgtcacccctcttcatgtcaccagcccttcctcatcatccacaggtcaggccacccctcttcctgtcaccagcacttcctcagtatctacaggtcacgtcacccctcttcatgtcaccagcccttcctcagcatccacaggtcacgccacccctcttcctgtcaccagcacttcctcagcatccacaggtcacgccacccctcttcctgtcaccgacgcttcctcagtgtccacaggtcacgccacgcctcttcctgtcaccgacacttcctcagcatccacaggtgacaccacccctcttcctgtcaccgacacttcctcagcatccacaggtcaggccacccctcttcctgtcaccagcctttcctcagtatccacaggtcacgccacccctcttgctgtcagcagtgctacctcagcttccacagtatcctcggactcccctctgaagatggaaacatcaggaatgacaacaccgtcactgaagacagacggtgggagacgcacagccacatcaccaccccccacaacctcccagaccatcatttccaccattcccagcactgccatgcacacccgctccacagctgcccccatccccatcctgcctgagagaggtgaggccatacaggagtttccctcttcccctatggggcagacgccggggacctggagttcgtcaggaggaccgtggacttcacctccccactcttcaagccggcgactggcttcccccttggctcctctctccgtgattccctctacttcacagacaatggccagatcatcttcccagagtcagactaccagattttctcctaccccaacccactcccaacaggcttcacaggccgggaccctgtggccctggtggctccgttctgggacgatgctgacttctccactggtcgggggaccacattttatcaggaatacgagacgttctatggtgaacacagcctgctagtccagcaggccgagtcttggattagaaagatgacaaacaacgggggctacaaggccaggtgggccctaaaggtcacgtgggtcaatgcccacgcctatcctgcccagtggaccctcgggagcaacacctaccaagccatcctctccacggacgggagcaggtcctatgccctgtttctctaccagagcggtgggatgcagtgggacgtggcccagcgctcaggcaacccggtgctcatgggcttctctagtggagatggctatttcgaaaacagcccactgatgtcccagccagtgtgggagaggtatcgccctgatagattcctgaattccaactcaggcctccaagggctgcagttctacaggctacaccgggaagaaaggcccaactaccgtctcgagtgcctgcagtggctgaagagccagcctcggtggcccagctggggctggaaccaggtctcctgcccttgttcctggcagcagggacgacgggacttacgattccaacccgtcagcataggtcgctggggcctcggcagtaggcagctgtgcagcttcacctcttggcgaggaggcgtgtgctgcagctacgggccctggggagagtttcgtgaaggctggcacgtgcagcgtccttggcagttggcccaggaactggagccacagagctggtgctgccgctggaatgacaagccctacctctgtgccctgtaccagcagaggcggccccacgtgggctgtgctacatacaggcccccacagcccgcctggatgttcggggacccccacatcaccaccttggatggtgtcagttacaccttcaatgggctgggggacttcctgctggtcggggcccaagacgggaactcctccttcctgcttcagggccgcaccgcccagactggctcagcccaggccaccaacttcatcgcctttgcggctcagtaccgctccagcagcctgggccccgtcacggtccaatggctccttgagcctcacgacgcaatccgtgtcctgctggataaccagactgtgacatttcagcctgaccatgaagacggcggaggccaggagacgttcaacgccaccggagtcctcctgagccgcaacggctctgaggtctcggccagcttcgacggctgggccaccgtctcggtgatcgcgctctccaacatcctccacgcctccgccagcctcccgcccgagtaccagaaccgcacggaggggctcctgggggtctggaataacaatccagaggacgacttcaggatgcccaatggctccaccattcccccagggagccctgaggagatgcttttccactttggaatgacctggcagatcaacgggacaggcctccttggcaagaggaatgaccagctgccttccaacttcacccctgttttctactcacaactgcaaaaaaacagctcctgggctgaacatttgatctccaactgtgacggagatagctcatgcatctatgacaccctggccctgcgcaacgcaagcatcggacttcacacgagggaagtcagtaaaaactacgagcaggcgaacgccaccctcaatcagtacccgccctccatcaatggtggtcgtgtgattgaagcctacaaggggcagaccacgctgattcagtacaccagcaatgctgaggatgccaacttcacgctcagagacagctgcaccgacttggagctctttgaaccagtcctgccctgtgaattactgctacaatcaaggccactgctacatctcccagactctgggctgtcagcccatgtgcacctgccccccagccttcactgacagccgctgcttcctggctgggaacaacttcagtccaactgtcaacctagaacttcccttaagagtcatccagctcttgctcagtgaagaggaaaatgcctccatggcagaagtcaacgcctcggtggcatacagactggggaccctggacatgcgggcctttctccgcaacagccaagtggaacgaatcgattctgcagcaccggcctcgggaagccccatccaacactggatggtcatctcggagttccagtaccgccctcggggcccggtcattgacttcctgaacaaccagctgctggccgcggtggtggaggcgttcttataccacgttccacggaggagtgaggagcccaggaacgacgtggtcttccagcccatctccggggaagacgtgcgcgatgtgacagccctgaacgtgagcacgctgaaggcttacttcagatgcgatggctacaagggctacgacctggtctacagcccccagagcggcttcacctgcgtgtccccgtgcagtaggggctactgtgaccatggaggccagtgccagcacctgcccagtgggccccgctgcagctgtgtgtccttctccatctacacggcctggggcgagcactgtgagcacctgagcatgaaactcgacgcgttcttcggcatcttctttggggccctgggcggcctcttgctgctgggggtcgggacgttcgtggtcctgcgcttctggggttgctccggggccaggttctcctatttcctgaactcagctgaggccttgccttgaaggggcagctgtggcctaggctacctcaagactcacctcatccttaccgcacatttaaggcgccattgcttttgggagactggaaaagggaaggtgactgaaggctgtcaggattctt

SEQ ID NO: 155709 - DNA, 3923 bp, Homo sapiens
  Payload ID: 10597
  Gene Symbol: MUC4
  Gene Name: mucin 4, cell surface associated
  ENST ID: ENST00000630917
  CDS Start-End: 1-473
gaatgacaacaccgtcactgaagacagacggtgggagacgcacagccacatcaccaccccccacaacctcccagaccatcatttccaccattcccagcactgccatgcacacccgctccacagctgcccccatccccatcctgcctgagagaggtgaggccatacaggagtttccctcttcccctatggggcagacgccggggacctggagttcgtcaggaggaccgtggacttcacctccccactcttcaagccggcgactggcttcccccttggctcctctctccgtgattccctctacttcacagacaatggccagatcatcttcccagagtcagactaccagattttctcctaccccaacccactcccaacaggcttcacaggccgggaccctgtggccctggtggctccgttctgggacgatgctgacttctccactggtcgggggaccacattttatcaggctgtagggggtctatcctaacaagagtgagtcaagagggcccgtcctgtgctcctggactgggtgaataactccaatcagaggaaatgtgatgaaagctactgcaggaagtgtggaccgtgcccctgccacggacagggcagtgtggaggctccaagaggaagagactcacgcctgttctcaagaagctgcagattaggcatggggaggaatacgagacgttctatggtgaacacagcctgctagtccagcaggccgagtcttggattagaaagatgacaaacaacgggggctacaaggccaggtgggccctaaaggtcacgtgggtcaatgcccacgcctatcctgcccagtggaccctcgggagcaacacctaccaagccatcctctccacggacgggagcaggtcctatgccctgtttctctaccagagcggtgggatgcagtgggacgtggcccagcgctcaggcaacccggtgctcatgggcttctctagtggagatggctatttcgaaaacagcccactgatgtcccagccagtgtgggagaggtatcgccctgatagattcctgaattccaactcaggcctccaagggctgcagttctacaggctacaccgggaagaaaggcccaactaccgtctcgagtgcctgcagtggctgaagagccagcctcggtggcccagctggggctggaaccaggtctcctgcccttgttcctggcagcagggacgacgggacttacgattccaacccgtcagcataggtcgctggggcctcggcagtaggcagctgtgcagcttcacctcttggcgaggaggcgtgtgctgcagctacgggccctggggagagtttcgtgaaggctggcacgtgcagcgtccttggcagttggcccaggaactggagccacagagctggtgctgccgctggaatgacaagccctacctctgtgccctgtaccagcagaggcggccccacgtgggctgtgctacatacaggcccccacagcccgcctggatgttcggggacccccacatcaccaccttggatggtgtcagttacaccttcaatgggctgggggacttcctgctggtcggggcccaagacgggaactcctccttcctgcttcagggccgcaccgcccagactggctcagcccaggccaccaacttcatcgcctttgcggctcagtaccgctccagcagcctgggccccgtcacggtccaatggctccttgagcctcacgacgcaatccgtgtcctgctggataaccagactgtgacatttcagcctgaccatgaagacggcggaggccaggagacgttcaacgccaccggagtcctcctgagccgcaacggctctgaggtctcggccagcttcgacggctgggccaccgtctcggtgatcgcgctctccaacatcctccacgcctccgccagcctcccgcccgagtaccagaaccgcacggaggggctcctgggggtctggaataacaatccagaggacgacttcaggatgcccaatggctccaccattcccccagggagccctgaggagatgcttttccactttggaatgacctggcagatcaacgggacaggcctccttggcaagaggaatgaccagctgccttccaacttcacccctgttttctactcacaactgcaaaaaaacagctcctgggctgaacatttgatctccaactgtgacggagatagctcatgcatctatgacaccctggccctgcgcaacgcaagcatcggacttcacacgagggaagtcagtaaaaactacgagcaggcgaacgccaccctcaatcagtacccgccctccatcaatggtggtcgtgtgattgaagcctacaaggggcagaccacgctgattcagtacaccagcaatgctgaggatgccaacttcacgctcagagacagctgcaccgacttggagctctttgagaatgggacgttgctgtggacacccaagtcgctggagccattcactctggagattctagcaagaagtgccaagattggcttggcatctgcactccagcccaggactgtggtctgccattgcaatgcagagagccagtgtttgtacaatcagaccagcagggtgggcaactcctccctggagctctggggagctctttcctgtgtcagaaccagtcctgccctgtgaattactgctacaatcaaggccactgctacatctcccagactctgggctgtcagcccatgtgcacctgccccccagccttcactgacagccgctgcttcctggctgggaacaacttcagtccaactgtcaacctagaacttcccttaagagtcatccagctcttgctcagtgaagaggaaaatgcctccatggcagaagtcaacgcctcggtggcatacagactggggaccctggacatgcgggcctttctccgcaacagccaagtggaacgaatcgattctgcagcaccggcctcgggaagccccatccaacactggatggtcatctcggagttccagtaccgccctcggggcccggtcattgacttcctgaacaaccagctgctggccgcggtggtggaggcgttcttataccacgttccacggaggagtgaggagcccaggaacgacgtggtcttccagcccatctccggggaagacgtgcgcgatgtgacagccctgaacgtgagcacgctgaaggcttacttcagatgcgatggctacaagggctacgacctggtctacagcccccagagcggcttcacctgcgtgtccccgtgcagtaggggctactgtgaccatggaggccagtgccagcacctgcccagtgggccccgctgcagctgtgtgtccttctccatctacacggcctggggcgagcactgtgagcacctgagcatgaaactcgacgcgttcttcggcatcttctttggggccctgggcggcctcttgctgctgggggtcgggacgttcgtggtcctgcgcttctggggttgctccggggccaggttctcctatttcctgaactcagctgaggccttgccttgaaggggcagctgtggcctaggctacctcaagactcacctcatccttaccgcacatttaaggcgccattgcttttgggagactggaaaagggaaggtgactgaaggctgtcaggattcttcaaggagaatgaatactgggaatcaagacaagactataccttatccataggcgcaggtgcacagggggaggccataaagatcaaacatgcatggatgggtcctcacgcagacacacccacagaaggacactagcctgtgcacgcgcgcgtgcacacacacacacacacacacgagttcataatgtggtgatggccctaagttaagcaaaatgcttctgcacacaaaactctctggtttacttcaaattaactctatttaaataaagtctctctgactttttgtgtctccaaaa

SEQ ID NO: 155710 - DNA, 16408 bp, Homo sapiens
  Payload ID: 10597
  Gene Symbol: MUC4
  Gene Name: mucin 4, cell surface associated
  ENST ID: ENST00000626427
  CDS Start-End: 1-15131
gaaccacagaggacacattaataactggaagtaaaactgctgccccagtcacctcaacaggctcaacaacagcgacactagagggacaatcaactgcagcttcttcaaggacctctaatcaggacatatcagcttcatctcagaaccaccagactaagagcacggagaccaccagcaaagctcaaaccgacaccctcacgcagatgatgacatcaactcttttttcttccccaagtgtacacaatgtgatggagacagctcctccagatgaaatgaccacatcatttccctccagtgtcaccaacacactcatgatgacatcaaagactataacaatgacaacctccacagactccactcttggaaacacagaagagacatcaacagcaggaactgaaagttctaccccagtgacctcagcagtctcaataacagctggacaggaaggacaatcacgaacaacttcctggaggacctctatccaagacacatcagcttcttctcagaaccactggactcggagcacgcagaccaccagggaatctcaaaccagcaccctaacacacagaaccacttcaactccttctttctctccaagtgtacacaatgtgacagggactgtttctcagaagacatctccttcaggtgaaacagctacctcatccctctgtagtgtcacaaacacatccatgatgacatcagagaagataacagtgacaacctccacaggctccactcttggaaacccaggggagacatcatcagtacctgttactggaagtcttatgccagtcacctcagcagccttagtaacatttgatccagaaggacaatcaccagcaactttctcaaggacttctactcaggacacaacagctttttctaagaaccaccagactcagagcgtggagaccaccagagtatctcaaatcaacaccctcaacaccctcacaccggttacaacatcaactgttttatcctcaccaagtggattcaacccaagtggaacagtttctcaggagacattcccttctggtgaaacaaccacctcatccccttccagtgtcagcaatacattcctggtaacatcaaaggtgttcagaatgccaacctccagagactctactcttggaaacacagaggagacatcactatctgtaagtggaaccatttctgcaatcacttccaaagtttcaaccatatggtggtcagacactctgtcaacagcactctcccccagttctctacctccaaaaatatccacagctttccacacccagcagagtgaaggtgcagagaccacaggacggcctcatgagaggagctcattctctccaggtgtgtctcaagaaatatttactctacatgaaacaacaacatggccttcctcattctccagcaaaggccacacaacttggtcacaaacagaactgccctcaacatcaacaggtgctgccactaggcttgtcacaggaaatccatctacagggacagctggcactattccaagggtcccctctaaggtctcagcaataggggaaccaggagagcccaccacatactcctcccacagcacaactctcccaaaaacaacaggggcaggcgcccagacacaatggacacaagaaacggggaccactggagaggctcttctcagcagcccaagctacagtgtgactcagatgataaaaacggccacatccccatcttcttcacctatgctggatagacacacatcccaacaaattacaacggcaccatcaacaaatcattcaacaatacattccacaagcacctctcctcaggaatcaccagctgtttcccaaaggggtcacactcaagccccgcagaccacacaagaatcacaaaccacgaggtccgtctcccccatgactgacaccaagacagtcaccaccccaggttcttccttcacagccagtgggcactcgccctcagaaattgttcctcaggacgcacccaccataagtgcagcaacaacctttgccccagctcccaccggggatggtcacacaacccaggccccgaccacagcactgcaggcagcacccagcagccatgatgccaccctggggccctcaggaggcacgtcactttccaaaacaggtgcccttactctggccaactctgtagtgtcaacaccagggggcccagaaggacaatggacatcagcctctgccagcacctcacctgacacagcagcagccatgacccatacccaccaggctgagagcacagaggcctctggacaaacacagaccagcgaaccggcctcctcagggtcacgaaccacctcagcgggcacagctaccccttcctcatccggggcgagtggcacaacaccttcaggaagcgaaggaatatccacctcaggagagacgacaaggttttcatcaaacccctccagggacagtcacacaacccagtcaacaaccgaattgctgtccgcctcagccagtcatggtgccatcccagtaagcacaggaatggcgtcttcgatcgtccccggcacctttcatcccaccctctctgaggcctccactgcagggagaccgacaggacagtcaagcccaacttctcccagtgcctctcctcaggagacagccgccatttcccggatggcccagactcagaggacaagaaccagcagagggtctgacactatcagcctggcgtcccaggcaaccgacaccttctcaacagtcccacccacacctccatcgatcacatccactgggcttacatctccacaaaccgagacccacactctgtcaccttcagggtctggtaaaaccttcaccacggccctcatcagcaacgccacccctcttcctgtcacctacgcttcctcggcatccacaggtcacaccacccctcttcatgtcaccgatgcttcctcagtatccacaggtcacgccacccctcttcctgtcaccagcccttcctcagtatccacaggtcacaccacccctcttcctgtcaccgacacttcctcagaatccacaggtcacgtcacccctcttcctgtcaccagcttttcctcagcatccacaggtgacagcacccctcttcctgtcactgacacttcctcagcatccacaggtcacgtcacccctcttcctgtcaccagcctttcctcagcatccacaggtgacaccacccctcttcctgtcactgacacttcctcagcatccacaggtcacgccacctctcttcctgtcaccgacacttcctcagtatccacaggtcacaccacccctcttcctgtcaccgacacttcctcagcatccacaggtcacgccacctctcttcctgtcaccgacacttcctcagtatccacaggtcacaccacccctcttcatgtcactgatgcttcctcagcatccacaggtcaggccacccctcttcctgtcaccagcctttcctcagtatccacaggtgacaccacgcctcttcctgtcactagcccttcctcagcatccacaggtcacgccacccctcttcttgtcaccgacacttcctcagcatccacaggacacgccacccctcttcctgtcaccgacgcttcctcagtgtccacagatcacgccacctctcttcctgtaaccatcccttccgcagcatccacaggtcacaccacccctcttcctgtcaccgacacttcctcagcatccacaggtcaggccacctctcttcttgtcaccgacacttcctcagtatccacaggtgacaccacgcctcttcctgtcactagcacttcctcagcatccacaggtcacgtcactcctcttcatgtcaccagcccttcctcagcatccacaggtcacgccacccctcttcctgtcaccagcctttcctcagcatccacaggtgacaccatgcctcttcctgtcactagcccttcctcagcatccacaggtgacaccacccctcttcctgtcaccgacgcttcctcagtatccacaggtcacaccacccctcttcatgtcactgatgcttcctcagcatccacaggtcaggccacccctcttcctgtcaccagcctttcctcagtatccacaggtgacaccacgcctcttcctgtcactagcccttcctcagcatccacaggtcacgccacccctcttcttgtcaccgacacttcctcagcatccacaggacacgccacccctcttcctgtcaccgacgcttcctcagtgtccacagatcacgccacctctcttcctgtaaccatcccttccgcagcatccacaggtcacaccacccctcttcctgtcaccgacacttcctcagcatccacaggtcaggccacctctcttcttgtcaccgacacttcctcagtatccacaggtgacaccacgcctcttcctgtcactagcacttcctcagcatccacaggtcacgtcactcctcttcatgtcaccagcccttcctcagcatccacaggtcacgccacccctcttcctgtcaccagcctttcctcagcatccacaggtgacaccatgcctcttcctgtcactagcccttcctcagcatccacaggtgacaccacccctcttcctgtcaccgacgcttcctcagtatccacaggtcacaccacccctcttcctgtcaccagcccttcctcagcatctacaggtcacaccacccctcttcctgtcaccgacacttcctcagcatccaaaggtgacaccacccctcttcctgtcaccagcccttcctcagcatctacaggtcacaccacccctcttcctgtcaccgacacttcctcagcatccacaggtgacaccacccctcttcctgtcaccaatgcttcctcattatccacaggtcacgccacccctcttcatgtcaccagcccttcctcagcatccacaggtcacgccacccctcttcctgtcaccagcacttcctcagcatccaccggtcacgccacccctcttcctgtcaccggcctttcctcagctaccacagatgacaccacccgtcttcctgtcaccgacgtttcctcggcatccacaggtcaggccacccctcttcctgtcaccagcctttcctcagtatccacaggtgacaccacgcctcttcctgtcactagcccttcctcagcatccacaggtcacgccagccctcttcttgtcactgacgcttcctcagcatccacaggtcaggccacccctcttcctgtcaccgacacttcctcagtatccacagctcacgccaccccacttcctgtcaccggcctttcttcagcttccacagatgacaccacccgtcttcctgtcaccgacgtttcctcggcatccacaggtcaggccatccctcttcctgtcaccagcccttcctcagcatccacaggtgacaccacccctcttcctgtcaccgacgcttcctcagcatccacaggtgacaccacctctcttcctgtcaccatcccttcctcagcatcttcaggtcacaccacctctcttcctgtcaccgacgcttcctcagtgtccacaggtcacgccacctctcttcttgtcaccgacgcttcctcagtatccacaggtgacaccacccctcttcctgtcaccgacactaactcagcatccacaggtgacaccacccctcttcatgtcaccgacgcttcctcagtatccacaggtcacgccacctctcttcctgtcaccagcctttcctcagcatccacaggtgacaccacgcctcttcctgtcactagcccttcctcagcatcctcaggtcacaccacccctcttcctgtcaccgacgcttcctcagtacccacaggtcacgccacctctcttcctgtcaccgacgcttcctcagtgtccacaggtcacgccacccctcttcctgtcaccgacgcttcctcagtgtccacaggtcatgccacccctcttccggtcaccgacacttcctcagtatctacaggacaggccacccctcttcctgtcaccagcctttcctcagcatccactggtgacaccacgccgcttcctgtcaccgatacttcctcagcatccacaggtcaggacacccctcttcctgtcaccagcctttcctcagtatccacaggtgacaccacgcctcttcctgtcactaacccttcctcagcatccacaggtcacgccacccctcttcttgtcaccgacgcttcctcaatatccacaggtcacgccacctctcttcttgtcaccgacgcttcctcagtatccacaggtcacgccaccgctcttcatgacaccgatgcttcctcattatccacaggggacaccacccctcttcctgtcaccagcccttcctcaacatccacaggtgacaccacccctcttcctgtcaccgaaacttcctcagtatccacaggtcacgccacctctcttcctgtcaccgacacttcctcagcatccacaggtcacgccacctctcttcctgtcaccgacacttcctcagcatccacaggtcacgccacccctcttcctgtcaccgacacttcctcagcatccacaggtcaggccacccctcttcctgtcaccagcccttcctcagcatccacaggtcacgccatccctcttcttgtcaccgacacttcctcagcatccacaggacaggccacccctcttcctgtcaccagcctttcctcagcatccacaggtgacaccacccctcttcctgtcaccgacgcttcctcagtgtccacaggtcacgccacctctcttcctgtcaccagcctttcctcagtatccacaggtgacaccactcctcttcctgtcactagcccttcctcagcatccacaggtcacgccacccctcttcatgtcaccgacgcttcctcagcatccacaggtcacgccacccctcttcctgtcaccagcctttcctcagcatccacaggtgacaccacgcctcttcctgtcactagcccttcctcagcatccacaggtcacgccacccctcttcatgtcaccgacgcttcctcagtatccacaggtgacaccacccctcttcctgtcaccagctcttcctcagcatcctcaggtcacaccacccctcttcctgtcaccgacgcttcctcagcatccacaggtgacaccacccctcttcctgtcaccgacacttcctcagcatccacaggtcacgccacccatcttcctgtcaccggcctttcctcagcttccacaggtgacaccacccgtcttcctgtcaccaacgtttcctcggcatccacaggtcatgccacccctcttcctgtcaccagcacttcctcagcatccacaggtgacaccacccctcttcctggcaccgacacttcctcagtatccacaggtcacaccacccctcttcttgtcaccgacgcttcgtcagtatccacaggtgacaccacccgtcttcctgtcaccagcccttcctcagcatctacaggtcacaccacccctctacctgtcaccgacactccctcagcatccacaggtgacaccacccctcttcctgtcaccaatgcttcctcattatccacacgtcacgccacctctcttcatgtcaccagcccttcctcagcatccacaggtcacgccacctctcttcctgtcaccgacacttccgcagcatccacaggtcacgccacccctcttcctgtcaccagcacttcctcagcatccacaggtgacaccacccctcttcctgtcaccgacacttactcagcatccacaggtcaggccacccctcttcctgtcaccagcctttcctcagtatccacaggtgacaccacgcctcttcctgtcactagcccttcctcagcatccacaggtcacgccactcctcttcttgtcaccgacgcttcctcagcatccacaggtcaggccacccctcttcctgtcaccagcctttcctcagtatccacaggtgacaccacgcctcttcctgtcactagcccttcctcagcatccaccggtcatgccacctctcttcctgtcaccgacacttcctcagcatccacaggtgacaccacctctcttcctgtcaccgacacttcctcagcatacacaggtgacaccacctctcttcctgtcaccgacacttcctcatcatccacaggtgacaccacccctcttcttgtcaccgagacttcctcagtatccacaggtgacaccacccctcttcctgtcaccgacacttcctcagcatccacaggtcacgccacccctcttcctgtcaccaacacttcctcagtatccacaggtcacgccacccctcttcatgtcaccagcccttcctcagcatccacaggtcacaccacccctcttcctgtcaccgacgcttcgtcagtgtccacaggtcacgccacctctcttcctgtcaccgacgcttcctcagtgttcacaggtcatgccacctctcttcctgtcaccatcccttcctcagcatcctcaggtcacaccacccctcttcctgtcaccgacgcttcctcagtgtccacaggtcacgccacctctcttcctgtcaccgacgcttcctcagtgtccacaggtcatgccacccctcttcctgtcaccgacgcttcctcagtgtccacaggtcacgctacccctcttcctctcaccagcctttcctcagtatccacaggtgacaccacgcctcttcctgtcaccgacacttcctcagcatccacaggtcaggccacccctcttcctgtcaccagcctttcctcagtatccacaggtgacaccacccctcttcctgtcaccgacacttcctcagcatccacaggtcacgccacctctcttcctgtcaccgacacttcctcagcatccacaggtcacgccacccctcttcctgacaccgacacttcctcagcatccacaggtcacgccacccttcttcctgtcaccgacacttcctcagcatccataggtcacgccacctctcttcctgtcaccgacacttcctcaatatccacaggtcacgccacccctcttcatgtcaccagcccttcctcagcatccaccggtcacgccaccccgcttcctgtcaccgacacttcctcagcatccacaggtcacgccaaccctcttcatgtcaccagcccttcctcagcatccaccggtcacgccaccccgcttcctgtcaccgacacttcctcagcatccacaggtcacgccacccctcttcctgtcaccagcctttcctcagtatccacaggtgacaccacgcctcttcctgtcactagcccttcctcagcatccacaggtcacaccacccctcttcctgtcaccgacacttcctcagcatccacaggtcaggccaccgctcttcctgtcaccagcacttcctcagcatccacaggtgacaccacccctcttcctgtcaccgacacttcctcagcatccacaggtcaggccacccctcttcctgtcaccagcctttcctcagtatccacaggtgacaccacgcctcttcctgtcactagcccttcctcagcatccacaggtcacgccactcctcttcttgtcaccgacgcttcctcagcatccacaggtcaggccacccctcttcctgtcaccagcctttcctcagtatccacaggtgacaccacgcctcttcctgtcactagcccttcctcagcatccaccggtcatgccacctctcttcctgtcaccgacacttcctcagcatccacaggtgacaccacctctcttcctgtcaccgacacttcctcagcatacacaggtgacaccacctctcttcctgtcaccgacacttcctcatcatccacaggtgacaccacccctcttcttgtcaccgagacttcctcagtatccacaggtcacgccactcctcttcttgtcaccgacgcttcctcagcatccacaggtcacgccacccctcttcatgtcaccagcccttcctcagcatccacaggtgacaccacccctgtgcctgtcaccgacacttcctcagtatccacaggtcacgccacccctcttcctgtcaccggcctttcctcagcttccacaggtgacaccacccgtcttcctgtcaccgacatttcctcggcatccacaggtcaggccacccctcttcctgtcaccaacacttcctcagtatccacaggtgacaccatgcctcttcctgtcactagcccttcctcagcatccacaggtcacgccacccctcttcctgtcaccagcacttcctcagcatccaccggtcacgccacccctgttcctgtcaccagcacttcctcagcatctacaggtcacaccacccctcttcctgtcaccgacacttcctcagcatccacaggtgacaccacccctcttcctgtcaccagcccttcctcagcatctacaggtcacaccacccctcttcatgtcaccatcccttcctcagcatccacaggtgacaccagcactcttcctgtcaccggcgcttcctcagcatccaccggtcacgccacccctcttcctgtcaccgacacttcctcagtatccaccggtcacgccacgcctcttcctgtcaccagcctttcctcagtatccacaggtgacaccacccctcttcctgtcaccgacgcttcctcggcatccacaggtcaggccacccctcttcctgtcaccagcctttcctcagtatccacaggtgacaccacccctcttcttgtcaccgacgcttcctcagtatccacaggtcacgccacccctcttcctgtcaccgacacttcctcagcatccacaggtgacaccacccgtcttcctgtcacggacacttcctcagcatccacaggtcaggccacccctcttcctgtcaccagcctttcctcagtatccacaggtgacaccacccctcttcttgtcaccgacgcttcctcagtatccacaggtcacgccacccctcttcctgtcaccgacacttcctcagcatccacaggtgacaccacccgtcttcctgtcacggacacttcctcagcatccacaggtcaggccacccctcttcctgtcaccatcccttcctcatcatcctcaggtcacaccacccctcttcctgtcaccagcacttcctcagtatctacaggtcacgtcacccctcttcatgtcaccagcccttcctcagcatccacaggtcacgtcacccctcttcctgtcaccagcacttcctcagcatccacaggtcacgccacccctcttcttgtcaccgacgcttcctcagtgtccacaggtcacgccacgcctcttcctgtcaccgacgcttcctcagcatccacaggtgacaccacccctcttcctgtcaccgacacttcctcagcatccacaggtcaggccacccctcttcctgtcaccagcctttcctcagtatccacaggtgacaccacccctcttcctgtcaccgacgcttcctcagcatccacaggtcacgccacccctcttcctgtcaccatcccttcctcagtatccacaggtgacaccatgcctcttcctgtcactagcccttcctcagcatccacaggtcacgccacccctcttcctgttaccggcctttcctcagcttccacaggtgacaccacccctcttcctgtcaccgacacttcctcagcatccacacgtcacgccacccctcttcctgtcaccgacacttcctcagcttccacagatgacaccacccgtcttcctgtcaccgacgtttcctcggcatccacaggacatgccacccctcttcctgtcaccagcacttcctcagcatccacaggtgacaccacccctcttcctgtcaccgacacttcctcagtatccacaggtcacgccacctctcttcctgtcaccagccgttcctcagcatccacaggtcacgccaccccccttcctgtcaccgacacttcctcagtatccacaggtcacgccacccctcttcctgtcaccagcacttcctcagtatctacaggtcacgccacccctcttcctgtcaccagcccttcctcagcatccacaggtcacgccacccctgttcctgtcaccagcacttcctcagcatccacaggtgacaccacccctcttcctgtcaccaatgcttcctcattatccacaggtcacgccacccctcttcatgtcaccagcccttcctcagcatccagaggtgacaccagcactcttcctgtcaccgatgcttcctcagcatccaccggtcacgccacccctcttcctctcaccagcctttcctcagtatccacaggtgacaccacgcctcttcctgtcaccgacacttcctctgcatccacaggtcaggccacccctcttcctgtcaccagcctttcctcagtatccacaggtgacaccacgcctcttcctgtcaccatcccttcctcagcatcctcaggtcacaccacctctcttcctgtcaccgacgcttcctcagtgtccacaggtcacggcacccctcttcctgtcaccagcacttcctcagcatccacaggtgacaccacccctcttcctgtcaccgacacttcctcagcatccacaggtcacgccacccctcttcctgtcaccgacacttcctcagcatccacaggtcacgccacccctcttcctgtcaccagcctttcctcagtatccacaggtcacgccacccctcttgctgtcagcagtgctacctcagcttccacagtatcctcggactcccctctgaagatggaaacaccaggaatgacaacaccgtcactgaagacagacggtgggagacgcacagccacatcaccaccccccacaacctcccagaccatcatttccaccattcccagcactgccatgcacacccgctccacagctgcccccatccccatcctgcctgagagaggagtttccctcttcccctatggggcaggcgccggggacctggagttcgtcaggaggaccgtggacttcacctccccactcttcaagccggcgactggcttcccccttggctcctctctccgtgattccctctacttcacagacaatggccagatcatcttcccagagtcagactaccagattttctcctaccccaacccactcccaacaggcttcacaggccgggaccctgtggccctggtggctccgttctgggacgatgctgacttctccactggtcgggggaccacattttatcaggaatacgagacgttctatggtgaacacagcctgctagtccagcaggccgagtcttggattagaaagatgacaaacaacgggggctacaaggccaggtgggccctaaaggtcacgtgggtcaatgcccacgcctatcctgcccagtggaccctcgggagcaacacctaccaagccatcctctccacggacgggagcaggtcctatgccctgtttctctaccagagcggtgggatgcagtgggacgtggcccagcgctcaggcaacccggtgctcatgggcttctctagtggagatggctatttcgaaaacagcccactgatgtcccagccagtgtgggagaggtatcgccctgatagattcctgaattccaactcaggcctccaagggctgcagttctacaggctacaccgggaagaaaggcccaactaccgtctcgagtgcctgcagtggctgaagagccagcctcggtggcccagctggggctggaaccaggtctcctgcccttgttcctggcagcagggacgacgggacttacgattccaacccgtcagcataggtcgctggggcctcggcagtaggcagctgtgcagcttcacctcttggcgaggaggcgtgtgctgcagctacgggccctggggagagtttcgtgaaggctggcacgtgcagcgtccttggcagttggcccaggaactggagccacagagctggtgctgccgctggaatgacaagccctacctctgtgccctgtaccagcagaggcggccccacgtgggctgtgctacatacaggcccccacagcccgcctggatgttcggggacccccacatcaccaccttggatggtgtcagttacaccttcaatgggctgggggacttcctgctggtcggggcccaagacgggaactcctccttcctgcttcagggccgcaccgcccagactggctcagcccaggccaccaacttcatcgcctttgcggctcagtaccgctccagcagcctgggccccgtcacggtccaatggctccttgagcctcacgacgcaatccgtgtcctgctggataaccagactgtgacatttcagcctgaccatgaagacggcggaggccaggagacgttcaacgccaccggagtcctcctgagccgcaacggctctgaggtctcggccagcttcgacggctgggccaccgtctcggtgatcgcgctctccaacatcctccacgcctccgccagcctcccgcccgagtaccagaaccgcacggaggggctcctgggggtctggaataacaatccagaggacgacttcaggatgcccaatggctccaccattcccccagggagccctgaggagatgcttttccactttggaatgacctggcagatcaacgggacaggcctccttggcaagaggaatgaccagctgccttccaacttcacccctgttttctactcacaactgcaaaaaaacagctcctgggctgaacatttgatctccaactgtgacggagatagctcatgcatctatgacaccctggccctgcgcaacgcaagcatcggacttcacacgagggaagtcagtaaaaactacgagcaggcgaacgccaccctcaatcagtacccgccctccatcaatggtggtcgtgtgattgaagcctacaaggggcagaccacgctgattcagtacaccagcaatgctgaggatgccaacttcacgctcagagacagctgcaccgacttggagctctttgagaatgggacgttgctgtggacacccaagtcgctggagccattcactctggagattctagcaagaagtgccaagattggcttggcatctgcactccagcccaggactgtggtctgccattgcaatgcagagagccagtgtttgtacaatcagaccagcagggtgggcaactcctccctggagctctggggagctctttcctgtgtcagaaccagtcctgccctgtgaattactgctacaatcaaggccactgctacatctcccagactctgggctgtcagcccatgtgcacctgccccccagccttcactgacagccgctgcttcctggctgggaacaacttcagtccaactgtcaacctagaacttcccttaagagtcatccagctcttgctcagtgaagaggaaaatgcctccatggcagaagtcaacgcctcggtggcatacagactggggaccctggacatgcgggcctttctccgcaacagccaagtggaacgaatcgattctgcagcaccggcctcgggaagccccatccaacactggatggtcatctcggagttccagtaccgccctcggggcccggtcattgacttcctgaacaaccagctgctggccgcggtggtggaggcgttcttataccacgttccacggaggagtgaggagcccaggaacgacgtggtcttccagcccatctccggggaagacgtgcgcgatgtgacagccctgaacgtgagcacgctgaaggcttacttcagatgcgatggctacaagggctacgacctggtctacagcccccagagcggcttcacctgcgtgtccccgtgcagtaggggctactgtgaccatggaggccagtgccagcacctgcccagtgggccccgctgcagctgtgtgtccttctccatctacacggcctggggcgagcactgtgagcacctgagcatgaaactcgacgcgttcttcggcatcttctttggggccctgggcggcctcttgctgctgggggtcgggacgttcgtggtcctgcgcttctggggttgctccggggccaggttctcctatttcctgaactcagctgaggccttgccttgaaggggcagctgtggcctaggctacctcaagactcacctcatccttaccgcacatttaaggcgccattgcttttgggagactggaaaagggaaggtgactgaaggctgtcaggattcttcaaggagaatgaatactgggaatcaagacaagactataccttatccataggcgcaggtgcacagggggaggccataaagatcaaacatgcatggatgggtcctcacgcagacacacccacagaaggacactagcctgtgcacgcgcgcgtgcacacacacacacacacacacgagttcataatgtggtgatggccctaagttaagcaaaatgcttctgcacacaaaactctctggtttacttcaaattaactctatttaaataaagtctctctgactttttgtgtctccaaaa

SEQ ID NO: 155711 - DNA, 16403 bp, Homo sapiens
  Payload ID: 10597
  Gene Symbol: MUC4
  Gene Name: mucin 4, cell surface associated
  ENST ID: ENST00000629873
  CDS Start-End: 1-13121
gaaccacagaggacacattaataactggaagtaaaactgctgccccagtcacctcaacaggctcaacaacagcgacactagagggacaatcaactgcagcttcttcaaggacctctaatcaggacatatcagcttcatctcagaaccaccagactaagagcacggagaccaccagcaaagctcaaaccgacaccctcacgcagatgatgacatcaactcttttttcttccccaagtgtacacaatgtgatggagacagctcctccagatgaaatgaccacatcatttccctccagtgtcaccaacacactcatgatgacatcaaagactataacaatgacaacctccacagactccactcttggaaacacagaagagacatcaacagcaggaactgaaagttctaccccagtgacctcagcagtctcaataacagctggacaggaaggacaatcacgaacaacttcctggaggacctctatccaagacacatcagcttcttctcagaaccactggactcggagcacgcagaccaccagggaatctcaaaccagcaccctaacacacagaaccacttcaactccttctttctctccaagtgtacacaatgtgacagggactgtttctcagaagacatctccttcaggtgaaacagctacctcatccctctgtagtgtcacaaacacatccatgatgacatcagagaagataacagtgacaacctccacaggctccactcttggaaacccaggggagacatcatcagtacctgttactggaagtcttatgccagtcacctcagcagccttagtaacatttgatccagaaggacaatcaccagcaactttctcaaggacttctactcaggacacaacagctttttctaagaaccaccagactcagagcgtggagaccaccagagtatctcaaatcaacaccctcaacaccctcacaccggttacaacatcaactgttttatcctcaccaagtggattcaacccaagtggaacagtttctcaggagacattcccttctggtgaaacaaccacctcatccccttccagtgtcagcaatacattcctggtaacatcaaaggtgttcagaatgccaacctccagagactctactcttggaaacacagaggagacatcactatctgtaagtggaaccatttctgcaatcacttccaaagtttcaaccatatggtggtcagacactctgtcaacagcactctcccccagttctctacctccaaaaatatccacagctttccacacccagcagagtgaaggtgcagagaccacaggacggcctcatgagaggagctcattctctccaggtgtgtctcaagaaatatttactctacatgaaacaacaacatggccttcctcattctccagcaaaggccacacaacttggtcacaaacagaactgccctcaacatcaacaggtgctgccactaggcttgtcacaggaaatccatctacagggacagctggcactattccaagggtcccctctaaggtctcagcaataggggaaccaggagagcccaccacatactcctcccacagcacaactctcccaaaaacaacaggggcaggcgcccagacacaatggacacaagaaacggggaccactggagaggctcttctcagcagcccaagctacagtgtgactcagatgataaaaacggccacatccccatcttcttcacctatgctggatagacacacatcccaacaaattacaacggcaccatcaacaaatcattcaacaatacattccacaagcacctctcctcaggaatcaccagctgtttcccaaaggggtcacactcaagccccgcagaccacacaagaatcacaaaccacgaggtccgtctcccccatgactgacaccaagacagtcaccaccccaggttcttccttcacagccagtgggcactcgccctcagaaattgttcctcaggacgcacccaccataagtgcagcaacaacctttgccccagctcccaccggggatggtcacacaacccaggccccgaccacagcactgcaggcagcacccagcagccatgatgccaccctggggccctcaggaggcacgtcactttccaaaacaggtgcccttactctggccaactctgtagtgtcaacaccagggggcccagaaggacaatggacatcagcctctgccagcacctcacctgacacagcagcagccatgacccatacccaccaggctgagagcacagaggcctctggacaaacacagaccagcgaaccggcctcctcagggtcacgaaccacctcagcgggcacagctaccccttcctcatccggggcgagtggcacaacaccttcaggaagcgaaggaatatccacctcaggagagacgacaaggttttcatcaaacccctccagggacagtcacacaacccagtcaacaaccgaattgctgtccgcctcagccagtcatggtgccatcccagtaagcacaggaatggcgtcttcgatcgtccccggcacctttcatcccaccctctctgaggcctccactgcagggagaccgacaggacagtcaagcccaacttctcccagtgcctctcctcaggagacagccgccatttcccggatggcccagactcagaggacaagaaccagcagagggtctgacactatcagcctggcgtcccaggcaaccgacaccttctcaacagtcccacccacacctccatcgatcacatccactgggcttacatctccacaaaccgagacccacactctgtcaccttcagggtctggtaaaaccttcaccacggccctcatcagcaacgccacccctcttcctgtcacctacgcttcctcggcatccacaggtcacaccacccctcttcatgtcaccgatgcttcctcagtatccacaggtcacgccacccctcttcctgtcaccagcccttcctcagtatccacaggtcacaccacccctcttcctgtcaccgacacttcctcagaatccacaggtcacgtcacccctcttcctgtcaccagcttttcctcagcatccacaggtgacagcacccctcttcctgtcactgacacttcctcagcatccacaggtcacgtcacccctcttcctgtcaccagcctttcctcagcatccacaggtgacaccacccctcttcctgtcactgacacttcctcagcatccacaggtcacgccacctctcttcctgtcaccgacacttcctcagtatccacaggtcacaccacccctcttcctgtcaccgacacttcctcagcatccacaggtcacgccacctctcttcctgtcaccgacacttcctcagtatccacaggtcacaccacccctcttcatgtcactgatgcttcctcagcatccacaggtcaggccacccctcttcctgtcaccagcctttcctcagtatccacaggtgacaccacgcctcttcctgtcactagcccttcctcagcatccacaggtcacgccacccctcttcttgtcaccgacacttcctcagcatccacaggacacgccacccctcttcctgtcaccgacgcttcctcagtgtccacagatcacgccacctctcttcctgtaaccatcccttccgcagcatccacaggtcacaccacccctcttcctgtcaccgacacttcctcagcatccacaggtcaggccacctctcttcttgtcaccgacacttcctcagtatccacaggtgacaccacgcctcttcctgtcactagcacttcctcagcatccacaggtcacgtcactcctcttcatgtcaccagcccttcctcagcatccacaggtcacgccacccctcttcctgtcaccagcctttcctcagcatccacaggtgacaccatgcctcttcctgtcactagcccttcctcagcatccacaggtgacaccacccctcttcctgtcaccgacgcttcctcagtatccacaggtcacaccacccctcttcatgtcactgatgcttcctcagcatccacaggtcaggccacccctcttcctgtcaccagcctttcctcagtatccacaggtgacaccacgcctcttcctgtcactagcccttcctcagcatccacaggtcacgccacccctcttcttgtcaccgacacttcctcagcatccacaggacacgccacccctcttcctgtcaccgacgcttcctcagtgtccacagatcacgccacctctcttcctgtaaccatcccttccgcagcatccacaggtcacaccacccctcttcctgtcaccgacacttcctcagcatccacaggtcaggccacctctcttcttgtcaccgacacttcctcagtatccacaggtgacaccacgcctcttcctgtcactagcacttcctcagcatccacaggtcacgtcactcctcttcatgtcaccagcccttcctcagcatccacaggtcacgccacccctcttcctgtcaccagcctttcctcagcatccacaggtgacaccatgcctcttcctgtcactagcccttcctcagcatccacaggtgacaccacccctcttcctgtcaccgacgcttcctcagtatccacaggtcacaccacccctcttcctgtcaccagcccttcctcagcatctacaggtcacaccacccctcttcctgtcaccgacacttcctcagcatccaaaggtgacaccacccctcttcctgtcaccagcccttcctcagcatctacaggtcacaccacccctcttcctgtcaccgacacttcctcagcatccacaggtgacaccacccctcttcctgtcaccaatgcttcctcattatccacaggtcacgccacccctcttcatgtcaccagcccttcctcagcatccacaggtcacgccacccctcttcctgtcaccagcacttcctcagcatccaccggtcacgccacccctcttcctgtcaccggcctttcctcagctaccacagatgacaccacccgtcttcctgtcaccgacgtttcctcggcatccacaggtcaggccacccctcttcctgtcaccagcctttcctcagtatccacaggtgacaccacgcctcttcctgtcactagcccttcctcagcatccacaggtcacgccagccctcttcttgtcactgacgcttcctcagcatccacaggtcaggccacccctcttcctgtcaccgacacttcctcagtatccacagctcacgccaccccacttcctgtcaccggcctttcttcagcttccacagatgacaccacccgtcttcctgtcaccgacgtttcctcggcatccacaggtcaggccatccctcttcctgtcaccagcccttcctcagcatccacaggtgacaccacccctcttcctgtcaccgacgcttcctcagcatccacaggtgacaccacctctcttcctgtcaccatcccttcctcagcatcttcaggtcacaccacctctcttcctgtcaccgacgcttcctcagtgtccacaggtcacgccacctctcttcttgtcaccgacgcttcctcagtatccacaggtgacaccacccctcttcctgtcaccgacactaactcagcatccacaggtgacaccacccctcttcatgtcaccgacgcttcctcagtatccacaggtcacgccacctctcttcctgtcaccagcctttcctcagcatccacaggtgacaccacgcctcttcctgtcactagcccttcctcagcatcctcaggtcacaccacccctcttcctgtcaccgacgcttcctcagtacccacaggtcacgccacctctcttcctgtcaccgacgcttcctcagtgtccacaggtcacgccacccctcttcctgtcaccgacgcttcctcagtgtccacaggtcatgccacccctcttccggtcaccgacacttcctcagtatctacaggacaggccacccctcttcctgtcaccagcctttcctcagcatccactggtgacaccacgccgcttcctgtcaccgatacttcctcagcatccacaggtcaggacacccctcttcctgtcaccagcctttcctcagtatccacaggtgacaccacgcctcttcctgtcactaacccttcctcagcatccacaggtcacgccacccctcttcttgtcaccgacgcttcctcaatatccacaggtcacgccacctctcttcttgtcaccgacgcttcctcagtatccacaggtcacgccaccgctcttcatgacaccgatgcttcctcattatccacaggggacaccacccctcttcctgtcaccagcccttcctcaacatccacaggtgacaccacccctcttcctgtcaccgaaacttcctcagtatccacaggtcacgccacctctcttcctgtcaccgacacttcctcagcatccacaggtcacgccacctctcttcctgtcaccgacacttcctcagcatccacaggtcacgccacccctcttcctgtcaccgacacttcctcagcatccacaggtcaggccacccctcttcctgtcaccagcccttcctcagcatccacaggtcacgccatccctcttcttgtcaccgacacttcctcagcatccacaggacaggccacccctcttcctgtcaccagcctttcctcagcatccacaggtgacaccacccctcttcctgtcaccgacgcttcctcagtgtccacaggtcacgccacctctcttcctgtcaccagcctttcctcagtatccacaggtgacaccactcctcttcctgtcactagcccttcctcagcatccacaggtcacgccacccctcttcatgtcaccgacgcttcctcagcatccacaggtcacgccacccctcttcctgtcaccagcctttcctcagcatccacaggtgacaccacgcctcttcctgtcactagcccttcctcagcatccacaggtcacgccacccctcttcatgtcaccgacgcttcctcagtatccacaggtgacaccacccctcttcctgtcaccagctcttcctcagcatcctcaggtcacaccacccctcttcctgtcaccgacgcttcctcagcatccacaggtgacaccacccctcttcctgtcaccgacacttcctcagcatccacaggtcacgccacccatcttcctgtcaccggcctttcctcagcttccacaggtgacaccacccgtcttcctgtcaccaacgtttcctcggcatccacaggtcatgccacccctcttcctgtcaccagcacttcctcagcatccacaggtgacaccacccctcttcctggcaccgacacttcctcagtatccacaggtcacaccacccctcttcttgtcaccgacgcttcgtcagtatccacaggtgacaccacccgtcttcctgtcaccagcccttcctcagcatctacaggtcacaccacccctctacctgtcaccgacactccctcagcatccacaggtgacaccacccctcttcctgtcaccaatgcttcctcattatccacacgtcacgccacctctcttcatgtcaccagcccttcctcagcatccacaggtcacgccacctctcttcctgtcaccgacacttccgcagcatccacaggtcacgccacccctcttcctgtcaccagcacttcctcagcatccacaggtgacaccacccctcttcctgtcaccgacacttactcagcatccacaggtcaggccacccctcttcctgtcaccagcctttcctcagtatccacaggtgacaccacgcctcttcctgtcactagcccttcctcagcatccacaggtcacgccactcctcttcttgtcaccgacgcttcctcagcatccacaggtcaggccacccctcttcctgtcaccagcctttcctcagtatccacaggtgacaccacgcctcttcctgtcactagcccttcctcagcatccaccggtcatgccacctctcttcctgtcaccgacacttcctcagcatccacaggtgacaccacctctcttcctgtcaccgacacttcctcagcatacacaggtgacaccacctctcttcctgtcaccgacacttcctcatcatccacaggtgacaccacccctcttcttgtcaccgagacttcctcagtatccacaggtgacaccacccctcttcctgtcaccgacacttcctcagcatccacaggtcacgccacccctcttcctgtcaccaacacttcctcagtatccacaggtcacgccacccctcttcatgtcaccagcccttcctcagcatccacaggtcacaccacccctcttcctgtcaccgacgcttcgtcagtgtccacaggtcacgccacctctcttcctgtcaccgacgcttcctcagtgttcacaggtcatgccacctctcttcctgtcaccatcccttcctcagcatcctcaggtcacaccacccctcttcctgtcaccgacgcttcctcagtgtccacaggtcacgccacctctcttcctgtcaccgacgcttcctcagtgtccacaggtcatgccacccctcttcctgtcaccgacgcttcctcagtgtccacaggtcacgctacccctcttcctctcaccagcctttcctcagtatccacaggtgacaccacgcctcttcctgtcaccgacacttcctcagcatccacaggtcaggccacccctcttcctgtcaccagcctttcctcagtatccacaggtgacaccacccctcttcctgtcaccgacacttcctcagcatccacaggtcacgccacctctcttcctgtcaccgacacttcctcagcatccacaggtcacgccacccctcttcctgacaccgacacttcctcagcatccacaggtcacgccacccttcttcctgtcaccgacacttcctcagcatccataggtcacgccacctctcttcctgtcaccgacacttcctcaatatccacaggtcacgccacccctcttcatgtcaccagcccttcctcagcatccaccggtcacgccaccccgcttcctgtcaccgacacttcctcagcatccacaggtcacgccaaccctcttcatgtcaccagcccttcctcagcatccaccggtcacgccaccccgcttcctgtcaccgacacttcctcagcatccacaggtcacgccacccctcttcctgtcaccagcctttcctcagtatccacaggtgacaccacgcctcttcctgtcactagcccttcctcagcatccacaggtcacaccacccctcttcctgtcaccgacacttcctcagcatccacaggtcaggccaccgctcttcctgtcaccagcacttcctcagcatccacaggtgacaccacccctcttcctgtcaccgacacttcctcagcatccacaggtcaggccacccctcttcctgtcaccagcctttcctcagtatccacaggtgacaccacgcctcttcctgtcactagcccttcctcagcatccacaggtcacgccactcctcttcttgtcaccgacgcttcctcagcatccacaggtcaggccacccctcttcctgtcaccagcctttcctcagtatccacaggtgacaccacgcctcttcctgtcactagcccttcctcagcatccaccggtcatgccacctctcttcctgtcaccgacacttcctcagcatccacaggtgacaccacctctcttcctgtcaccgacacttcctcagcatacacaggtgacaccacctctcttcctgtcaccgacacttcctcatcatccacaggtgacaccacccctcttcttgtcaccgagacttcctcagtatccacaggtcacgccactcctcttcttgtcaccgacgcttcctcagcatccacaggtcacgccacccctcttcatgtcaccagcccttcctcagcatccacaggtgacaccacccctgtgcctgtcaccgacacttcctcagtatccacaggtcacgccacccctcttcctgtcaccggcctttcctcagcttccacaggtgacaccacccgtcttcctgtcaccgacatttcctcggcatccacaggtcaggccacccctcttcctgtcaccaacacttcctcagtatccacaggtgacaccatgcctcttcctgtcactagcccttcctcagcatccacaggtcacgccacccctcttcctgtcaccagcacttcctcagcatccaccggtcacgccacccctgttcctgtcaccagcacttcctcagcatctacaggtcacaccacccctcttcctgtcaccgacacttcctcagcatccacaggtgacaccacccctcttcctgtcaccagcccttcctcagcatctacaggtcacaccacccctcttcatgtcaccatcccttcctcagcatccacaggtgacaccagcactcttcctgtcaccggcgcttcctcagcatccaccggtcacgccacccctcttcctgtcaccgacacttcctcagtatccaccggtcacgccacgcctcttcctgtcaccagcctttcctcagtatccacaggtgacaccacccctcttcctgtcaccgacgcttcctcggcatccacaggtcaggccacccctcttcctgtcaccagcctttcctcagtatccacaggtgacaccacccctcttcttgtcaccgacgcttcctcagtatccacaggtcacgccacccctcttcctgtcaccgacacttcctcagcatccacaggtgacaccacccgtcttcctgtcacggacacttcctcagcatccacaggtcaggccacccctcttcctgtcaccagcctttcctcagtatccacaggtgacaccacccctcttcttgtcaccgacgcttcctcagtatccacaggtcacgccacccctcttcctgtcaccgacacttcctcagcatccacaggtgacaccacccgtcttcctgtcacggacacttcctcagcatccacaggtcaggccacccctcttcctgtcaccatcccttcctcatcatcctcaggtcacaccacccctcttcctgtcaccagcacttcctcagtatctacaggtcacgtcacccctcttcatgtcaccagcccttcctcagcatccacaggtcacgtcacccctcttcctgtcaccagcacttcctcagcatccacaggtcacgccacccctcttcttgtcaccgacgcttcctcagtgtccacaggtcacgccacgcctcttcctgtcaccgacgcttcctcagcatccacaggtgacaccacccctcttcctgtcaccgacacttcctcagcatccacaggtcaggccacccctcttcctgtcaccagcctttcctcagtatccacaggtgacaccacccctcttcctgtcaccgacgcttcctcagcatccacaggtcacgccacccctcttcctgtcaccatcccttcctcagtatccacaggtgacaccatgcctcttcctgtcactagcccttcctcagcatccacaggtcacgccacccctcttcctgttaccggcctttcctcagcttccacaggtgacaccacccctcttcctgtcaccgacacttcctcagcatccacacgtcacgccacccctcttcctgtcaccgacacttcctcagcttccacagatgacaccacccgtcttcctgtcaccgacgtttcctcggcatccacaggacatgccacccctcttcctgtcaccagcacttcctcagcatccacaggtgacaccacccctcttcctgtcaccgacacttcctcagtatccacaggtcacgccacctctcttcctgtcaccagccgttcctcagcatccacaggtcacgccaccccccttcctgtcaccgacacttcctcagtatccacaggtcacgccacccctcttcctgtcaccagcacttcctcagtatctacaggtcacgccacccctcttcctgtcaccagcccttcctcagcatccacaggtcacgccacccctgttcctgtcaccagcacttcctcagcatccacaggtgacaccacccctcttcctgtcaccaatgcttcctcattatccacaggtcacgccacccctcttcatgtcaccagcccttcctcagcatccagaggtgacaccagcactcttcctgtcaccgatgcttcctcagcatccaccggtcacgccacccctcttcctctcaccagcctttcctcagtatccacaggtgacaccacgcctcttcctgtcaccgacacttcctctgcatccacaggtcaggccacccctcttcctgtcaccagcctttcctcagtatccacaggtgacaccacgcctcttcctgtcaccatcccttcctcagcatcctcaggtcacaccacctctcttcctgtcaccgacgcttcctcagtgtccacaggtcacggcacccctcttcctgtcaccagcacttcctcagcatccacaggtgacaccacccctcttcctgtcaccgacacttcctcagcatccacaggtcacgccacccctcttcctgtcaccgacacttcctcagcatccacaggtcacgccacccctcttcctgtcaccagcctttcctcagtatccacaggtcacgccacccctcttgctgtcagcagtgctacctcagcttccacagtatcctcggactcccctctgaagatggaaacaccaggaatgacaacaccgtcactgaagacagacggtgggagacgcacagccacatcaccaccccccacaacctcccagaccatcatttccaccattcccagcactgccatgcacacccgctccacagctgcccccatccccatcctgcctgagagaggagtttccctcttcccctatggggcaggcgccggggacctggagttcgtcaggaggaccgtggacttcacctccccactcttcaagccggcgactggcttcccccttggctcctctctccgtgattccctctacgcttcacaggccgggaccctgtggccctggtggctccgttctgggacgatgctgacttctccactggtcgggggaccacattttatcaggaatacgagacgttctatggtgaacacagcctgctagtccagcaggccgagtcttggattagaaagatgacaaacaacgggggctacaaggccaggtgggccctaaaggtcacgtgggtcaatgcccacgcctatcctgcccagtggaccctcgggagcaacacctaccaagccatcctctccacggacgggagcaggtcctatgccctgtttctctaccagagcggtgggatgcagtgggacgtggcccagcgctcaggcaacccggtgctcatgggcttctctaggcctccaagggctgcagttctacaggctacaccgggaagaaaggcccaactaccgtctcgagtgcctgcagtggctgaagagccagcctcggtggcccagctggggctggaaccaggtctcctgcccttgttcctggcagcagggacgacgggacttacgattccaacccgtcagcataggtcgctggggcctcggcagtaggcagctgtgcagcttcacctcttggcgaggaggcgtgtgctgcagctacgggccctggggagagtttcgtgaaggctggcacgtgcagcgtccttggcagttggcccaggaactggagccacagagctggtgctgccgctggaatgacaagccctacctctgtgccctgtaccagcagaggcggccccacgtgggctgtgctacatacaggcccccacagcccgcctggatgttcggggacccccacatcaccaccttggatggtgtcagttacaccttcaatgggctgggggacttcctgctggtcggggcccaagacgggaactcctccttcctgcttcagggccgcaccgcccagactggctcagcccaggccaccaacttcatcgcctttgcggctcagtaccgctccagcagcctgggccccgtcacggtccaatggctccttgagcctcacgacgcaatccgtgtcctgctggataaccagactgtgacatttcagcctgaccatgaagacggcggaggccaggagacgttcaacgccaccggagtcctcctgagccgcaacggctctgaggtctcggccagcttcgacggctgggccaccgtctcggtgatcgcgctctccaacatcctccacgcctccgccagcctcccgcccgagtaccagaaccgcacggaggggctcctgggggtctggaataacaatccagaggacgacttcaggatgcccaatggctccaccattcccccagggagccctgaggagatgcttttccactttggaatgacctggcagatcaacgggacaggcctccttggcaagaggaatgaccagctgccttccaacttcacccctgttttctactcacaactgcaaaaaaacagctcctgggctgaacatttgatctccaactgtgacggagatagctcatgcatctatgacaccctggccctgcgcaacgcaagcatcggacttcacacgagggaagtcagtaaaaactacgagcaggcgaacgccaccctcaatcagtacccgccctccatcaatggtggtcgtgtgattgaagcctacaaggggcagaccacgctgattcagtacaccagcaatgctgaggatgccaacttcacgctcagagacagctgcaccgacttggagctctttgagaatgggacgttgctgtggacacccaagtcgctggagccattcactctggagattctagcaagaagtgccaagattggcttggcatctgcactccagcccaggactgtggtctgccattgcaatgcagagagccagtgtttgtacaatcagaccagcagggtgggcaactcctccctggaggtggctggctgcaagtgtgacgggggcaccttcggccgctactgcgagggctccgaggatgcctgtgaggagccgtgcttcccgagtgtccactgcgttcctgggaagggctgcgaggcctgccctccaaacctgactggggatgggcggcactgtgcggctctggggagctctttcctgtgtcagaaccagtcctgccctgtgaattactgctacaatcaaggccactgctacatctcccagactctgggctgtcagcccatgtgcacctgccccccagccttcactgacagccgctgcttcctggctgggaacaacttcagtccaactgtcaacctagaacttcccttaagagtcatccagctcttgctcagtgaagaggaaaatgcctccatggcagaagtcaacgcctcggtggcatacagactggggaccctggacatgcgggcctttctccgcaacagccaagtggaacgaatcgattctgcagcaccggcctcgggaagccccatccaacactggatggtcatctcggagttccagtaccgccctcggggcccggtcattgacttcctgaacaaccagctgctggccgcggtggtggaggcgttcttataccacgttccacggaggagtgaggagcccaggaacgacgtggtcttccagcccatctccggggaagacgtgcgcgatgtgacagccctgaacgtgagcacgctgaaggcttacttcagatgcgatggctacaagggctacgacctggtctacagcccccagagcggcttcacctgcgtgtccccgtgcagtaggggctactgtgaccatggaggccagtgccagcacctgcccagtgggccccgctgcagctgtgtgtccttctccatctacacggcctggggcgagcactgtgagcacctgagcatgaaactcgacgcgttcttcggcatcttctttggggccctgggcggcctcttgctgctgggggtcgggacgttcgtggtcctgcgcttctggggttgctccggggccaggttctcctatttcctgaactcagctgaggccttgccttgaaggggcagctgtggcctaggctacctcaagactcacctcatccttaccgcacatttaaggcgccattgcttttgggagactggaaaagggaaggtgactgaaggctgtcaggattcttcaaggagaatgaatactgggaatcaagacaagactataccttatccataggcgcaggtgcacagggggaggccataaagatcaaacatgcatggatgggtcctcacgcagacacacccacagaaggacactagcctgtgcacgcgcgcgtgcacacacacacacacacacacgagttcataatgtggtgatggccctaagttaagcaaaatgcttctgcacacaaaactctctggtttacttcaaattaactctatttaaataaagtctctctgactttttgtgtctccaaaa

SEQ ID NO: 155712 - DNA, 3645 bp, Homo sapiens
  Payload ID: 10597
  Gene Symbol: MUC4
  Gene Name: mucin 4, cell surface associated
  ENST ID: ENST00000629929
  CDS Start-End: 1-434
ctctgaagatggaaacaccaggaatgacaacaccgtcactgaagacagacggtgggagacgcacagccacatcaccaccccccacaacctcccagaccatcatttccaccattcccagcactgccatgcacacccgctccacagctgcccccatccccatcctgcctgagagaggagtttccctcttcccctatggggcaggcgccggggacctggagttcgtcaggaggaccgtggacttcacctccccactcttcaagccggcgactggcttcccccttggctcctctctccgtgattccctctacgcttcacaggccgggaccctgtggccctggtggctccgttctgggacgatgctgacttctccactggtcgggggaccacattttatcaggaatacgagacgttctatggtgaacacagcctgctagtccagcaggccgagtcttggattagaaagatgacaaacaacgggggctacaaggccaggtgggccctaaaggtcacgtgggtcaatgcccacgcctatcctgcccagtggaccctcgggagcaacacctaccaagccatcctctccacggacgggagcaggtcctatgccctgtttctctaccagagcggtgggatgcagtgggacgtggcccagcgctcaggcaacccggtgctcatgggcttctctagtggagatggctatttcgaaaacagcccactgatgtcccagccagtgtgggagaggtatcgccctgatagattcctgaattccaactcaggcctccaagggctgcagttctacaggctacaccgggaagaaaggcccaactaccgtctcgagtgcctgcagtggctgaagagccagcctcggtggcccagctggggctggaaccaggtctcctgcccttgttcctggcagcagggacgacgggacttacgattccaacccgtcagcataggtcgctggggcctcggcagtaggcagctgtgcagcttcacctcttggcgaggaggcgtgtgctgcagctacgggccctggggagagtttcgtgaaggctggcacgtgcagcgtccttggcagttggcccaggaactggagccacagagctggtgctgccgctggaatgacaagccctacctctgtgccctgtaccagcagaggcggccccacgtgggctgtgctacatacaggcccccacagcccgcctggatgttcggggacccccacatcaccaccttggatggtgtcagttacaccttcaatgggctgggggacttcctgctggtcggggcccaagacgggaactcctccttcctgcttcagggccgcaccgcccagactggctcagcccaggccaccaacttcatcgcctttgcggctcagtaccgctccagcagcctgggccccgtcacggtccaatggctccttgagcctcacgacgcaatccgtgtcctgctggataaccagactgtgacatttcagcctgaccatgaagacggcggaggccaggagacgttcaacgccaccggagtcctcctgagccgcaacggctctgaggtctcggccagcttcgacggctgggccaccgtctcggtgatcgcgctctccaacatcctccacgcctccgccagcctcccgcccgagtaccagaaccgcacggaggggctcctgggggtctggaataacaatccagaggacgacttcaggatgcccaatggctccaccattcccccagggagccctgaggagatgcttttccactttggaatgacctggcagatcaacgggacaggcctccttggcaagaggaatgaccagctgccttccaacttcacccctgttttctactcacaactgcaaaaaaacagctcctgggctgaacatttgatctccaactgtgacggagatagctcatgcatctatgacaccctggccctgcgcaacgcaagcatcggacttcacacgagggaagtcagtaaaaactacgagcaggcgaacgccaccctcaatcagtacccgccctccatcaatggtggtcgtgtgattgaagcctacaaggggcagaccacgctgattcagtacaccagcaatgctgaggatgccaacttcacgctcagagacagctgcaccgacttggagctctttgagaatgggacgttgctgtggacacccaagtcgctggagccattcactctggagattctagcaagaagtgccaagattggcttggcatctgcactccagcccaggactgtggtctgccattgcaatgcagagagccagtgtttgtacaatcagaccagcagggtgggcaactcctccctggagctctggggagctctttcctgtgtcagaaccagtcctgccctgtgaattactgctacaatcaaggccactgctacatctcccagactctgggctgtcagcccatgtgcacctgccccccagccttcactgacagccgctgcttcctggctgggaacaacttcagtccaactgtcaacctagaacttcccttaagagtcatccagctcttgctcagtgaagaggaaaatgcctccatggcagaagtcaacgcctcggtggcatacagactggggaccctggacatgcgggcctttctccgcaacagccaagtggaacgaatcgattctgcagcaccggcctcgggaagccccatccaacactggatggtcatctcggagttccagtaccgccctcggggcccggtcattgacttcctgaacaaccagctgctggccgcggtggtggaggcgttcttataccacgttccacggaggagtgaggagcccaggaacgacgtggtcttccagcccatctccggggaagacgtgcgcgatgtgacagccctgaacgtgagcacgctgaaggcttacttcagatgcgatggctacaagggctacgacctggtctacagcccccagagcggcttcacctgcgtgtccccgtgcagtaggggctactgtgaccatggaggccagtgccaacacctgcccagtgggccccgctgcagctgtgtgtccttctccatctacacggcctggggcgagcactgtgagcacctgagcatgaaactcgacgcgttcttcggcatcttctttggggccctgggcggcctcttgctgctgggggtcgggacgttcgtggtcctgcgcttctggggttgctccggggccaggttctcctatttcctgaactcagctgaggccttgccttgaaggggcagctgtggcctaggctacctcaagactcacctcatccttaccgcacatttaaggcgccattgcttttgggagactggaaaagggaaggtgactgaaggctgtcaggattcttcaaggagaatgaatactgggaatcaagacaagactataccttatccataggcgcaggtgcacagggggaggccataaagatcaaacatgcatggatgggtcctcacgcagacacacccacagaaggacactagcctgtgcacgcgcgcgtgcacacacacacacacacacacgagttcataatgtggtgatggccctaagttaagcaaaatgcttctgcacacaaaactctctggtttacttcaaattaactctatttaaataaagtctctctgactttttgtgtcttcaaaa

SEQ ID NO: 155713 - DNA, 16119 bp, Homo sapiens; identical to SEQ ID NO: 155672
  Payload ID: 10597
  Gene Symbol: MUC4
  Gene Name: mucin 4, cell surface associated
  ENST ID: ENST00000627295
  CDS Start-End: 1-16001

SEQ ID NO: 155714 - DNA, 16289 bp, Homo sapiens; identical to SEQ ID NO: 155689
  Payload ID: 10597
  Gene Symbol: MUC4
  Gene Name: mucin 4, cell surface associated
  ENST ID: ENST00000628970
  CDS Start-End: 1-13211

SEQ ID NO: 155715 - DNA, 3643 bp, Homo sapiens
  Payload ID: 10597
  Gene Symbol: MUC4
  Gene Name: mucin 4, cell surface associated
  ENST ID: ENST00000627007
  CDS Start-End: 1-434
ctctgaagatggaaacaccaggaatgacaacaccgtcactgaagacagacggtgggagacgcacagccacatcaccaccccccacaacctcccagaccatcatttccaccattcccagcactgccatgcacacccgctccacagctgcccccatccccatcctgcctgagagaggagtttccctcttcccctatggggcaggcgccggggacctggagttcgtcaggaggaccgtggacttcacctccccactcttcaagccggcgactggcttcccccttggctcctctctccgtgattccctctacgcttcacaggccgggaccctgtggccctggtggctccgttctgggacgatgctgacttctccactggtcgggggaccacattttatcaggaatacgagacgttctatggtgaacacagcctgctagtccagcaggccgagtcttggattagaaagatgacaaacaacgggggctacaaggccaggtgggccctaaaggtcacgtgggtcaatgcccacgcctatcctgcccagtggaccctcgggagcaacacctaccaagccatcctctccacggacgggagcaggtcctatgccctgtttctctaccagagcggtgggatgcagtgggacgtggcccagcgctcaggcaacccggtgctcatgggcttctctagtggagatggctatttcgaaaacagcccactgatgtcccagccagtgtgggagaggtatcgccctgatagattcctgaattccaactcaggcctccaagggctgcagttctacaggctacaccgggaagaaaggcccaactaccgtctcgagtgcctgcagtggctgaagagccagcctcggtggcccagctggggctggaaccaggtctcctgcccttgttcctggcagcagggacgacgggacttacgattccaacccgtcagcataggtcgctggggcctcggcagtaggcagctgtgcagcttcacctcttggcgaggaggcgtgtgctgcagctacgggccctggggagagtttcgtgaaggctggcacgtgcagcgtccttggcagttggcccaggaactggagccacagagctggtgctgccgctggaatgacaagccctacctctgtgccctgtaccagcagaggcggccccacgtgggctgtgctacatacaggcccccacagcccgcctggatgttcggggacccccacatcaccaccttggatggtgtcagttacaccttcaatgggctgggggacttcctgctggtcggggcccaagacgggaactcctccttcctgcttcagggccgcaccgcccagactggctcagcccaggccaccaacttcatcgcctttgcggctcagtaccgctccagcagcctgggccccgtcacggtccaatggctccttgagcctcacgacgcaatccgtgtcctgctggataaccagactgtgacatttcagcctgaccatgaagacggcggaggccaggagacgttcaacgccaccggagtcctcctgagccgcaacggctctgaggtctcggccagcttcgacggctgggccaccgtctcggtgatcgcgctctccaacatcctccacgcctccgccagcctcccgcccgagtaccagaaccgcacggaggggctcctgggggtctggaataacaatccagaggacgacttcaggatgcccaatggctccaccattcccccagggagccctgaggagatgcttttccactttggaatgacctggcagatcaacgggacaggcctccttggcaagaggaatgaccagctgccttccaacttcacccctgttttctactcacaactgcaaaaaaacagctcctgggctgaacatttgatctccaactgtgacggagatagctcatgcatctatgacaccctggccctgcgcaacgcaagcatcggacttcacacgagggaagtcagtaaaaactacgagcaggcgaacgccaccctcaatcagtacccgccctccatcaatggtggtcgtgtgattgaagcctacaaggggcagaccacgctgattcagtacaccagcaatgctgaggatgccaacttcacgctcagagacagctgcaccgacttggagctctttgagaatgggacgttgctgtggacacccaagtcgctggagccattcactctggagattctagcaagaagtgccaagattggcttggcatctgcactccagcccaggactgtggtctgccattgcaatgcagagagccagtgtttgtacaatcagaccagcagggtgggcaactcctccctggagctctggggagctctttcctgtgtcagaaccagtcctgccctgtgaattactgctacaatcaaggccactgctacatctcccagactctgggctgtcagcccatgtgcacctgccccccagccttcactgacagccgctgcttcctggctgggaacaacttcagtccaactgtcaacctagaacttcccttaagagtcatccagctcttgctcagtgaagaggaaaatgcctccatggcagaagtcaacgcctcggtggcatacagactggggaccctggacatgcgggcctttctccgcaacagccaagtggaacgaatcgattctgcagcaccggcctcgggaagccccatccaacactggatggtcatctcggagttccagtaccgccctcggggcccggtcattgacttcctgaacaaccagctgctggccgcggtggtggaggcgttcttataccacgttccacggaggagtgaggagcccaggaacgacgtggtcttccagcccatctccggggaagacgtgcgcgatgtgacagccctgaacgtgagcacgctgaaggcttacttcagatgcgatggctacaagggctacgacctggtctacagcccccagagcggcttcacctgcgtgtccccgtgcagtaggggctactgtgaccatggaggccagtgccagcacctgcccagtgggccccgctgcagctgtgtgtccttctccatctacacggcctggggcgagcactgtgagcacctgagcatgaaactcgacgcgttcttcggcatcttctttggggccctgggcggcctcttgctgctgggggtcgggacgttcgtggtcctgcgcttctggggttgctccggggccaggttctcctatttcctgaactcagctgaggccttgccttgaaggggcagctgtggcctaggctacctcaagactcacctcatccttaccgcacatttaaggcgccattgcttttgggagactggaaaagggaaggtgactgaaggctgtcaggattcttcaaggagaatgaatactgggaatcaagacaagactataccttatccataggcgcaggtgcacagggggaggccataaagatcaaacatgcatggatgggtcctcacgcagacacacccacagaaggacactagcctgtgcacgcgcgcgtgcacacacacacacacacaagagttcataatgtggtgatggccctaagttaagcaaaatgcttctgcacacaaaactctctggtttacttcaaattaactctatttaaataaagtctctctgactttttgtgtcttcaaaa

SEQ ID NO: 155716 - DNA, 15921 bp, Homo sapiens
  Payload ID: 10597
  Gene Symbol: MUC4
  Gene Name: mucin 4, cell surface associated
  ENST ID: ENST00000625407
  CDS Start-End: 1-13211
gaaccacagaggacacattaataactggaagtaaaactgctgccccagtcacctcaacaggctcaacaacagcgacactagagggacaatcaactgcagcttcttcaaggacctctaatcaggacatatcagcttcatctcagaaccaccagactaagagcacggagaccaccagcaaagctcaaaccgacaccctcacgcagatgatgacatcaactcttttttcttccccaagtgtacacaatgtgatggagacagctcctccagatgaaatgaccacatcatttccctccagtgtcaccaacacactcatgatgacatcaaagactataacaatgacaacctccacagactccactcttggaaacacagaagagacatcaacagcaggaactgaaagttctaccccagtgacctcagcagtctcaataacagctggacaggaaggacaatcacgaacaacttcctggaggacctctatccaagacacatcagcttcttctcagaaccactggactcggagcacgcagaccaccagggaatctcaaaccagcaccctaacacacagaaccacttcaactccttctttctctccaagtgtacacaatgtgacagggactgtttctcagaagacatctccttcaggtgaaacagctacctcatccctctgtagtgtcacaaacacatccatgatgacatcagagaagataacagtgacaacctccacaggctccactcttggaaacccaggggagacatcatcagtacctgttactggaagtcttatgccagtcacctcagcagccttagtaacatttgatccagaaggacaatcaccagcaactttctcaaggacttctactcaggacacaacagctttttctaagaaccaccagactcagagcgtggagaccaccagagtatctcaaatcaacaccctcaacaccctcacaccggttacaacatcaactgttttatcctcaccaagtggattcaacccaagtggaacagtttctcaggagacattcccttctggtgaaacaaccacctcatccccttccagtgtcagcaatacattcctggtaacatcaaaggtgttcagaatgccaacctccagagactctactcttggaaacacagaggagacatcactatctgtaagtggaaccatttctgcaatcacttccaaagtttcaaccatatggtggtcagacactctgtcaacagcactctcccccagttctctacctccaaaaatatccacagctttccacacccagcagagtgaaggtgcagagaccacaggacggcctcatgagaggagctcattctctccaggtgtgtctcaagaaatatttactctacatgaaacaacaacatggccttcctcattctccagcaaaggccacacaacttggtcacaaacagaactgccctcaacatcaacaggtgctgccactaggcttgtcacaggaaatccatctacagggacagctggcactattccaagggtcccctctaaggtctcagcaataggggaaccaggagagcccaccacatactcctcccacagcacaactctcccaaaaacaacaggggcaggcgcccagacacaatggacacaagaaacggggaccactggagaggctcttctcagcagcccaagctacagtgtgactcagatgataaaaacggccacatccccatcttcttcacctatgctggatagacacacatcccaacaaattacaacggcaccatcaacaaatcattcaacaatacattccacaagcacctctcctcaggaatcaccagctgtttcccaaaggggtcacactcaagccccgcagaccacacaagaatcacaaaccacgaggtccgtctcccccatgactgacaccaagacagtcaccaccccaggttcttccttcacagccagtgggcactcgccctcagaaattgttcctcaggacgcacccaccataagtgcagcaacaacctttgccccagctcccaccggggatggtcacacaacccaggccccgaccacagcactgcaggcagcacccagcagccatgatgccaccctggggccctcaggaggcacgtcactttccaaaacaggtgcccttactctggccaactctgtagtgtcaacaccagggggcccagaaggacaatggacatcagcctctgccagcacctcacctgacacagcagcagccatgacccatacccaccaggctgagagcacagaggcctctggacaaacacagaccagcgaaccggcctcctcagggtcacgaaccacctcagcgggcacagctaccccttcctcatccggggcgagtggcacaacaccttcaggaagcgaaggaatatccacctcaggagagacgacaaggttttcatcaaacccctccagggacagtcacacaacccagtcaacaaccgaattgctgtccgcctcagccagtcatggtgccatcccagtaagcacaggaatggcgtcttcgatcgtccccggcacctttcatcccaccctctctgaggcctccactgcagggagaccgacaggacagtcaagcccaacttctcccagtgcctctcctcaggagacagccgccatttcccggatggcccagactcagaggacaagaaccagcagagggtctgacactatcagcctggcgtcccaggcaaccgacaccttctcaacagtcccacccacacctccatcgatcacatccactgggcttacatctccacaaaccgagacccacactctgtcaccttcagggtctggtaaaaccttcaccacggccctcatcagcaacgccacccctcttcctgtcacctacgcttcctcggcatccacaggtcacaccacccctcttcatgtcaccgatgcttcctcagtatccacaggtcacgccacccctcttcctgtcaccagcccttcctcagtatccacaggtcacaccacccctcttcctgtcaccgacacttcctcagaatccacaggtcacgtcacccctcttcctgtcaccagcttttcctcagcatccacaggtgacagcacccctcttcctgtcactgacacttcctcagcatccacaggtcacgtcacccctcttcctgtcaccagcctttcctcagcatccacaggtgacaccacccctcttcctgtcactgacacttcctcagcatccacaggtcacgccacctctcttcctgtcaccgacacttcctcagtatccacaggtcacaccacccctcttcctgtcaccgacacttcctcagcatccacaggtcacgccacctctcttcctgtcaccgacacttcctcagtatccacaggtcacaccacccctcttcatgtcactgatgcttcctcagcatccacaggtcaggccacccctcttcctgtcaccagcctttcctcagtatccacaggtgacaccacgcctcttcctgtcactagcccttcctcagcatccacaggtcacgccacccctcttcttgtcaccgacacttcctcagcatccacaggacacgccacccctcttcctgtcaccgacgcttcctcagtgtccacagatcacgccacctctcttcctgtaaccatcccttccgcagcatccacaggtcacaccacccctcttcctgtcaccgacacttcctcagcatccacaggtcaggccacctctcttcttgtcaccgacacttcctcagtatccacaggtgacaccacgcctcttcctgtcactagcacttcctcagcatccacaggtcacgtcactcctcttcatgtcaccagcccttcctcagcatccacaggtcacgccacccctcttcctgtcaccagcctttcctcagcatccacaggtgacaccatgcctcttcctgtcactagcccttcctcagcatccacaggtgacaccacccctcttcctgtcaccgacgcttcctcagtatccacaggtcacaccacccctcttcatgtcactgatgcttcctcagcatccacaggtcaggccacccctcttcctgtcaccagcctttcctcagtatccacaggtgacaccacgcctcttcctgtcactagcccttcctcagcatccacaggtcacgccacccctcttcttgtcaccgacacttcctcagcatccacaggacacgccacccctcttcctgtcaccgacgcttcctcagtgtccacagatcacgccacctctcttcctgtaaccatcccttccgcagcatccacaggtcacaccacccctcttcctgtcaccgacacttcctcagcatccacaggtcaggccacctctcttcttgtcaccgacacttcctcagtatccacaggtgacaccacgcctcttcctgtcactagcacttcctcagcatccacaggtcacgtcactcctcttcatgtcaccagcccttcctcagcatccacaggtcacgccacccctcttcctgtcaccagcctttcctcagcatccacaggtgacaccatgcctcttcctgtcactagcccttcctcagcatccacaggtgacaccacccctcttcctgtcaccgacgcttcctcagtatccacaggtcacaccacccctcttcctgtcaccagcccttcctcagcatctacaggtcacaccacccctcttcctgtcaccgacacttcctcagcatccaaaggtgacaccacccctcttcctgtcaccagcccttcctcagcatctacaggtcacaccacccctcttcctgtcaccgacacttcctcagcatccacaggtgacaccacccctcttcctgtcaccaatgcttcctcattatccacaggtcacgccacccctcttcatgtcaccagcccttcctcagcatccacaggtcacgccacccctcttcctgtcaccagcacttcctcagcatccaccggtcacgccacccctcttcctgtcaccggcctttcctcagctaccacagatgacaccacccgtcttcctgtcaccgacgtttcctcggcatccacaggtcaggccacccctcttcctgtcaccagcctttcctcagtatccacaggtgacaccacgcctcttcctgtcactagcccttcctcagcatccacaggtcacgccagccctcttcttgtcactgacgcttcctcagcatccacaggtcaggccacccctcttcctgtcaccgacacttcctcagtatccacagctcacgccaccccacttcctgtcaccggcctttcttcagcttccacagatgacaccacccgtcttcctgtcaccgacgtttcctcggcatccacaggtcaggccatccctcttcctgtcaccagcccttcctcagcatccacaggtgacaccacccctcttcctgtcaccgacgcttcctcagcatccacaggtgacaccacctctcttcctgtcaccatcccttcctcagcatcttcaggtcacaccacctctcttcctgtcaccgacgcttcctcagtgtccacaggtcacgccacctctcttcttgtcaccgacgcttcctcagtatccacaggtgacaccacccctcttcctgtcaccgacactaactcagcatccacaggtgacaccacccctcttcatgtcaccgacgcttcctcagtatccacaggtcacgccacctctcttcctgtcaccagcctttcctcagcatccacaggtgacaccacgcctcttcctgtcactagcccttcctcagcatcctcaggtcacaccacccctcttcctgtcaccgacgcttcctcagtacccacaggtcacgccacctctcttcctgtcaccgacgcttcctcagtgtccacaggtcacgccacccctcttcctgtcaccgacgcttcctcagtgtccacaggtcatgccacccctcttccggtcaccgacacttcctcagtatctacaggacaggccacccctcttcctgtcaccagcctttcctcagcatccactggtgacaccacgccgcttcctgtcaccgatacttcctcagcatccacaggtcaggacacccctcttcctgtcaccagcctttcctcagtatccacaggtgacaccacgcctcttcctgtcactaacccttcctcagcatccacaggtcacgccacccctcttcttgtcaccgacgcttcctcaatatccacaggtcacgccacctctcttcttgtcaccgacgcttcctcagtatccacaggtcacgccaccgctcttcatgacaccgatgcttcctcattatccacaggggacaccacccctcttcctgtcaccagcccttcctcaacatccacaggtgacaccacccctcttcctgtcaccgaaacttcctcagtatccacaggtcacgccacctctcttcctgtcaccgacacttcctcagcatccacaggtcacgccacctctcttcctgtcaccgacacttcctcagcatccacaggtcacgccacccctcttcctgtcaccgacacttcctcagcatccacaggtcaggccacccctcttcctgtcaccagcccttcctcagcatccacaggtcacgccatccctcttcttgtcaccgacacttcctcagcatccacaggacaggccacccctcttcctgtcaccagcctttcctcagcatccacaggtgacaccacccctcttcctgtcaccgacgcttcctcagtgtccacaggtcacgccacctctcttcctgtcaccagcctttcctcagtatccacaggtgacaccactcctcttcctgtcactagcccttcctcagcatccacaggtcacgccacccctcttcatgtcaccgacgcttcctcagcatccacaggtcacgccacccctcttcctgtcaccagcctttcctcagcatccacaggtgacaccacgcctcttcctgtcactagcccttcctcagcatccacaggtcacgccacccctcttcatgtcaccgacgcttcctcagtatccacaggtgacaccacccctcttcctgtcaccagctcttcctcagcatcctcaggtcacaccacccctcttcctgtcaccgacgcttcctcagcatccacaggtgacaccacccctcttcctgtcaccgacacttcctcagcatccacaggtcacgccacccatcttcctgtcaccggcctttcctcagcttccacaggtgacaccacccgtcttcctgtcaccaacgtttcctcggcatccacaggtcatgccacccctcttcctgtcaccagcacttcctcagcatccacaggtgacaccacccctcttcctggcaccgacacttcctcagtatccacaggtcacaccacccctcttcttgtcaccgacgcttcgtcagtatccacaggtgacaccacccgtcttcctgtcaccagcccttcctcagcatctacaggtcacaccacccctctacctgtcaccgacactccctcagcatccacaggtgacaccacccctcttcctgtcaccaatgcttcctcattatccacacgtcacgccacctctcttcatgtcaccagcccttcctcagcatccacaggtcacgccacctctcttcctgtcaccgacacttccgcagcatccacaggtcacgccacccctcttcctgtcaccagcacttcctcagcatccacaggtgacaccacccctcttcctgtcaccgacacttactcagcatccacaggtcaggccacccctcttcctgtcaccagcctttcctcagtatccacaggtgacaccacgcctcttcctgtcactagcccttcctcagcatccacaggtcacgccactcctcttcttgtcaccgacgcttcctcagcatccacaggtcaggccacccctcttcctgtcaccagcctttcctcagtatccacaggtgacaccacgcctcttcctgtcactagcccttcctcagcatccaccggtcatgccacctctcttcctgtcaccgacacttcctcagcatccacaggtgacaccacctctcttcctgtcaccgacacttcctcagcatacacaggtgacaccacctctcttcctgtcaccgacacttcctcatcatccacaggtgacaccacccctcttcttgtcaccgagacttcctcagtatccacaggtgacaccacccctcttcctgtcaccgacacttcctcagcatccacaggtcacgccacccctcttcctgtcaccaacacttcctcagtatccacaggtcacgccacccctcttcatgtcaccagcccttcctcagcatccacaggtcacaccacccctcttcctgtcaccgacgcttcgtcagtgtccacaggtcacgccacctctcttcctgtcaccgacgcttcctcagtgttcacaggtcatgccacctctcttcctgtcaccatcccttcctcagcatcctcaggtcacaccacccctcttcctgtcaccgacgcttcctcagtgtccacaggtcacgccacctctcttcctgtcaccgacgcttcctcagtgtccacaggtcatgccacccctcttcctgtcaccgacgcttcctcagtgtccacaggtcacgctacccctcttcctctcaccagcctttcctcagtatccacaggtgacaccacgcctcttcctgtcaccgacacttcctcagcatccacaggtcaggccacccctcttcctgtcaccagcctttcctcagtatccacaggtgacaccacccctcttcctgtcaccgacacttcctcagcatccacaggtcacgccacctctcttcctgtcaccgacacttcctcagcatccacaggtcacgccacccctcttcctgacaccgacacttcctcagcatccacaggtcacgccacccttcttcctgtcaccgacacttcctcagcatccataggtcacgccacctctcttcctgtcaccgacacttcctcaatatccacaggtcacgccacccctcttcatgtcaccagcccttcctcagcatccaccggtcacgccaccccgcttcctgtcaccgacacttcctcagcatccacaggtcacgccaaccctcttcatgtcaccagcccttcctcagcatccaccggtcacgccaccccgcttcctgtcaccgacacttcctcagcatccacaggtcacgccacccctcttcctgtcaccagcctttcctcagtatccacaggtgacaccacgcctcttcctgtcactagcccttcctcagcatccacaggtcacaccacccctcttcctgtcaccgacacttcctcagcatccacaggtcaggccaccgctcttcctgtcaccagcacttcctcagcatccacaggtgacaccacccctcttcctgtcaccgacacttcctcagcatccacaggtcaggccacccctcttcctgtcaccagcctttcctcagtatccacaggtgacaccacgcctcttcctgtcactagcccttcctcagcatccacaggtcacgccactcctcttcttgtcaccgacgcttcctcagcatccacaggtcaggccacccctcttcctgtcaccagcctttcctcagtatccacaggtgacaccacgcctcttcctgtcactagcccttcctcagcatccaccggtcatgccacctctcttcctgtcaccgacacttcctcagcatccacaggtgacaccacctctcttcctgtcaccgacacttcctcagcatacacaggtgacaccacctctcttcctgtcaccgacacttcctcatcatccacaggtgacaccacccctcttcttgtcaccgagacttcctcagtatccacaggtcacgccactcctcttcttgtcaccgacgcttcctcagcatccacaggtcacgccacccctcttcatgtcaccagcccttcctcagcatccacaggtgacaccacccctgtgcctgtcaccgacacttcctcagtatccacaggtcacgccacccctcttcctgtcaccggcctttcctcagcttccacaggtgacaccacccgtcttcctgtcaccgacatttcctcggcatccacaggtcaggccacccctcttcctgtcaccaacacttcctcagtatccacaggtgacaccatgcctcttcctgtcactagcccttcctcagcatccacaggtcacgccacccctcttcctgtcaccagcacttcctcagcatccaccggtcacgccacccctgttcctgtcaccagcacttcctcagcatctacaggtcacaccacccctcttcctgtcaccgacacttcctcagcatccacaggtgacaccacccctcttcctgtcaccagcccttcctcagcatctacaggtcacaccacccctcttcatgtcaccatcccttcctcagcatccacaggtgacaccagcactcttcctgtcaccggcgcttcctcagcatccaccggtcacgccacccctcttcctgtcaccgacacttcctcagtatccaccggtcacgccacgcctcttcctgtcaccagcctttcctcagtatccacaggtgacaccacccctcttcctgtcaccgacgcttcctcggcatccacaggtcaggccacccctcttcctgtcaccagcctttcctcagtatccacaggtgacaccacccctcttcttgtcaccgacgcttcctcagtatccacaggtcacgccacccctcttcctgtcaccgacacttcctcagcatccacaggtgacaccacccgtcttcctgtcacggacacttcctcagcatccacaggtcaggccacccctcttcctgtcaccagcctttcctcagtatccacaggtgacaccacccctcttcttgtcaccgacgcttcctcagtatccacaggtcacgccacccctcttcctgtcaccgacacttcctcagcatccacaggtgacaccacccgtcttcctgtcacggacacttcctcagcatccacaggtcaggccacccctcttcctgtcaccatcccttcctcatcatcctcaggtcacaccacccctcttcctgtcaccagcacttcctcagtatctacaggtcacgtcacccctcttcatgtcaccagcccttcctcagcatccacaggtcacgtcacccctcttcctgtcaccagcacttcctcagcatccacaggtcacgccacccctcttcttgtcaccgacgcttcctcagtgtccacaggtcacgccacgcctcttcctgtcaccgacgcttcctcagcatccacaggtgacaccacccctcttcctgtcaccgacacttcctcagcatccacaggtcaggccacccctcttcctgtcaccagcctttcctcagtatccacaggtgacaccacccctcttcctgtcaccgacgcttcctcagcatccacaggtcacgccacccctcttcctgtcaccatcccttcctcagtatccacaggtgacaccatgcctcttcctgtcactagcccttcctcagcatccacaggtcacgccacccctcttcctgttaccggcctttcctcagcttccacaggtgacaccacccctcttcctgtcaccgacacttcctcagcatccacacgtcacgccacccctcttcctgtcaccgacacttcctcagcttccacagatgacaccacccgtcttcctgtcaccgacgtttcctcggcatccacaggacatgccacccctcttcctgtcaccagcacttcctcagcatccacaggtgacaccacccctcttcctgtcaccgacacttcctcagtatccacaggtcacgccacctctcttcctgtcaccagccgttcctcagcatccacaggtcacgccaccccccttcctgtcaccgacacttcctcagtatccacaggtcacgccacccctcttcctgtcaccagcacttcctcagtatctacaggtcacgccacccctcttcctgtcaccagcccttcctcagcatccacaggtcacgccacccctgttcctgtcaccagcacttcctcagcatccacaggtgacaccacccctcttcctgtcaccaatgcttcctcattatccacaggtcacgccacccctcttcatgtcaccagcccttcctcagcatccagaggtgacaccagcactcttcctgtcaccgatgcttcctcagcatccaccggtcacgccacccctcttcctctcaccagcctttcctcagtatccacaggtgacaccacgcctcttcctgtcaccgacacttcctctgcatccacaggtcaggccacccctcttcctgtcaccagcctttcctcagtatccacaggtgacaccacgcctcttcctgtcaccatcccttcctcagcatcctcaggtcacaccacctctcttcctgtcaccgacgcttcctcagtgtccacaggtcacggcacccctcttcctgtcaccagcacttcctcagcatccacaggtgacaccacccctcttcctgtcaccgacacttcctcagcatccacaggtcacgccacccctcttcctgtcaccgacacttcctcagcatccacaggtcacgccacccctcttcctgtcaccagcctttcctcagtatccacaggtcacgccacccctcttgctgtcagcagtgctacctcagcttccacagtatcctcggactcccctctgaagatggaaacaccaggaatgacaacaccgtcactgaagacagacggtgggagacgcacagccacatcaccaccccccacaacctcccagaccatcatttccaccattcccagcactgccatgcacacccgctccacagctgcccccatccccatcctgcctgagagaggtgaggccatacaggagtttccctcttcccctatggggcaggcgccggggacctggagttcgtcaggaggaccgtggacttcacctccccactcttcaagccggcgactggcttcccccttggctcctctctccgtgattccctctacttcacagacaatggccagatcatcttcccagagtcagactaccagattttctcctaccccaacccactcccaacaggcttcacaggccgggaccctgtggccctggtggctccgttctgggacgatgctgacttctccactggtcgggggaccacattttatcaggaatacgagacgttctatggtgaacacagcctgctagtccagcaggccgagtcttggattagaaagatgacaaacaacgggggctacaaggccaggtgggccctaaaggtcacgtgggtcaatgcccacgcctatcctgcccagtggaccctcgggagcaacacctaccaagccatcctctccacggacgggagcaggtcctatgccctgtttctctaccagagcggtgggatgcagtgggacgtggcccagcgctcaggcaacccggtgctcatgggcttctctagtggagatggctatttcgaaaacagcccactgatgtcccagccagtgtgggagaggtatcgccctgatagattcctgaattccaactcaggcctccaagggctgcagttctacaggctacaccgggaagaaaggcccaactaccgtctcgagtgcctgcagtggctgaagagccagcctcggtggcccagctggggctggaaccaggtctcctgcccttgttcctggcagcagggacgacgggacttacgattccaacccgtcagcataggtcgctggggcctcggcagtaggcagctgtgcagcttcacctcttggcgaggaggcgtgtgctgcagctacgggccctggggagagtttcgtgaaggctggcacgtgcagcgtccttggcagttggcccaggaactggagccacagagctggtgctgccgctggaatgacaagccctacctctgtgccctgtaccagcagaggcggccccacgtgggctgtgctacatacaggcccccacagcccgcctggatgttcggggacccccacatcaccaccttggatggtgtcagttacaccttcaatgggctgggggacttcctgctggtcggggcccaagacgggaactcctccttcctgcttcagggccgcaccgcccagactggctcagcccaggccaccaacttcatcgcctttgcggctcagtaccgctccagcagcctgggccccgtcacggtccaatggctccttgagcctcacgacgcaatccgtgtcctgctggataaccagactgtgacatttcagcctgaccatgaagacggcggaggccaggagacgttcaacgccaccggagtcctcctgagccgcaacggctctgaggtctcggccagcttcgacggctgggccaccgtctcggtgatcgcgctctccaacatcctccacgcctccgccagcctcccgcccgagtaccagaaccgcacggaggggctcctgggggtctggaataacaatccagaggacgacttcaggatgcccaatggctccaccattcccccagggagccctgaggagatgcttttccactttggaatgacctggcagatcaacgggacaggcctccttggcaagaggaatgaccagctgccttccaacttcacccctgttttctactcacaactgcaaaaaaacagctcctgggctgaacatttgatctccaactgtgacggagatagctcatgcatctatgacaccctggccctgcgcaacgcaagcatcggacttcacacgagggaagtcagtaaaaactacgagcaggcgaacgccaccctcaatcagtacccgccctccatcaatggtggtcgtgtgattgaagcctacaaggggcagaccacgctgattcagtacaccagcaatgctgaggatgccaacttcacgctcagagacagctgcaccgacttggagctctttgaaccagtcctgccctgtgaattactgctacaatcaaggccactgctacatctcccagactctgggctgtcagcccatgtgcacctgccccccagccttcactgacagccgctgcttcctggctgggaacaacttcagtccaactgtcaacctagaacttcccttaagagtcatccagctcttgctcagtgaagaggaaaatgcctccatggcagaagtcaacgcctcggtggcatacagactggggaccctggacatgcgggcctttctccgcaacagccaagtggaacgaatcgattctgcagcaccggcctcgggaagccccatccaacactggatggtcatctcggagttccagtaccgccctcggggcccggtcattgacttcctgaacaaccagctgctggccgcggtggtggaggcgttcttataccacgttccacggaggagtgaggagcccaggaacgacgtggtcttccagcccatctccggggaagacgtgcgcgatgtgacagccctgaacgtgagcacgctgaaggcttacttcagatgcgatggctacaagggctacgacctggtctacagcccccagagcggcttcacctgcgtgtccccgtgcagtaggggctactgtgaccatggaggccagtgccaacacctgcccagtgggccccgctgcagctgtgtgtccttctccatctacacggcctggggcgagcactgtgagcacctgagcatgaaactcgacgcgttcttcggcatcttctttggggccctgggcggcctcttgctgctgggggtcgggacgttcgtggtcctgcgcttctggggttgctccggggccaggttctcctatttcctgaactcagctgaggccttgccttgaaggggcagctgtggcctaggctacctcaagactcacctcatccttaccgcacatttaaggcgccattgcttttgggagactggaaaagggaaggtgactgaaggctgtcaggattctt

SEQ ID NO: 155717 - DNA, 15921 bp, Homo sapiens
  Payload ID: 10597
  Gene Symbol: MUC4
  Gene Name: mucin 4, cell surface associated
  ENST ID: ENST00000627476
  CDS Start-End: 1-13211
gaaccacagaggacacattaataactggaagtaaaactgctgccccagtcacctcaacaggctcaacaacagcgacactagagggacaatcaactgcagcttcttcaaggacctctaatcaggacatatcagcttcatctcagaaccaccagactaagagcacggagaccaccagcaaagctcaaaccgacaccctcacgcagatgatgacatcaactcttttttcttccccaagtgtacacaatgtgatggagacagctcctccagatgaaatgaccacatcatttccctccagtgtcaccaacacactcatgatgacatcaaagactataacaatgacaacctccacagactccactcttggaaacacagaagagacatcaacagcaggaactgaaagttctaccccagtgacctcagcagtctcaataacagctggacaggaaggacaatcacgaacaacttcctggaggacctctatccaagacacatcagcttcttctcagaaccactggactcggagcacgcagaccaccagggaatctcaaaccagcaccctaacacacagaaccacttcaactccttctttctctccaagtgtacacaatgtgacagggactgtttctcagaagacatctccttcaggtgaaacagctacctcatccctctgtagtgtcacaaacacatccatgatgacatcagagaagataacagtgacaacctccacaggctccactcttggaaacccaggggagacatcatcagtacctgttactggaagtcttatgccagtcacctcagcagccttagtaacatttgatccagaaggacaatcaccagcaactttctcaaggacttctactcaggacacaacagctttttctaagaaccaccagactcagagcgtggagaccaccagagtatctcaaatcaacaccctcaacaccctcacaccggttacaacatcaactgttttatcctcaccaagtggattcaacccaagtggaacagtttctcaggagacattcccttctggtgaaacaaccacctcatccccttccagtgtcagcaatacattcctggtaacatcaaaggtgttcagaatgccaacctccagagactctactcttggaaacacagaggagacatcactatctgtaagtggaaccatttctgcaatcacttccaaagtttcaaccatatggtggtcagacactctgtcaacagcactctcccccagttctctacctccaaaaatatccacagctttccacacccagcagagtgaaggtgcagagaccacaggacggcctcatgagaggagctcattctctccaggtgtgtctcaagaaatatttactctacatgaaacaacaacatggccttcctcattctccagcaaaggccacacaacttggtcacaaacagaactgccctcaacatcaacaggtgctgccactaggcttgtcacaggaaatccatctacagggacagctggcactattccaagggtcccctctaaggtctcagcaataggggaaccaggagagcccaccacatactcctcccacagcacaactctcccaaaaacaacaggggcaggcgcccagacacaatggacacaagaaacggggaccactggagaggctcttctcagcagcccaagctacagtgtgactcagatgataaaaacggccacatccccatcttcttcacctatgctggatagacacacatcccaacaaattacaacggcaccatcaacaaatcattcaacaatacattccacaagcacctctcctcaggaatcaccagctgtttcccaaaggggtcacactcaagccccgcagaccacacaagaatcacaaaccacgaggtccgtctcccccatgactgacaccaagacagtcaccaccccaggttcttccttcacagccagtgggcactcgccctcagaaattgttcctcaggacgcacccaccataagtgcagcaacaacctttgccccagctcccaccggggatggtcacacaacccaggccccgaccacagcactgcaggcagcacccagcagccatgatgccaccctggggccctcaggaggcacgtcactttccaaaacaggtgcccttactctggccaactctgtagtgtcaacaccagggggcccagaaggacaatggacatcagcctctgccagcacctcacctgacacagcagcagccatgacccatacccaccaggctgagagcacagaggcctctggacaaacacagaccagcgaaccggcctcctcagggtcacgaaccacctcagcgggcacagctaccccttcctcatccggggcgagtggcacaacaccttcaggaagcgaaggaatatccacctcaggagagacgacaaggttttcatcaaacccctccagggacagtcacacaacccagtcaacaaccgaattgctgtccgcctcagccagtcatggtgccatcccagtaagcacaggaatggcgtcttcgatcgtccccggcacctttcatcccaccctctctgaggcctccactgcagggagaccgacaggacagtcaagcccaacttctcccagtgcctctcctcaggagacagccgccatttcccggatggcccagactcagaggacaagaaccagcagagggtctgacactatcagcctggcgtcccaggcaaccgacaccttctcaacagtcccacccacacctccatcgatcacatccactgggcttacatctccacaaaccgagacccacactctgtcaccttcagggtctggtaaaaccttcaccacggccctcatcagcaacgccacccctcttcctgtcacctacgcttcctcggcatccacaggtcacaccacccctcttcatgtcaccgatgcttcctcagtatccacaggtcacgccacccctcttcctgtcaccagcccttcctcagtatccacaggtcacaccacccctcttcctgtcaccgacacttcctcagaatccacaggtcacgtcacccctcttcctgtcaccagcttttcctcagcatccacaggtgacagcacccctcttcctgtcactgacacttcctcagcatccacaggtcacgtcacccctcttcctgtcaccagcctttcctcagcatccacaggtgacaccacccctcttcctgtcactgacacttcctcagcatccacaggtcacgccacctctcttcctgtcaccgacacttcctcagtatccacaggtcacaccacccctcttcctgtcaccgacacttcctcagcatccacaggtcacgccacctctcttcctgtcaccgacacttcctcagtatccacaggtcacaccacccctcttcatgtcactgatgcttcctcagcatccacaggtcaggccacccctcttcctgtcaccagcctttcctcagtatccacaggtgacaccacgcctcttcctgtcactagcccttcctcagcatccacaggtcacgccacccctcttcttgtcaccgacacttcctcagcatccacaggacacgccacccctcttcctgtcaccgacgcttcctcagtgtccacagatcacgccacctctcttcctgtaaccatcccttccgcagcatccacaggtcacaccacccctcttcctgtcaccgacacttcctcagcatccacaggtcaggccacctctcttcttgtcaccgacacttcctcagtatccacaggtgacaccacgcctcttcctgtcactagcacttcctcagcatccacaggtcacgtcactcctcttcatgtcaccagcccttcctcagcatccacaggtcacgccacccctcttcctgtcaccagcctttcctcagcatccacaggtgacaccatgcctcttcctgtcactagcccttcctcagcatccacaggtgacaccacccctcttcctgtcaccgacgcttcctcagtatccacaggtcacaccacccctcttcatgtcactgatgcttcctcagcatccacaggtcaggccacccctcttcctgtcaccagcctttcctcagtatccacaggtgacaccacgcctcttcctgtcactagcccttcctcagcatccacaggtcacgccacccctcttcttgtcaccgacacttcctcagcatccacaggacacgccacccctcttcctgtcaccgacgcttcctcagtgtccacagatcacgccacctctcttcctgtaaccatcccttccgcagcatccacaggtcacaccacccctcttcctgtcaccgacacttcctcagcatccacaggtcaggccacctctcttcttgtcaccgacacttcctcagtatccacaggtgacaccacgcctcttcctgtcactagcacttcctcagcatccacaggtcacgtcactcctcttcatgtcaccagcccttcctcagcatccacaggtcacgccacccctcttcctgtcaccagcctttcctcagcatccacaggtgacaccatgcctcttcctgtcactagcccttcctcagcatccacaggtgacaccacccctcttcctgtcaccgacgcttcctcagtatccacaggtcacaccacccctcttcctgtcaccagcccttcctcagcatctacaggtcacaccacccctcttcctgtcaccgacacttcctcagcatccaaaggtgacaccacccctcttcctgtcaccagcccttcctcagcatctacaggtcacaccacccctcttcctgtcaccgacacttcctcagcatccacaggtgacaccacccctcttcctgtcaccaatgcttcctcattatccacaggtcacgccacccctcttcatgtcaccagcccttcctcagcatccacaggtcacgccacccctcttcctgtcaccagcacttcctcagcatccaccggtcacgccacccctcttcctgtcaccggcctttcctcagctaccacagatgacaccacccgtcttcctgtcaccgacgtttcctcggcatccacaggtcaggccacccctcttcctgtcaccagcctttcctcagtatccacaggtgacaccacgcctcttcctgtcactagcccttcctcagcatccacaggtcacgccagccctcttcttgtcactgacgcttcctcagcatccacaggtcaggccacccctcttcctgtcaccgacacttcctcagtatccacagctcacgccaccccacttcctgtcaccggcctttcttcagcttccacagatgacaccacccgtcttcctgtcaccgacgtttcctcggcatccacaggtcaggccatccctcttcctgtcaccagcccttcctcagcatccacaggtgacaccacccctcttcctgtcaccgacgcttcctcagcatccacaggtgacaccacctctcttcctgtcaccatcccttcctcagcatcttcaggtcacaccacctctcttcctgtcaccgacgcttcctcagtgtccacaggtcacgccacctctcttcttgtcaccgacgcttcctcagtatccacaggtgacaccacccctcttcctgtcaccgacactaactcagcatccacaggtgacaccacccctcttcatgtcaccgacgcttcctcagtatccacaggtcacgccacctctcttcctgtcaccagcctttcctcagcatccacaggtgacaccacgcctcttcctgtcactagcccttcctcagcatcctcaggtcacaccacccctcttcctgtcaccgacgcttcctcagtacccacaggtcacgccacctctcttcctgtcaccgacgcttcctcagtgtccacaggtcacgccacccctcttcctgtcaccgacgcttcctcagtgtccacaggtcatgccacccctcttccggtcaccgacacttcctcagtatctacaggacaggccacccctcttcctgtcaccagcctttcctcagcatccactggtgacaccacgccgcttcctgtcaccgatacttcctcagcatccacaggtcaggacacccctcttcctgtcaccagcctttcctcagtatccacaggtgacaccacgcctcttcctgtcactaacccttcctcagcatccacaggtcacgccacccctcttcttgtcaccgacgcttcctcaatatccacaggtcacgccacctctcttcttgtcaccgacgcttcctcagtatccacaggtcacgccaccgctcttcatgacaccgatgcttcctcattatccacaggggacaccacccctcttcctgtcaccagcccttcctcaacatccacaggtgacaccacccctcttcctgtcaccgaaacttcctcagtatccacaggtcacgccacctctcttcctgtcaccgacacttcctcagcatccacaggtcacgccacctctcttcctgtcaccgacacttcctcagcatccacaggtcacgccacccctcttcctgtcaccgacacttcctcagcatccacaggtcaggccacccctcttcctgtcaccagcccttcctcagcatccacaggtcacgccatccctcttcttgtcaccgacacttcctcagcatccacaggacaggccacccctcttcctgtcaccagcctttcctcagcatccacaggtgacaccacccctcttcctgtcaccgacgcttcctcagtgtccacaggtcacgccacctctcttcctgtcaccagcctttcctcagtatccacaggtgacaccactcctcttcctgtcactagcccttcctcagcatccacaggtcacgccacccctcttcatgtcaccgacgcttcctcagcatccacaggtcacgccacccctcttcctgtcaccagcctttcctcagcatccacaggtgacaccacgcctcttcctgtcactagcccttcctcagcatccacaggtcacgccacccctcttcatgtcaccgacgcttcctcagtatccacaggtgacaccacccctcttcctgtcaccagctcttcctcagcatcctcaggtcacaccacccctcttcctgtcaccgacgcttcctcagcatccacaggtgacaccacccctcttcctgtcaccgacacttcctcagcatccacaggtcacgccacccatcttcctgtcaccggcctttcctcagcttccacaggtgacaccacccgtcttcctgtcaccaacgtttcctcggcatccacaggtcatgccacccctcttcctgtcaccagcacttcctcagcatccacaggtgacaccacccctcttcctggcaccgacacttcctcagtatccacaggtcacaccacccctcttcttgtcaccgacgcttcgtcagtatccacaggtgacaccacccgtcttcctgtcaccagcccttcctcagcatctacaggtcacaccacccctctacctgtcaccgacactccctcagcatccacaggtgacaccacccctcttcctgtcaccaatgcttcctcattatccacacgtcacgccacctctcttcatgtcaccagcccttcctcagcatccacaggtcacgccacctctcttcctgtcaccgacacttccgcagcatccacaggtcacgccacccctcttcctgtcaccagcacttcctcagcatccacaggtgacaccacccctcttcctgtcaccgacacttactcagcatccacaggtcaggccacccctcttcctgtcaccagcctttcctcagtatccacaggtgacaccacgcctcttcctgtcactagcccttcctcagcatccacaggtcacgccactcctcttcttgtcaccgacgcttcctcagcatccacaggtcaggccacccctcttcctgtcaccagcctttcctcagtatccacaggtgacaccacgcctcttcctgtcactagcccttcctcagcatccaccggtcatgccacctctcttcctgtcaccgacacttcctcagcatccacaggtgacaccacctctcttcctgtcaccgacacttcctcagcatacacaggtgacaccacctctcttcctgtcaccgacacttcctcatcatccacaggtgacaccacccctcttcttgtcaccgagacttcctcagtatccacaggtgacaccacccctcttcctgtcaccgacacttcctcagcatccacaggtcacgccacccctcttcctgtcaccaacacttcctcagtatccacaggtcacgccacccctcttcatgtcaccagcccttcctcagcatccacaggtcacaccacccctcttcctgtcaccgacgcttcgtcagtgtccacaggtcacgccacctctcttcctgtcaccgacgcttcctcagtgttcacaggtcatgccacctctcttcctgtcaccatcccttcctcagcatcctcaggtcacaccacccctcttcctgtcaccgacgcttcctcagtgtccacaggtcacgccacctctcttcctgtcaccgacgcttcctcagtgtccacaggtcatgccacccctcttcctgtcaccgacgcttcctcagtgtccacaggtcacgctacccctcttcctctcaccagcctttcctcagtatccacaggtgacaccacgcctcttcctgtcaccgacacttcctcagcatccacaggtcaggccacccctcttcctgtcaccagcctttcctcagtatccacaggtgacaccacccctcttcctgtcaccgacacttcctcagcatccacaggtcacgccacctctcttcctgtcaccgacacttcctcagcatccacaggtcacgccacccctcttcctgacaccgacacttcctcagcatccacaggtcacgccacccttcttcctgtcaccgacacttcctcagcatccataggtcacgccacctctcttcctgtcaccgacacttcctcaatatccacaggtcacgccacccctcttcatgtcaccagcccttcctcagcatccaccggtcacgccaccccgcttcctgtcaccgacacttcctcagcatccacaggtcacgccaaccctcttcatgtcaccagcccttcctcagcatccaccggtcacgccaccccgcttcctgtcaccgacacttcctcagcatccacaggtcacgccacccctcttcctgtcaccagcctttcctcagtatccacaggtgacaccacgcctcttcctgtcactagcccttcctcagcatccacaggtcacaccacccctcttcctgtcaccgacacttcctcagcatccacaggtcaggccaccgctcttcctgtcaccagcacttcctcagcatccacaggtgacaccacccctcttcctgtcaccgacacttcctcagcatccacaggtcaggccacccctcttcctgtcaccagcctttcctcagtatccacaggtgacaccacgcctcttcctgtcactagcccttcctcagcatccacaggtcacgccactcctcttcttgtcaccgacgcttcctcagcatccacaggtcaggccacccctcttcctgtcaccagcctttcctcagtatccacaggtgacaccacgcctcttcctgtcactagcccttcctcagcatccaccggtcatgccacctctcttcctgtcaccgacacttcctcagcatccacaggtgacaccacctctcttcctgtcaccgacacttcctcagcatacacaggtgacaccacctctcttcctgtcaccgacacttcctcatcatccacaggtgacaccacccctcttcttgtcaccgagacttcctcagtatccacaggtcacgccactcctcttcttgtcaccgacgcttcctcagcatccacaggtcacgccacccctcttcatgtcaccagcccttcctcagcatccacaggtgacaccacccctgtgcctgtcaccgacacttcctcagtatccacaggtcacgccacccctcttcctgtcaccggcctttcctcagcttccacaggtgacaccacccgtcttcctgtcaccgacatttcctcggcatccacaggtcaggccacccctcttcctgtcaccaacacttcctcagtatccacaggtgacaccatgcctcttcctgtcactagcccttcctcagcatccacaggtcacgccacccctcttcctgtcaccagcacttcctcagcatccaccggtcacgccacccctgttcctgtcaccagcacttcctcagcatctacaggtcacaccacccctcttcctgtcaccgacacttcctcagcatccacaggtgacaccacccctcttcctgtcaccagcccttcctcagcatctacaggtcacaccacccctcttcatgtcaccatcccttcctcagcatccacaggtgacaccagcactcttcctgtcaccggcgcttcctcagcatccaccggtcacgccacccctcttcctgtcaccgacacttcctcagtatccaccggtcacgccacgcctcttcctgtcaccagcctttcctcagtatccacaggtgacaccacccctcttcctgtcaccgacgcttcctcggcatccacaggtcaggccacccctcttcctgtcaccagcctttcctcagtatccacaggtgacaccacccctcttcttgtcaccgacgcttcctcagtatccacaggtcacgccacccctcttcctgtcaccgacacttcctcagcatccacaggtgacaccacccgtcttcctgtcacggacacttcctcagcatccacaggtcaggccacccctcttcctgtcaccagcctttcctcagtatccacaggtgacaccacccctcttcttgtcaccgacgcttcctcagtatccacaggtcacgccacccctcttcctgtcaccgacacttcctcagcatccacaggtgacaccacccgtcttcctgtcacggacacttcctcagcatccacaggtcaggccacccctcttcctgtcaccatcccttcctcatcatcctcaggtcacaccacccctcttcctgtcaccagcacttcctcagtatctacaggtcacgtcacccctcttcatgtcaccagcccttcctcagcatccacaggtcacgtcacccctcttcctgtcaccagcacttcctcagcatccacaggtcacgccacccctcttcttgtcaccgacgcttcctcagtgtccacaggtcacgccacgcctcttcctgtcaccgacgcttcctcagcatccacaggtgacaccacccctcttcctgtcaccgacacttcctcagcatccacaggtcaggccacccctcttcctgtcaccagcctttcctcagtatccacaggtgacaccacccctcttcctgtcaccgacgcttcctcagcatccacaggtcacgccacccctcttcctgtcaccatcccttcctcagtatccacaggtgacaccatgcctcttcctgtcactagcccttcctcagcatccacaggtcacgccacccctcttcctgttaccggcctttcctcagcttccacaggtgacaccacccctcttcctgtcaccgacacttcctcagcatccacacgtcacgccacccctcttcctgtcaccgacacttcctcagcttccacagatgacaccacccgtcttcctgtcaccgacgtttcctcggcatccacaggacatgccacccctcttcctgtcaccagcacttcctcagcatccacaggtgacaccacccctcttcctgtcaccgacacttcctcagtatccacaggtcacgccacctctcttcctgtcaccagccgttcctcagcatccacaggtcacgccaccccccttcctgtcaccgacacttcctcagtatccacaggtcacgccacccctcttcctgtcaccagcacttcctcagtatctacaggtcacgccacccctcttcctgtcaccagcccttcctcagcatccacaggtcacgccacccctgttcctgtcaccagcacttcctcagcatccacaggtgacaccacccctcttcctgtcaccaatgcttcctcattatccacaggtcacgccacccctcttcatgtcaccagcccttcctcagcatccagaggtgacaccagcactcttcctgtcaccgatgcttcctcagcatccaccggtcacgccacccctcttcctctcaccagcctttcctcagtatccacaggtgacaccacgcctcttcctgtcaccgacacttcctctgcatccacaggtcaggccacccctcttcctgtcaccagcctttcctcagtatccacaggtgacaccacgcctcttcctgtcaccatcccttcctcagcatcctcaggtcacaccacctctcttcctgtcaccgacgcttcctcagtgtccacaggtcacggcacccctcttcctgtcaccagcacttcctcagcatccacaggtgacaccacccctcttcctgtcaccgacacttcctcagcatccacaggtcacgccacccctcttcctgtcaccgacacttcctcagcatccacaggtcacgccacccctcttcctgtcaccagcctttcctcagtatccacaggtcacgccacccctcttgctgtcagcagtgctacctcagcttccacagtatcctcggactcccctctgaagatggaaacaccaggaatgacaacaccgtcactgaagacagacggtgggagacgcacagccacatcaccaccccccacaacctcccagaccatcatttccaccattcccagcactgccatgcacacccgctccacagctgcccccatccccatcctgcctgagagaggtgaggccatacaggagtttccctcttcccctatggggcaggcgccggggacctggagttcgtcaggaggaccgtggacttcacctccccactcttcaagccggcgactggcttcccccttggctcctctctccgtgattccctctacttcacagacaatggccagatcatcttcccagagtcagactaccagattttctcctaccccaacccactcccaacaggcttcacaggccgggaccctgtggccctggtggctccgttctgggacgatgctgacttctccactggtcgggggaccacattttatcaggaatacgagacgttctatggtgaacacagcctgctagtccagcaggccgagtcttggattagaaagatgacaaacaacgggggctacaaggccaggtgggccctaaaggtcacgtgggtcaatgcccacgcctatcctgcccagtggaccctcgggagcaacacctaccaagccatcctctccacggacgggagcaggtcctatgccctgtttctctaccagagcggtgggatgcagtgggacgtggcccagcgctcaggcaacccggtgctcatgggcttctctagtggagatggctatttcgaaaacagcccactgatgtcccagccagtgtgggagaggtatcgccctgatagattcctgaattccaactcaggcctccaagggctgcagttctacaggctacaccgggaagaaaggcccaactaccgtctcgagtgcctgcagtggctgaagagccagcctcggtggcccagctggggctggaaccaggtctcctgcccttgttcctggcagcagggacgacgggacttacgattccaacccgtcagcataggtcgctggggcctcggcagtaggcagctgtgcagcttcacctcttggcgaggaggcgtgtgctgcagctacgggccctggggagagtttcgtgaaggctggcacgtgcagcgtccttggcagttggcccaggaactggagccacagagctggtgctgccgctggaatgacaagccctacctctgtgccctgtaccagcagaggcggccccacgtgggctgtgctacatacaggcccccacagcccgcctggatgttcggggacccccacatcaccaccttggatggtgtcagttacaccttcaatgggctgggggacttcctgctggtcggggcccaagacgggaactcctccttcctgcttcagggccgcaccgcccagactggctcagcccaggccaccaacttcatcgcctttgcggctcagtaccgctccagcagcctgggccccgtcacggtccaatggctccttgagcctcacgacgcaatccgtgtcctgctggataaccagactgtgacatttcagcctgaccatgaagacggcggaggccaggagacgttcaacgccaccggagtcctcctgagccgcaacggctctgaggtctcggccagcttcgacggctgggccaccgtctcggtgatcgcgctctccaacatcctccacgcctccgccagcctcccgcccgagtaccagaaccgcacggaggggctcctgggggtctggaataacaatccagaggacgacttcaggatgcccaatggctccaccattcccccagggagccctgaggagatgcttttccactttggaatgacctggcagatcaacgggacaggcctccttggcaagaggaatgaccagctgccttccaacttcacccctgttttctactcacaactgcaaaaaaacagctcctgggctgaacatttgatctccaactgtgacggagatagctcatgcatctatgacaccctggccctgcgcaacgcaagcatcggacttcacacgagggaagtcagtaaaaactacgagcaggcgaacgccaccctcaatcagtacccgccctccatcaatggtggtcgtgtgattgaagcctacaaggggcagaccacgctgattcagtacaccagcaatgctgaggatgccaacttcacgctcagagacagctgcaccgacttggagctctttgaaccagtcctgccctgtgaattactgctacaatcaaggccactgctacatctcccagactctgggctgtcagcccatgtgcacctgccccccagccttcactgacagccgctgcttcctggctgggaacaacttcagtccaactgtcaacctagaacttcccttaagagtcatccagctcttgctcagtgaagaggaaaatgcctccatggcagaagtcaacgcctcggtggcatacagactggggaccctggacatgcgggcctttctccgcaacagccaagtggaacgaatcgattctgcagcaccggcctcgggaagccccatccaacactggatggtcatctcggagttccagtaccgccctcggggcccggtcattgacttcctgaacaaccagctgctggccgcggtggtggaggcgttcttataccacgttccacggaggagtgaggagcccaggaacgacgtggtcttccagcccatctccggggaagacgtgcgcgatgtgacagccctgaacgtgagcacgctgaaggcttacttcagatgcgatggctacaagggctacgacctggtctacagcccccagagcggcttcacctgcgtgtccccgtgcagtaggggctactgtgaccatggaggccagtgccagcacctgcccagtgggccccgctgcagctgtgtgtccttctccatctacacggcctggggcgagcactgtgagcacctgagcatgaaactcgacgcgttcttcggcatcttctttggggccctgggcggcctcttgctgctgggggtcgggacgttcgtggtcctgcgcttctggggttgctccggggccaggttctcctatttcctgaactcagctgaggccttgccttgaaggggcagctgtggcctaggctacctcaagactcacctcatccttaccgcacatttaaggcgccattgcttttgggagactggaaaagggaaggtgactgaaggctgtcaggattctt

SEQ ID NO: 155718 - DNA, 22291 bp, Homo sapiens
  Payload ID: 10597
  Gene Symbol: MUC4
  Gene Name: mucin 4, cell surface associated
  ENST ID: ENST00000629882
  CDS Start-End: 73-22173
gtctgctcctcacactgcagctgctgggccgtggagcttccccagggagccagggggacttttgccgcagccatgaagggggcacgctggaggagggtcccctgggtgtccctgagctgcctgtgtctctgcctccttccgcatgtggtcccaggaaccacagaggacacattaataactggaagtaaaactcctgccccagtcacctcaacaggctcaacaacagcgacactagagggacaatcaactgcagcttcttcaaggacctctaatcaggacatatcagcttcatctcagaaccaccagactaagagcacggagaccaccagcaaagctcaaaccgacaccctcacgcagatgatgacatcaactcttttttcttccccaagtgtacacaatgtgatggagactgttacgcaggagacagctcctccagatgaaatgaccacatcatttccctccagtgtcaccaacacactcatgatgacatcaaagactataacaatgacaacctccacagactccactcttggaaacacagaagagacatcaacagcaggaactgaaagttctaccccagtgacctcagcagtctcaataacagctggacaggaaggacaatcacgaacaacttcctggaggacctctatccaagacacatcagcttcttctcagaaccactggactcggagcacgcagaccaccagggaatctcaaaccagcaccctaacacacagaaccacttcaactccttctttctctccaagtgtacacaatgtgacagggactgtttctcagaagacatctccttcaggtgaaacagctacctcatccctctgtagtgtcacaaacacatccatgatgacatcagagaagataacagtgacaacctccacaggctccactcttggaaacccaggggagacatcatcagtacctgttactggaagtcttatgccagtcacctcagcagccttagtaacagttgatccagaaggacaatcaccagtaactttctcaaggacttctactcaggacacaacagctttttctaagaaccaccagactcagagcgtggagaccaccagagtatctcaaatcaacaccctcaacaccctcacaccggttacaacatcaactgttttatcctcaccaagtggattcaacccaagtggaacagtttctcaggagacattcccttctggtgaaacaaccatctcatccccttccagtgtcagcaatacattcctggtaacatcaaaggtgttcagaatgccaatctccagagactctactcttggaaacacagaggagacatcactatctgtaagtggaaccatttctgcaatcacttccaaagtttcaaccatatggtggtcagacactctgtcaacagcactctcccccagttctctacctccaaaaatatccacagctttccacacccagcagagtgaaggtgcagagaccacaggacggcctcatgagaggagctcattctctccaggtgtgtctcaagaaatatttactctacatgaaacaacaacatggccttcctcattctccagcaaaggccacacaacttggtcacaaacagaactgccctcaacatcaacaggtgctgccactaggcttgtcacaggaaatccatctacaggggcagctggcactattccaagggtcccctctaaggtctcagcaataggggaaccaggagagcccaccacatactcctcccacagcacaactctcccaaaaacaacaggggcaggcgcccagacacaatggacacaagaaacggggaccactggagaggctcttctcagcagcccaagctacagtgtgactcagatgataaaaacggccacatccccatcttcttcacctatgctggatagacacacatcacaacaaattacaacggcaccatcaacaaatcattcaacaatacattccacaagcacctctcctcaggaatcaccagctgtttcccaaaggggtcacactcaagccccgcagaccacacaagaatcacaaaccacgaggtccgtctcccccatgactgacaccaagacagtcaccaccccaggttcttccttcacagccagtgggcactcgccctcagaaattgttcctcaggacgcacccaccataagtgcagcaacaacctttgccccagctcccaccggggatggtcacacaacccaggccccgaccacagcactgcaggcagcacccagcagccatgatgccaccctggggccctcaggaggcacgtcactttccaaaacaggtgcccttactctggccaactctgtagtgtcaacaccagggggcccagaaggacaatggacatcagcctctgccagcacctcacctgacacagcagcagccatgacccatacccaccaggctgagagcacagaggcctctggacaaacacagaccagcgaaccggcctcctcagggtcacgaaccacctcagcgggcacagctaccccttcctcatccggggcgagtggcacaacaccttcaggaagcgaaggaatatccacctcaggagagacgacaaggttttcatcaaacccctccagggacagtcacacaacccagtcaacaaccgaattgctgtccgcctcagccagtcatggtgccatcccagtaagcacaggaatggcgtcttcgatcgtccccggcacctttcatcccaccctctctgaggcctccactgcagggagaccgacaggacagtcaagcccaacttctcccagtgcctctcctcaggagacagccgccatttcccggatggcccagactcagaggacaagaaccagcagagggtctgacactatcagcctggcgtcccaggcaaccgacaccttctcaacagtcccacccacacctccatcgatcacatccagtgggcttacatctccacaaacccagacccacactctgtcaccttcagggtctggtaaaaccttcaccacggccctcatcagcaacgccacccctcttcctgtcacctacgcttcctcggcatccacaggtcacaccacccctcttcatgtcaccgatgcttcctcagtatccacaggtcacgccacccctcttcctgtcaccgacacttcctcagaatccacaggtcacgccacccctcttcctgtcaccagcccttcctcagtatccacaggtcacaccacccctcttcctgtcaccgacacttcctcagaatccacaggtcatgtcacccctcttcctgtcaccagcctttcctcagcatccacaggtgacagcacccctcttcctgtcactgacacttcctcagcatccacaggtcacgtcacccctcttcctgtcaccagcctttcctcagcatccacaggtgacaccacccctcttcctgtcactgacacttcctcagcatccacaggtcacgccacctctcttcctgtcaccgacacttcctcagtatccacaggtcacaccacccctcttcctgtcaccgacacttcctcagcatccacaggtcacgccacctctcttcctgtcaccgacacttcctcagtatccacagctcacgccaccccacttcctgtcaccggcctttcttcagcttccacagatgacaccacccgtcttcctgtcaccgacgtttcctcggcatccacaggtcaggccatccctcttcctgtcaccagcccttcctcagcatccacaggtgacaccacccctcttcctgtcaccgacgcttcctcagcatccacaggtgacaccacctctcttcctgtcaccatcccttcctcagcatcttcaggtcacaccacctctcttcctgtcaccgacgcttcctcagtgtccacaggtcacgccacctctcttcttgtcaccgacgcttcctcagtatccacaggtgacaccacccctcttcctgtcaccgacactaactcagcatccacaggtgacaccacccctcttcatgtcaccgacgcttcctcagtatccacaggtcacgccacctctcttcctgtcaccagcctttcctcagcatccacaggtgacaccacgcctcttcctgtcactagcccttcctcagcatcctcaggtcacaccacccctcttcctgtcaccgacgcttcctcagtacccacaggtcacgccacctctcttcctgtcaccgacgcttcctcagtgtccacaggtcacgccacccctcttcctgtcaccgacgcttcctcagtgtccacaggtcatgccacccctcttccggtcaccgacacttcctcagtatctacaggacaggccacccctcttcctgtcaccagcctttcctcagcatccactggtgacaccacgccgcttcctgtcaccgatacttcctcagcatccacaggtcaggacacccctcttcctgtcaccagcctttcctcagtatccacaggtgacaccacgcctcttcctgtcactagcccttcctcagcatccacaggtcacgccacccctcttcttgtcaccgacgcttcctcagtatccacaggtcacgccacctctcttcttgtcaccgacgcttcctcagtatccacaggtcacgccaccgctcttcatgtcaccgatgcttcctcattatccacaggggacaccacccctcttcctgtcaccagcccttcctcagcatccacaggtgacaccacccctcttcctgtcaccgacacttcctcagcatccacaggtcacgccacctctcttcctgtcaccgacacttcctcagcatccacaggtcacgccacccctcttcctgtcaccgacacttcctcagcatccacaggtcaggccacccctcttcctgtcaccggcccttcctcagcatccacaggtcacgccatccctcttcttgtcaccgacacttcctcagcatccacaggacaggccacccctcttcctgtcaccagcctttcctcagcatccacaggtgacaccacccctcttcctgtcaccgacgcttcctcagtgtccacaggtcacgccacctctcttcctgtcaccagcctttcctcagtatccacaggtgacaccacccctcttcctgtcaccagcccttcctcagcatcctcaggtcacaccacccctcttcctgtcaccgacgcttcctcagtatccacaggtgacaccacccctcttcctgtcaccagcccttcctcagcatcctcaggtcacaccacccctcttcctgtcaccagcccttcctcagcatcctcaggtcacaccacccctcttcctgtcaccgacgcttcctcagcatccacaggtgacaccacccctcttcctgtcaccgacacttcctcagcatccacaggtcacgccacccatcttcctgtcaccggcctttcctcagcttccacaggtgacaccacccgtcttcctgtcaccaacgtttcctcggcatccacaggtcatgccacccctcttcctgtcaccagcacttcctcagcatccacaggtgacaccacccctcttcctggcaccgacacttcctcagtatccacaggtcacaccacccctcttcttgtcaccgacgcttcgtcagtatccacaggtgacaccacccgtcttcctgtcaccagcccttcctcagcatctacaggtcacaccacccctctacctgtcaccgacactccctcagcatccacaggtgacaccacccctcttcctgtcaccaatgcttcctcattatccacacgtcacaccacctctcttcatgtcaccagcccttcctcagcatccacaggtcacgccacctctcttcctgtcaccgacacttcctcagtatccacaggtcatgccacccctcttcatgtcaccagcccttcctcagcatccacaggtgacaccacccctcttcctgtcaccgacacttactcagcatccacaggtcaggccacccctcttcctgtcaccgacacttcctcagcatccacaggtgacaccacccctcttcctgtcaccgacacttcctcagcatccacaggtcacgccacccctcttcctgtcaccaacacttcctcagtatccacaggtcacgccacccctcttcatgtcaccagcccttcctcagcatccacaggtcacaccacccctcttcctgtcaccgacgcttcgtcagtgtccacaggtcacgccacctctcttcctgtcaccgacgcttcctcagtgttcacaggtcacgccacctcgcttcctgtcaccatcccttcctcagcatcctcaggtcacaccacccctcttcctgtcaccgacgcttcctcagtgtccacaggtcacgccacctctcttcctgtcaccgacgcttcctcagtgtccacaggtcacgccacccctcttcctgtcaccgacgcttcctcagtgtccacaggtcacgctacccctcttcctgtcaccgacacttcctcagtatccacaggtcacgccacccctcttcctctcaccagcctttcctcagtatccacaggtgacaccacgcctcttcctgtcaccgacacttcctcagcatccacaggtcaggccacccctcttcctgtcaccagcctttcctcagtatccacaggtgacaccacccctcttcctgtcaccgacacttcctcagcatccacaggtcacgccacctctcttcctgtcaccgacacttcctcagcatccacaggtcacgccacccctcttcctgacaccgacacttcctcagcatccacaggtcacgccacccctcttcctgtcaccgacacttcctcagcatccacaggtcacgccacccttcttcctgtcaccgacacttcctcagcatccataggtcacgccacccctcttcctgtcaccgacacttcctcaatatccacaggtcacgccacccctcttcatgtcaccagcccttcctcagcatccaccggtcacgccaccccgcttcctgtcaccgacacttcctcagcatccacaggtcacgccaaccctcttcatgtcaccagcccttcctcagcatccaccggtcacgccaccccgcttcctgtcaccgacacttcctcagcatccacaggtcacgccacccctcttcctgtcaccagcctttcctcagtatccacaggtgacaccacgcctcttcctgtcactagcccttcctcagcatccacaggtcacaccacccctcttcctgtcaccgacacttcctcagcatccacaggtcaggccaccgctcttcctgtcaccagcacttcctcagcatccacaggtgacaccacccctcttcctgttaccgacacttcctcagcatccacaggtcaggccacccctcttcctgtcaccagcctttcctcagtatccacaggtgacaccacgcctcttcctgtcactagcccttcctcagcatccacaggtcacgccactcctcttcttgtcaccgacgcttcctcagcatccacaggtcaggccacccctcttcctgtcaccgacacttcctcagcatacacaggtgacaccacctctcttcctgtcaccgacacttcctcatcatccacaggtgacaccacccctcttcttgtcaccgagacttcctcagcatccacaggtcacgccacccctcttcatgtcaccagcccttcctcagcatccacaggtgacaccacccctgtgcctgtcaccgacacttcctcagtatccacaggtcacgccacccctcttcctgtcaccggcctttcctcagcttccacaggtgacaccacccgtcttcctgtcaccgacatttcctcggcatccacaggtcaggccacccctcttcctgtcaccaacacttcctcagcatccacaggtcacgccacccctcttcctgtcaccggcctttcctcagcttccacaggtgacaccacccgtcttcctgtcaccgacatttcctcggcatccacaggtcaggccacccctcttcctgtcaccaacacttcctcagtatccacaggtgacaccatgcctcttcctgtcactagcccttcctcagcatccacaggtcacgccacccctcttcctgtcaccagcacttcctcagcatccaccggtcacgccacccctgttcctgtcaccagcacttcctcagcatctacaggtcacaccacccctcttcctgtcaccgacacttcctcagcatccacaggtgacaccacccctcttcctgtcaccagcccttcctcagcatctacaggtcacaccacccctcttcatgtcaccatcccttcctcagcatccacaggtgacaccagcactcttcctgtcaccggcgcttcctcagcatccaccggtcacgccacccctcttcctgtcaccgacacttcctcagtatccacaggtcacgccacccctcttcctgtcaccagcttttcctcagtatccacaggtgacaccacgcctcttcctgtcaccgacacttcctcagtatccacaggtcacgccacccctcttcctgtcaccagcttttcctcagtatccacaggtgacaccacccctcttcctgtcaccgacgcttcctcggcatccaccggtcacgccacccctcttcctgtcaccgacacttcctcagtatccacaggtcacgccacccctcttcctctcaccagcctttcctcagtatccacaggtgacaccacgactcttcctgtcaccgacacttcctcagtatccacaggtcacgccacccctcttcctgtcaccagcttttcctcagtatccacaggtgacaccacccctcttcctgtcaccgacgcttcctcggcatccaccggtcacgccacccctcttcctgtcaccgacacttcctcagtatccaccggtcacgccacgcctcttcctgtcaccagcctttcctcagtatccacaggtgacaccacccctcttcctgtcaccgacgcttcctcggcatccacaggtcaggccacccctcttcctgtcaccagcctttcctcagtatcaacaggtgacaccacgcctcttcctgtcaccatcccttcctcagcatcctcaggtcacaccacctctcttcctgtcaccgacacttcctcagcatccacaggtcaggccacccctcttcctgtcaccagcctttcctcagtatccacaggtgacaccacccctcttcttgtcaccgacgcttcctcagtatccacaggtcacgccacccctcttcctgtcaccgacacttcctcagcatccacaggtgacaccacccgtcttcctgtcacagacacttcctcagcatccacaggtcaggccacccctcttcctgtcaccagcctttcctcagtatccacaggtgacaccacccctcttcttgtcaccaacacttcctcagtatccagaggtcacgccacctctcttcctgtcaccatcccttcctcatcatcctcaggtcacaccacccctcttcctgtcaccagcacttcctcagtatctacaggtcacgtcacccctcttcctgtcaccagcacttcctcagcatccacaggtcacgccacctctcttcctgtcaccgacacttcctcagtatccacaggtcacgccacctctcttcctgtcaccgacacttcctcagtatccacaggtcacgccacccctcttcctgtcaccgacgcttcctcagtgtccacaggtcacgccacgcctcttcctgtcaccgacgcttcctcagcatccacaggtgacaccacccctcttcctgtcaccaacacttcctcagcatccacaggtcaggccacccctcttcctgtcaccagcctttcctcagtatccacaggtgacaccatgcctcttcctgtcactagcccttcctcagcatccacaggtcacgccacccctcttcctgttaccggcctttcctcagcttccacaggtgacaccacccctcttcctgtcactgacacttcctcagcatccacaggtcacgtcacccctcttcctgtcaccagcctttcctcagcatccacaggtgacagcacccctcttcctgtcactgacacttcctcagcatccacaggtcacgtcacccctcttcctgtcaccagcctttcctcagcatccacaggtgacaccacccctcttcctgtcactgacacttcctcagcatccacaggtcacgccacccctcttcatgtcactgatgcttcctcagcatccacaggtcaggccacccttcttcctgtcaccagcctttcctcagtatccacaggtgacaccacgcctcttcctgtcactagcccttcctcagcatccacaggtcacgccacccctcttcttgtcaccgacacttcctcagcatccacaggacacgccacccctcttcctgtcacggacgcttcctcagtgtccacaggtcacgccacctctcttcctgtaaccatccgttcctcaggttccacaggtcacaccacccctcttcctgtcaccgacacttcctcagcatccacaggtcaggccacctctcttcttgtcaccgacacttcctcagtatccacaggtgacaccacgcctcttcctgtcactagcacttcctcagcatccacaggtcacgtcactcctcttcatgtcaccagcccttcctcagcatccacaggtcacgccacccctcttcctgtcaccagcctttcctcagcatccacaggtgacaccatgcctcttcctgtcactagcccttcctcagcatccacaggtgacaccacccctcttcctgtcaccgacgcttcctcagtatccacaggtcacaccacccctcttcctgtcaccagcccttcctcagcatctacaggtcacaccacccctcttcctgtcaccgacactacctcagcatccaaaggtgacaccacccctcttcctgtcaccagcccttcctcagcatctacaggtcacaccacccctcttcctgtcaccgacacttcctcagcatccacaggtgacaccacccctcttcctgtcaccagcccttcctcagcatccacaggtcacgccacccctcttcctgtcaccaatgcttcctcattatccacaggtcacgccacccctcttcatgtcaccagcccttcctcagcatccacaggtcacgccacccctcttcctgtcaccagcacttcctcagcatccaccggtcacgccacctctcttcctgtcaccagcacttcctcagcatccaccggtcacgccacccctcttcctgtcaccgacaattcctcagtatccacaggtcacgccacccctcttcctgtcaccggcctttcctcagctaccacagatgacaccacccgtcttcctgtcaccgacgtttcctcggcatccacaggtcaggccacccctcttcctgtcaccagcctttcctcagtatccacaggtgacaccacgcctcttcctgtcactagcccttcctcagcatccacaggtcacgccagccctcttcttgtcactgacgcttcctcagcatccacaggtcaggccacccctcttcctgtcaccgacacttcctcagtatccacagctcacgccaccccacttcctgtcaccggcctttcttcagcttccacagatgacaccacccgtcttcctgtcaccgacgtttcctcggcatccacaggtcaggccatccctcttcctgtcaccagcccttcctcagcatccacaggtgacaccacccctcttcctgtcaccgacgcttcctcagcatccacaggtgacaccacctctcttcctgtcaccatcccttcctcagcatcttcaggtcacaccacctctcttcctgtcaccgacgcttcctcagtgtccacaggtcacgccacctctcttcttgtcaccgacgcttcctcagtatccacaggtgacaccacccctcttcctgtcaccgacactaactcagcatccacaggtgacaccacccctcttcatgtcaccgacgcttcctcagtatccacaggtcacgccacctctcttcctgtcaccagcctttcctcagcatccacaggtgacaccacgcctcttcctgtcactagcccttcctcagcatcctcaggtgacaccacccctcttcctgtcaccgacacttcctcagcatccacaggtcacgccacccatcttcctgtcaccggcctttcctcagcttccacaggtgacaccacccgtcttcctgtcaccaacgtttcctcggcatccacaggtcatgccacccctcttcctgtcaccagcacttcctcagcatccacaggtgacaccacccctcttcctggcaccgacacttcctcagtatccacaggtcacaccacccctcttcttgtcaccgacgcttcgtcagtatccacaggtgacaccacccgtcttcctgtcaccagcccttcctcagcatctacaggtcacaccacccctcttcatgtcaccgatgcttcctcagtatccacaggtcacaccacccctcttcctgtcaccgacacttcctcagcatccacaggtcaggccacctctcttcttgtcaccgacacttcctcagtatccacaggtgacaccacgcctcttcctgtcactagcacttcctcagcatccacaggtcacgtcactcctcttcatgtcaccagcccttcctcagcatccacaggtcacgccacccctcttcctgtcaccagcctttcctcagcatccacaggtgacaccacccctcttcctgtcaccgacacttcctcagtatccacaggtcacaccacccctcttcctgtcaccagcccttcctcagcatctacaggtcacaccacccctcttcctgtcaccgacacttcctcagcatccaaaggtgacaccacccctcttcctgtcaccagcccttcctcagcatctacaggtcacaccacccctcttcctgtcaccgacacttcctcagcatccacaggtgacaccacccctcttcctgtcaccaatgcttcctcattatccacaggtcacgccacccctcttcatgtcaccagcccttcctcagcatccacaggtcacgccacccctcttcctgtcaccagcacttcctcagcatccaccggtcacgccacccctcttcctgtcaccagcacttcctcagcatccaccggtcacgccacccctcttcctgtcaccgacaattcctcagtatccacaggtcatgccacccctcttcctgtcaccggcctttcctcagctaccacagatgacaccacccgtcttcctgtcaccgacgtgtcctcggcatccacaggtcaggccacccctcttcctgtcaccagcctttcctcagtatccacaggtgacaccacgcctcttcctgtcactagcccttcctcagcatccacaggtcacgccagccctcttcttgtcactgacgcttcctcagcatccacaggtcaggccacccctcttcctgtcaccgacacttcctcagtatccacagctcacgccaccccacttcctgtcaccggcctttcctcagcttccacagatgacaccacccgtcttcctgtcaccgacgtttcctcggcatccacaggtcaggccatccctcttcctgtcaccagcccttcctcagcatccacaggtgacaccacccctcttcctgtcaccgacgcttcctcagcatccacaggtgacaccacctctcttcctgtcaccatcccttcctcagcatcttcaggtcacaccacctctcttcctgtcaccgacgcttcctcagtgtccacaggtcacgccacctctcttcttgtcaccgacgcttcctcagtatccacaggtgacaccacccctcttcctgtcaccgacactaactcagcatccacaggtgacaccacccctcttcatgtcaccgacgcttcctcagtatccacaggtcacgccacctctcttcctgtcaccagcctttcctcagcatccacaggtgacaccacgcctcttcctgtcactagcccttcctcagcatcctcaggtcacaccacctctcttcctgtcaccgacgcttcctcagtgtccacaggtcacgccacctctcttcctgtcaccatcccttcctcagcatcctcaggtcacaccacccctcttcctgtcaccgacgcttcctcagtacccacaggtcacgccacctctcttcctgtcaccgacgcttcctcagtgtccacaggtcacgccacccctcttcctgtcaccgacgcttcctcagtgtccacaggtcatgccacccctcttccggtcaccgacacttcctcagtatctacaggacaggccacccctcttcctgtcaccagcctttcctcagcatcatccactggtgacaccacgccgcttcctgtcactgatacttcctcagcatccacaggtcaggacacccctcttcctgtcaccagccttttctcagtatccacaggtgacaccacgcctcttcctgtcactagcccttcctcagcatccacaggtcacgccacccatcttcttgtcaccgacgcttcctcagtatccacaggtcacgccacctctcttcttgtcaccgacgcttcctcagtatccacaggtcacgccaccgctcttcatgtcaccgatgcttcctcattatccacaggggacaccacccctcttcctgtcaccagcccttcctcagcatccacaggtgacaccacccctcttcctgtcaccgacacttcctcagtatccacaggtcacgccacctctcttcctgtcactgacacttcctcagcatccacaggtcacgccacctctcttcctgtcaccgacacttcctcagcatccacaggtcaggccacccctcttcctgtcaccagcccttcctcagcatccacaggtcacgccatccctcttcttgtcaccgacacttcctcagcatccacaggacaggccacccctcttcctgtcaccagcctttcctcagcatccacaggtgacaccacccctcttcctgtcaccgatgcttcctcagtgtccacaggtcacgccacctctcttcctgtcaccagcctttcctcagtatccacaggtgacaccacccctcttcctgtcactagcccttcctcagcatccacaggtcacgccacccctcttcatgtcaccagcccttcctcagcatccacaggtcacgccacccctcttcctgtcaccagcctttcctcagcatccacaggtgacaccacgcctcttcctgtcactagcccttcctcagcatccacaggtcacgccacccctcttcatgtcaccgacgcttcctcagtatccacaggtgacaccacccctcttcctgtcaccagcccttcctcagcatcctcaggtcacaccacccctcttcctgtcaccgacgcttcctcagcatccacaggtgacaccacccctcttcctgtcaccgacacttcctcagcatccacaggtcacgccacccatcttcctgtcaccggcctttcctcagcttccacaggtgacaccacccgtcttcctgtcaccgacgtttcctcggcatccacaggtcatgccacccctcttcctgtcaccagcacttcctcagcatccacaggtgacaccacccctcttcctggcaccgacacttcctcagtatccacaggtcacaccacccctcttcttgtcaccgacgcttcgtcagtatccacaggtgacaccacccgtcttcctgtcaccagcccttcctcagcatctacaggtcacaccacccctctacctgtcaccgacactccctcagcatccacaggtgacaccacccctcttcctgtcaccaatgcttcctcattatccacacgtcacgccacctctcttcatgtcaccagcccttcctcagcatccaccggtcacgccacccctcttcctgttaccgacacttccgcagcatccacaggtcacgccacccctcttcctgtcaccagcacttcctcagcatccacaggtgacaccacccctcttcctgtcaccgacacttcctcagcatccacaggtcacgccacccctcttcctgtcaccaacacttcctcagtatccacaggtcacgccacccctcttcatgtcaccagcccttcctcagcatccacaggtcacaccacccctcttcctgtcaccgacgcttcgtcagtgtccacaggtcacgccacctctcttcctgtcaccgacgcttcctcagtgtccacaggtcacgccacccctcttcctgtcaccgacgcttcctcagtgtccacaggtcacgctacccctcttcctctcaccagcctttcctcagtatccacaggtgacaccacgcctcttcctgtcaccgacacttcctcagcatccacaggtcaggccacccctcttcctgtcaccagcctttcctcagtatccacaggtgacaccacccctcttcctgtcaccgacacttcctcagcatccacaggtcacgccacctctcttcctgtcaccgacacttcctcagcatccacaggtcacgccacccctcttcctgtcaccgacacttcctcaatatccacaggtcacgccacccctcttcatgtcaccagcccttcctcagcatccaccggtcacgccaccccgcttcctgtcaccgacacttcctcagcatccacaggtcacgccacccctcttcctgtcaccagcctttcctcagtatccacaggtgacaccacgcctcttcctgtcactagcccttcctcagcatccacaggtcacgccactcctcttcttgtcaccgacgcttcctcagcatccacaggtcaggccacccctcttcctgtcaccagcctttcctcagtatccacaggtgacaccacgcctcttcctgtcactagcccttcctcagcatccaccggtcatgccacctctcttcctgtcaccgacacttcctcagcatccacaggtgacaccacctctcttcctgtcaccgacacttcctcagcatacacaggtgacaccacctctcttcctgtcaccgacacttcctcatcatccacaggtgacaccacccctcttcttgtcaccgagacttcctcagcatccacaggtgacaccacccctgtgcctgtcaccgacacttcctcagtatccacaggtcacgccacccctcttcctgtcaccggcctttcctcagcttccacaggtgacaccacccgtcttcctgtcaccgacatttcctcggcatccacaggtcaggccacccctcttcctgtcaccaacacttcctcagtatccacaggtgacaccatgcctcttcctgtcactagcccttcctcagcatccacaggtcacgccacccctcttcctgtcaccagcacttcctcagcatccaccggtcacgccacccctgttcctgtcaccagcacttccttagcatccacaggtcacaccacccctcttcctgtcaccagcccttcctcagcatctacaggtcacaccacccctcttcctgtcaccgacacttcctcagcatccacaggtgacaccacccctcttcctgtcaccaatgcttcctcattatccacaggacacaccacccctcttcatgtcaccatcccttcctcagcatccacaggtgacaccagcactcttcctgtcaccggcgcttcctcagcatccaccggtcacgccacccctcttcctgtcaccgacacttcctcagtatccacaggtcacgccacccctcttcctgtcaccagcttttcctcagtatccacaggtgacaccacccctcttcctgtcaccgacgcttcctcggcatccaccggtcacgccacccctcttcctgtcaccgacacttcctcagcatccacaggtgacaccacccctcttcctgtcaccgacgcttcctcggcatccacaggtcaggccacccctcttcctgtcaccagcctttcctcagtatcaacaggtgacaccacgcctcttcctgtcaccatcccttcctcagcatcctcaggtcacaccacctctcttcctgtcagcgacacttcctcagcatccacaggtcaggccacccctcttcctgtcaccagcctttcctcagtatccacaggtgacaccacccctcttcttgtcaccgacgcttcctcagtatccacaggtcacgccacccctcttcctgtcaccgacacttcctcagcatccacaggtgacaccacccgtcttcctgtcacggacacttcctcagcatccacaggtcaggccacccctcttcctgtcaccagcctttcctcagtatccacaggtgacaccacccctcttcttgtcaccaacacttcctcagtatccacaggtcacgccacctctcttcctgtcaccatcccttcctcatcatcctcaggtcacaccacccctcttcctgtcaccagcacttcctcagtatctacaggtcacgtcacccctcttcatgtcaccagcccttcctcatcatccacaggtcaggccacccctcttcctgtcaccagcacttcctcagtatctacaggtcacgtcacccctcttcatgtcaccagcccttcctcagcatccacaggtcacgccacccctcttcctgtcaccagcacttcctcagcatccacaggtcacgccacccctcttcctgtcaccgacgcttcctcagtgtccacaggtcacgccacgcctcttcctgtcaccgacacttcctcagcatccacaggtgacaccacccctcttcctgtcaccgacacttcctcagcatccacaggtcaggccacccctcttcctgtcaccagcctttcctcagtatccacaggtcacgccacccctcttgctgtcagcagtgctacctcagcttccacagtatcctcggactcccctctgaagatggaaacatcaggaatgacaacaccgtcactgaagacagacggtgggagacgcacagccacatcaccaccccccacaacctcccagaccatcatttccaccattcccagcactgccatgcacacccgctccacagctgcccccatccccatcctgcctgagagaggagtttccctcttcccctatggggcagacgccggggacctggagttcgtcaggaggaccgtggacttcacctccccactcttcaagccggcgactggcttcccccttggctcctctctccgtgattccctctacttcacagacaatggccagatcatcttcccagagtcagactaccagattttctcctaccccaacccactcccaacaggcttcacaggccgggaccctgtggccctggtggctccgttctgggacgatgctgacttctccactggtcgggggaccacattttatcagagcaacacctaccaagccatcctctccacggacgggagcaggtcctatgccctgtttctctaccagagcggtgggatgcagtgggacgtggcccagcgctcaggcaacccggtgctcatgggcttctctagtggagatggctatttcgaaaacagcccactgatgtcccagccagtgtgggagaggtatcgccctgatagattcctgaattccaactcaggcctccaagggctgcagttctacaggctacaccgggaagaaaggcccaactaccgtctcgagtgcctgcagtggctgaagagccagcctcggtggcccagctggggctggaaccaggtctcctgcccttgttcctggcagcagggacgacgggacttacgattccaacccgtcagcataggtcgctggggcctcggcagtaggcagctgtgcagcttcacctcttggcgaggaggcgtgtgctgcagctacgggccctggggagagtttcgtgaaggctggcacgtgcagcgtccttggcagttggcccaggaactggagccacagagctggtgctgccgctggaatgacaagccctacctctgtgccctgtaccagcagaggcggccccacgtgggctgtgctacatacaggcccccacagcccgcctggatgttcggggacccccacatcaccaccttggatggtgtcagttacaccttcaatgggctgggggacttcctgctggtcggggcccaagacgggaactcctccttcctgcttcagggccgcaccgcccagactggctcagcccaggccaccaacttcatcgcctttgcggctcagtaccgctccagcagcctgggccccgtcacggtccaatggctccttgagcctcacgacgcaatccgtgtcctgctggataaccagactgtgacatttcagcctgaccatgaagacggcggaggccaggagacgttcaacgccaccggagtcctcctgagccgcaacggctctgaggtctcggccagcttcgacggctgggccaccgtctcggtgatcgcgctctccaacatcctccacgcctccgccagcctcccgcccgagtaccagaaccgcacggaggggctcctgggggtctggaataacaatccagaggacgacttcaggatgcccaatggctccaccattcccccagggagccctgaggagatgcttttccactttggaatgacctggcagatcaacgggacaggcctccttggcaagaggaatgaccagctgccttccaacttcacccctgttttctactcacaactgcaaaaaaacagctcctgggctgaacatttgatctccaactgtgacggagatagctcatgcatctatgacaccctggccctgcgcaacgcaagcatcggacttcacacgagggaagtcagtaaaaactacgagcaggcgaacgccaccctcaatcagtacccgccctccatcaatggtggtcgtgtgattgaagcctacaaggggcagaccacgctgattcagtacaccagcaatgctgaggatgccaacttcacgctcagagacagctgcaccgacttggagctctttgagaatgggacgttgctgtggacacccaagtcgctggagccattcactctggagattctagcaagaagtgccaagattggcttggcatctgcactccagcccaggactgtggtctgccattgcaatgcagagagccagtgtttgtacaatcagaccagcagggtgggcaactcctccctggaggtggctggctgcaagtgtgacgggggcaccttcggccgctactgcgagggctccgaggatgcctgtgaggagccgtgcttcccgagtgtccactgcgttcctgggaagggctgcgaggcctgccctccaaacctgactggggatgggcggcactgtgcggctctggggagctctttcctgtgtcagaaccagtcctgccctgtgaattactgctacaatcaaggccactgctacatctcccagactctgggctgtcagcccatgtgcacctgccccccagccttcactgacagccgctgcttcctggctgggaacaacttcagtccaactgtcaacctagaacttcccttaagagtcatccagctcttgctcagtgaagaggaaaatgcctccatggcagaagtcaacgcctcggtggcatacagactggggaccctggacatgcgggcctttctccgcaacagccaagtggaacgaatcgattctgcagcaccggcctcgggaagccccatccaacactggatggtcatctcggagttccagtaccgccctcggggcccggtcattgacttcctgaacaaccagctgctggccgcggtggtggaggcgttcttataccacgttccacggaggagtgaggagcccaggaacgacgtggtcttccagcccatctccggggaagacgtgcgcgatgtgacagccctgaacgtgagcacgctgaaggcttacttcagatgcgatggctacaagggctacgacctggtctacagcccccagagcggcttcacctgcgtgtccccgtgcagtaggggctactgtgaccatggaggccagtgccagcacctgcccagtgggccccgctgcagctgtgtgtccttctccatctacacggcctggggcgagcactgtgagcacctgagcatgaaactcgacgcgttcttcggcatcttctttggggccctgggcggcctcttgctgctgggggtcgggacgttcgtggtcctgcgcttctggggttgctccggggccaggttctcctatttcctgaactcagctgaggccttgccttgaaggggcagctgtggcctaggctacctcaagactcacctcatccttaccgcacatttaaggcgccattgcttttgggagactggaaaagggaaggtgactgaaggctgtcaggattctt

SEQ ID NO: 155719 - DNA, 16569 bp, Homo sapiens
  Payload ID: 10597
  Gene Symbol: MUC4
  Gene Name: mucin 4, cell surface associated
  ENST ID: ENST00000626248
  CDS Start-End: 1-16160
gaaccacagaggacacattaataactggaagtaaaactgctgccccagtcacctcaacaggctcaacaacagcgacactagagggacaatcaactgcagcttcttcaaggacctctaatcaggacatatcagcttcatctcagaaccaccagactaagagcacggagaccaccagcaaagctcaaaccgacaccctcacgcagatgatgacatcaactcttttttcttccccaagtgtacacaatgtgatggagacagctcctccagatgaaatgaccacatcatttccctccagtgtcaccaacacactcatgatgacatcaaagactataacaatgacaacctccacagactccactcttggaaacacagaagagacatcaacagcaggaactgaaagttctaccccagtgacctcagcagtctcaataacagctggacaggaaggacaatcacgaacaacttcctggaggacctctatccaagacacatcagcttcttctcagaaccactggactcggagcacgcagaccaccagggaatctcaaaccagcaccctaacacacagaaccacttcaactccttctttctctccaagtgtacacaatgtgacagggactgtttctcagaagacatctccttcaggtgaaacagctacctcatccctctgtagtgtcacaaacacatccatgatgacatcagagaagataacagtgacaacctccacaggctccactcttggaaacccaggggagacatcatcagtacctgttactggaagtcttatgccagtcacctcagcagccttagtaacatttgatccagaaggacaatcaccagcaactttctcaaggacttctactcaggacacaacagctttttctaagaaccaccagactcagagcgtggagaccaccagagtatctcaaatcaacaccctcaacaccctcacaccggttacaacatcaactgttttatcctcaccaagtggattcaacccaagtggaacagtttctcaggagacattcccttctggtgaaacaaccacctcatccccttccagtgtcagcaatacattcctggtaacatcaaaggtgttcagaatgccaacctccagagactctactcttggaaacacagaggagacatcactatctgtaagtggaaccatttctgcaatcacttccaaagtttcaaccatatggtggtcagacactctgtcaacagcactctcccccagttctctacctccaaaaatatccacagctttccacacccagcagagtgaaggtgcagagaccacaggacggcctcatgagaggagctcattctctccaggtgtgtctcaagaaatatttactctacatgaaacaacaacatggccttcctcattctccagcaaaggccacacaacttggtcacaaacagaactgccctcaacatcaacaggtgctgccactaggcttgtcacaggaaatccatctacagggacagctggcactattccaagggtcccctctaaggtctcagcaataggggaaccaggagagcccaccacatactcctcccacagcacaactctcccaaaaacaacaggggcaggcgcccagacacaatggacacaagaaacggggaccactggagaggctcttctcagcagcccaagctacagtgtgactcagatgataaaaacggccacatccccatcttcttcacctatgctggatagacacacatcccaacaaattacaacggcaccatcaacaaatcattcaacaatacattccacaagcacctctcctcaggaatcaccagctgtttcccaaaggggtcacactcaagccccgcagaccacacaagaatcacaaaccacgaggtccgtctcccccatgactgacaccaagacagtcaccaccccaggttcttccttcacagccagtgggcactcgccctcagaaattgttcctcaggacgcacccaccataagtgcagcaacaacctttgccccagctcccaccggggatggtcacacaacccaggccccgaccacagcactgcaggcagcacccagcagccatgatgccaccctggggccctcaggaggcacgtcactttccaaaacaggtgcccttactctggccaactctgtagtgtcaacaccagggggcccagaaggacaatggacatcagcctctgccagcacctcacctgacacagcagcagccatgacccatacccaccaggctgagagcacagaggcctctggacaaacacagaccagcgaaccggcctcctcagggtcacgaaccacctcagcgggcacagctaccccttcctcatccggggcgagtggcacaacaccttcaggaagcgaaggaatatccacctcaggagagacgacaaggttttcatcaaacccctccagggacagtcacacaacccagtcaacaaccgaattgctgtccgcctcagccagtcatggtgccatcccagtaagcacaggaatggcgtcttcgatcgtccccggcacctttcatcccaccctctctgaggcctccactgcagggagaccgacaggacagtcaagcccaacttctcccagtgcctctcctcaggagacagccgccatttcccggatggcccagactcagaggacaagaaccagcagagggtctgacactatcagcctggcgtcccaggcaaccgacaccttctcaacagtcccacccacacctccatcgatcacatccactgggcttacatctccacaaaccgagacccacactctgtcaccttcagggtctggtaaaaccttcaccacggccctcatcagcaacgccacccctcttcctgtcacctacgcttcctcggcatccacaggtcacaccacccctcttcatgtcaccgatgcttcctcagtatccacaggtcacgccacccctcttcctgtcaccagcccttcctcagtatccacaggtcacaccacccctcttcctgtcaccgacacttcctcagaatccacaggtcacgtcacccctcttcctgtcaccagcttttcctcagcatccacaggtgacagcacccctcttcctgtcactgacacttcctcagcatccacaggtcacgtcacccctcttcctgtcaccagcctttcctcagcatccacaggtgacaccacccctcttcctgtcactgacacttcctcagcatccacaggtcacgccacctctcttcctgtcaccgacacttcctcagtatccacaggtcacaccacccctcttcctgtcaccgacacttcctcagcatccacaggtcacgccacctctcttcctgtcaccgacacttcctcagtatccacaggtcacaccacccctcttcatgtcactgatgcttcctcagcatccacaggtcaggccacccctcttcctgtcaccagcctttcctcagtatccacaggtgacaccacgcctcttcctgtcactagcccttcctcagcatccacaggtcacgccacccctcttcttgtcaccgacacttcctcagcatccacaggacacgccacccctcttcctgtcaccgacgcttcctcagtgtccacagatcacgccacctctcttcctgtaaccatcccttccgcagcatccacaggtcacaccacccctcttcctgtcaccgacacttcctcagcatccacaggtcaggccacctctcttcttgtcaccgacacttcctcagtatccacaggtgacaccacgcctcttcctgtcactagcacttcctcagcatccacaggtcacgtcactcctcttcatgtcaccagcccttcctcagcatccacaggtcacgccacccctcttcctgtcaccagcctttcctcagcatccacaggtgacaccatgcctcttcctgtcactagcccttcctcagcatccacaggtgacaccacccctcttcctgtcaccgacgcttcctcagtatccacaggtcacaccacccctcttcatgtcactgatgcttcctcagcatccacaggtcaggccacccctcttcctgtcaccagcctttcctcagtatccacaggtgacaccacgcctcttcctgtcactagcccttcctcagcatccacaggtcacgccacccctcttcttgtcaccgacacttcctcagcatccacaggacacgccacccctcttcctgtcaccgacgcttcctcagtgtccacagatcacgccacctctcttcctgtaaccatcccttccgcagcatccacaggtcacaccacccctcttcctgtcaccgacacttcctcagcatccacaggtcaggccacctctcttcttgtcaccgacacttcctcagtatccacaggtgacaccacgcctcttcctgtcactagcacttcctcagcatccacaggtcacgtcactcctcttcatgtcaccagcccttcctcagcatccacaggtcacgccacccctcttcctgtcaccagcctttcctcagcatccacaggtgacaccatgcctcttcctgtcactagcccttcctcagcatccacaggtgacaccacccctcttcctgtcaccgacgcttcctcagtatccacaggtcacaccacccctcttcctgtcaccagcccttcctcagcatctacaggtcacaccacccctcttcctgtcaccgacacttcctcagcatccaaaggtgacaccacccctcttcctgtcaccagcccttcctcagcatctacaggtcacaccacccctcttcctgtcaccgacacttcctcagcatccacaggtgacaccacccctcttcctgtcaccaatgcttcctcattatccacaggtcacgccacccctcttcatgtcaccagcccttcctcagcatccacaggtcacgccacccctcttcctgtcaccagcacttcctcagcatccaccggtcacgccacccctcttcctgtcaccggcctttcctcagctaccacagatgacaccacccgtcttcctgtcaccgacgtttcctcggcatccacaggtcaggccacccctcttcctgtcaccagcctttcctcagtatccacaggtgacaccacgcctcttcctgtcactagcccttcctcagcatccacaggtcacgccagccctcttcttgtcactgacgcttcctcagcatccacaggtcaggccacccctcttcctgtcaccgacacttcctcagtatccacagctcacgccaccccacttcctgtcaccggcctttcttcagcttccacagatgacaccacccgtcttcctgtcaccgacgtttcctcggcatccacaggtcaggccatccctcttcctgtcaccagcccttcctcagcatccacaggtgacaccacccctcttcctgtcaccgacgcttcctcagcatccacaggtgacaccacctctcttcctgtcaccatcccttcctcagcatcttcaggtcacaccacctctcttcctgtcaccgacgcttcctcagtgtccacaggtcacgccacctctcttcttgtcaccgacgcttcctcagtatccacaggtgacaccacccctcttcctgtcaccgacactaactcagcatccacaggtgacaccacccctcttcatgtcaccgacgcttcctcagtatccacaggtcacgccacctctcttcctgtcaccagcctttcctcagcatccacaggtgacaccacgcctcttcctgtcactagcccttcctcagcatcctcaggtcacaccacccctcttcctgtcaccgacgcttcctcagtacccacaggtcacgccacctctcttcctgtcaccgacgcttcctcagtgtccacaggtcacgccacccctcttcctgtcaccgacgcttcctcagtgtccacaggtcatgccacccctcttccggtcaccgacacttcctcagtatctacaggacaggccacccctcttcctgtcaccagcctttcctcagcatccacaggtgacaccacccctcttcctgtcaccgacacttcctcagcatccacaggtcacgccccccatcttcctgtcaccggcctttcctcagcttccacaggtgacaccacccgtcttcctgtcaccaacgtttcctcggcatccacaggtcatgccacccctcttcctgtcaccagcacttcctcagcatccacaggtgacaccacccctcttcctggcaccgacacttcctcagtatccacaggtcacaccacccctcttcttgtcaccgacgcttcgtcagtatccacaggtgacaccacccgtcttcctgtcaccagcccttcctcagcatctacaggtcacaccacccctcttcatgtcaccgatgcttcctcagtatccacaggtcacaccacccctcttcctgtcaccgacacttcctcagcatccacaggtcaggccacctctcttcttgtcaccgacacttcctcagtatccacaggtgacaccacgcctcttcctgtcactagcacttcctcagcatccacaggtcacgtcactcctcttcatgtcaccagcccttcctcagcatccacaggtcacgccacccctcttcctgtcaccagcctttcctcagcatccacaggtgacaccacccctcttcctgtcaccgacacttcctcagtatccacaggtcacaccacccctcttcctgtcaccagcccttcctcagcatctacaggtcacaccacccctcttcctgtcaccgacacttcctcagcatccaaaggtgacaccacccctcttcctgtcaccagcccttcctcagcatctacaggtcacaccacccctcttcctgtcaccgacacttcctcagcatccacaggtgacaccacccctcttcctgtcaccaatgcttcctcattatccacaggtcacgccacccctcttcatgtcaccagcccttcctcagcatccacaggtcacgccacccctcttcctgtcaccagcacttcctcagcatccaccggtcacgccacccctcttcctgtcaccagcacttcctcagcatccaccggtcacgccacccctcttcctgtcaccgacaattcctcagtatccacaggtcatgccacccctcttcctgtcaccggcctttcctcagctaccacagatgacaccacccgtcttcctgtcaccgacgtgtcctcggcatccacaggtcaggccacccctcttcctgtcaccagcctttcctcagtatccacaggtgacaccacgcctcttcctgtcactagcccttcctcagcatccacaggtcacgccagccctcttcttgtcactgacgcttcctcagcatccacaggtcaggccacccctcttcctgtcaccgacacttcctcagtatccacagctcacgccaccccacttcctgtcaccggcctttcctcagcttccacagatgacaccacccgtcttcctgtcaccgacgtttcctcggcatccacaggtcaggccatccctcttcctgtcaccagcccttcctcagcatccacaggtgacaccacccctcttcctgtcaccgacgcttcctcagcatccacaggtgacaccacctctcttcctgtcaccatcccttcctcagcatcttcaggtcacaccacctctcttcctgtcaccgacgcttcctcagtgtccacaggtcacgccacctctcttcttgtcaccgacgcttcctcagtatccacaggtgacaccacccctcttcctgtcaccgacactaactcagcatccacaggtgacaccacccctcttcatgtcaccgacgcttcctcagtatccacaggtcacgccacctctcttcctgtcaccagcctttcctcagcatccacaggtgacaccacgcctcttcctgtcactagcccttcctcagcatcctcaggtcacaccacctctcttcctgtcaccgacgcttcctcagtgtccacaggtcacgccacctctcttcctgtcaccatcccttcctcagcatcctcaggtcacaccacccctcttcctgtcaccgacgcttcctcagtacccacaggtcacgccacctctcttcctgtcaccgacgcttcctcagtgtccacaggtcacgccacccctcttcctgtcaccgacgcttcctcagtgtccacaggtcatgccacccctcttccggtcaccgacacttcctcagtatctacaggacaggccacccctcttcctgtcaccagcctttcctcagcatcatccactggtgacaccacgccgcttcctgtcactgatacttcctcagcatccacaggtcaggacacccctcttcctgtcaccagccttttctcagtatccacaggtgacaccacgcctcttcctgtcactagcccttcctcagcatccacaggtcacgccacccatcttcttgtcaccgacgcttcctcagtatccacaggtcacgccacctctcttcttgtcaccgacgcttcctcagtatccacaggtcacgccaccgctcttcatgtcaccgatgcttcctcattatccacaggggacaccacccctcttcctgtcaccagcccttcctcagcatccacaggtgacaccacccctcttcctgtcaccgacacttcctcagtatccacaggtcacgccacctctcttcctgtcactgacacttcctcagcatccacaggtcacgccacctctcttcctgtcaccgacacttcctcagcatccacaggtcaggccacccctcttcctgtcaccagcccttcctcagcatccacaggtcacgccatccctcttcttgtcaccgacacttcctcagcatccacaggacaggccacccctcttcctgtcaccagcctttcctcagcatccacaggtgacaccacccctcttcctgtcaccgatgcttcctcagtgtccacaggtcacgccacctctcttcctgtcaccagcctttcctcagtatccacaggtgacaccacccctcttcctgtcactagcccttcctcagcatccacaggtcacgccacccctcttcatgtcaccagcccttcctcagcatccacaggtcacgccacccctcttcctgtcaccagcctttcctcagcatccacaggtgacaccacgcctcttcctgtcactagcccttcctcagcatccacaggtcacgccacccctcttcatgtcaccgacgcttcctcagtatccacaggtgacaccacccctcttcctgtcaccagcccttcctcagcatcctcaggtcacaccacccctcttcctgtcaccgacgcttcctcagcatccacaggtgacaccacccctcttcctgtcaccgacacttcctcagcatccacaggtcacgccacccatcttcctgtcaccggcctttcctcagcttccacaggtgacaccacccgtcttcctgtcaccgacgtttcctcggcatccacaggtcatgccacccctcttcctgtcaccagcacttcctcagcatccacaggtgacaccacccctcttcctggcaccgacacttcctcagtatccacaggtcacaccacccctcttcttgtcaccgacgcttcgtcagtatccacaggtgacaccacccgtcttcctgtcaccagcccttcctcagcatctacaggtcacaccacccctctacctgtcaccgacactccctcagcatccacaggtgacaccacccctcttcctgtcaccaatgcttcctcattatccacacgtcacgccacctctcttcatgtcaccagcccttcctcagcatccaccggtcacgccacccctcttcctgttaccgacacttccgcagcatccacaggtcacgccacccctcttcctgtcaccagcacttcctcagcatccacaggtgacaccacccctcttcctgtcaccgacacttcctcagcatccacaggtcatgccacccctcttcctgtcaccaacacttcctcagtatccacaggtcacgccacccctcttcatgtcaccagcccttcctcagcatccacaggtcacaccacccctcttcctgtcaccgacgcttcgtcagtgtccacaggtcacgccacctctcttcctgtcaccgacgcttcctcagtgtccacaggtcacgccacccctcttcctgtcaccgacgcttcctcagtgtccacaggtcacgctacccctcttcctctcaccagcctttcctcagtatccacaggtgacaccacgcctcttcctgtcaccgacacttcctcagcatccacaggtcaggccacccctcttcctgtcaccagcctttcctcagtatccacaggtgacaccacccctcttcctgtcaccgacacttcctcagcatccacaggtcacgccacctctcttcctgtcaccgacacttcctcagcatccacaggtcacgccacccctcttcatgtcaccagcccttcctcagcatccaccggtcacgccaccccgcttcctgtcaccgacacttcctcagcatccacaggtcacgccacccctcttcctgtcaccagcctttcctcagtatccacaggtgacaccacgcctcttcctgtcactagcccttcctcagcatccacaggtcacgccactcctcttcttgtcaccgacgcttcctcagcatccacaggtcaggccacccctcttcctgtcaccagcctttcctcagtatccacaggtgacaccacgcctcttcctgtcactagcccttcctcagcatccaccggtcatgccacctctcttcctgtcaccgacacttcctcagcatccacaggtgacaccacctctcttcctgtcaccgacacttcctcagcatacacaggtgacaccacctctcttcctgtcaccgacacttcctcatcatccacaggtgacaccacccctcttcttgtcaccgagacttcctcagcatccacaggtgacaccacccctgtgcctgtcaccgacacttcctcagtatccacaggtcacgccacccctcttcctgtcaccggcctttcctcagcttccacaggtgacaccacccgtcttcctgtcaccgacatttcctcggcatccacaggtcaggccacccctcttcctgtcaccaacacttcctcagtatccacaggtgacaccatgcctcttcctgtcactagcccttcctcagcatccacaggtcacgccacccctcttcctgtcaccagcacttcctcagcatccaccggtcacgccacccctgttcctgtcaccagcacttcctcagcatccacaggtcacaccacccctcttcctgtcaccagcccttcctcagcatctacaggtcacaccacccctcttcctgtcaccgacacttcctcagcatccacaggtgacaccacccctcttcctgtcaccaatgcttcctcattatccacaggacacaccacccctcttcatgtcaccatcccttcctcagcatccacaggtgacaccagcactcttcctgtcaccggcgcttcctcagcatccaccggtcacgccacccctcttcctgtcaccgacacttcctcagtatccacaggtcacgccacccctcttcctgtcaccagcttttcctcagtatccacaggtgacaccacccctcttcctgtcaccgacgcttcctcggcatccaccggtcacgccacccctcttcctgtcaccgacacttcctcagcatccacaggtgacaccacccctcttcctgtcaccgacgcttcctcggcatccacaggtcaggccacccctcttcctgtcaccagcctttcctcagtatcaacaggtgacaccacgcctcttcctgtcaccatcccttcctcagcatcctcaggtcacaccacctctcttcctgtcagcgacacttcctcagcatccacaggtcaggccacccctcttcctgtcaccagcctttcctcagtatccacaggtgacaccacccctcttcttgtcaccgacgcttcctcagtatccacaggtcacgccacccctcttcctgtcaccgacacttcctcagcatccacaggtgacaccacccgtcttcctgtcacggacacttcctcagcatccacaggtcaggccacccctcttcctgtcaccagcctttcctcagtatccacaggtgacaccacccctcttcttgtcaccaacacttcctcagtatccacaggtcacgccacctctcttcctgtcaccatcccttcctcatcatcctcaggtcacaccacccctcttcctgtcaccagcacttcctcagtatctacaggtcacgtcacccctcttcatgtcaccagcccttcctcatcatccacaggtcaggccacccctcttcctgtcaccagcacttcctcatcatccacaggtcaggccacccctcttcctgtcaccagcacttcctcagcatccacaggtcacgccacccctcttcctgtcaccgacgcttcctcagtgtccacaggtcacgccacgcctcttcctgtcaccgacacttcctcagcatccacaggtgacaccacccctcttcctgtcaccgacacttcctcagcatccacaggtcaggccacccctcttcctgtcaccagcctttcctcagtatccacaggtcacgccacccctcttgctgtcagcagtgctacctcagcttccacagtatcctcggactcccctctgaagatggaaacatcaggaatgacaacaccgtcactgaagacagacggtgggagacgcacagccacatcaccaccccccacaacctcccagaccatcatttccaccattcccagcactgccatgcacacccgctccacagctgcccccatccccatcctgcctgagagaggagtttccctcttcccctatggggcagacgccggggacctggagttcgtcaggaggaccgtggacttcacctccccactcttcaagccggcgactggcttcccccttggctcctctctccgtgattccctctacttcacagacaatggccagatcatcttcccagagtcagactaccagattttctcctaccccaacccactcccaacaggcttcacaggccgggaccctgtggccctggtggctccgttctgggacgatgctgacttctccactggtcgggggaccacattttatcaggaatacgagacgttctatggtgaacacagcctgctagtccagcaggccgagtcttggattagaaagatcacaaacaacgggggctacaaggccaggtgggccctaaaggtcacgtgggtcaatgcccacgcctatcctgcccagtggaccctcgggagcaacacctaccaagccatcctctccacggacgggagcaggtcctatgccctgtttctctaccagagcggtgggatgcagtgggacgtggcccagcgctcaggcaagccggtgctcatgggcttctctagtggagatggctatttcgaaaacagcccactgatgtcccagccagtgtgggagaggtatcgccctgatagattcctgaattccaactcaggcctccaagggctgcagttctacaggctacaccgggaagaaaggcccaactaccgtctcgagtgcctgcagtggctgaagagccagcctcggtggcccagctggggctggaaccaggtctcctgcccttgttcctggcagcagggacgacgggacttacgattccaacccgtcagcataggtcgctggggcctcggcagtaggcagctgtgcagcttcacctcttggcgaggaggcgtgtgctgcagctacgggccctggggagagtttcgtgaaggctggcacgtgcagcgtccttggcagttggcccaggaactggagccacagagctggtgctgccgctggaatgacaagccctacctctgtgccctgtaccagcagaggcggccccacgtgggctgtgctacatacaggcccccacagcccgcctggatgttcggggacccccacatcaccaccttggatggtgtcagttacaccttcaatgggctgggggacttcctgctggtcggggcccaagacgggaactcctccttcctgcttcagggccgcaccgcccagactggctcagcccaggccaccaacttcatcgcctttgcggctcagtaccgctccagcagcctgggccccgtcacggtccaatggctccttgagcctcacgacgcaatccgtgtcctgctggataaccagactgtgacatttcagcctgaccatgaagacggcggaggccaggagacgttcaacgccaccggagtcctcctgagccgcaacggctctgaggtctccgccagcttcgacggctgggccaccgtctcggtgatcgcgctctccaacatcctccactcctccgccagcctcccgcccgagtaccagaaccgcacggaggggctcctgggggtctggaataacaatccagaggacgacttcaggatgcccaatggctccaccattcccccagggagccctgaggagatgcttttccactttggaatgacctggcagatcaacgggacaggcctccttggcaagaggaatgaccagctgccttccaacttcacccctgttttctactcacaactgcaaaaaaacagctcctgggctgaacatttgatctccaactgtgacggagatagctcatgcatctatgacaccctggccctgcgcaacgcaagcatcggacttcacacgagggaagtcagtaaaaactacgagcaggcgaacgccaccctcaatcagtacccgccctccatcaatggtggtcgtgtgattgaagcctacaaggggcagaccacgctgattcagtacaccagcaatgctgaggatgccaacttcacgctcagagacagctgcaccgacttggagctctttgagaatgggacgttgctgtggacacccaagtcgctggagccattcactctggagattctagcaagaagtgccaagattggcttggcatctgcactccagcccaggactgtggtctgccattgcaatgcagagagccagtgtttgtacaatcagaccagcagggtgggcaactcctccctggaggtggctggctgcaagtgtgacgggggcaccttcggccgctactgcgagggctccgaggatgcctgtgaggagccgtgcttcccgagtgtccactgcgttcctgggaagggctgcgaggcctgccctccaaacctgactggggatgggcggcactgtgcggctctggggagctctttcctgtgtcagaaccagtcctgccctgtgaattactgctacaatcaaggccactgctacatctcccagactctgggctgtcagcccatgtgcacctgccccccagccttcactgacagccgctgcttcctggctgggaacaacttcagtccaactgtcaacctagaacttcccttaagagtcatccagctcttgctcagtgaagaggaaaatgcctccatggcagaggtcaacgcctcggtggcatacagactggggaccctggacatgcgggcctttctccgcaacagccaagtggaacgaatcgattctgcagcaccggcctcgggaagccccatccaacactggatggtcatctcggagttccagtaccgccctcggggcccggtcattgacttcctgaacaaccagctgctggccgcggtggtggaggcgttcttataccacgttccacggaggagtgaggagcccaggaacgacgtggtcttccagcccatctccggggaagacgtgcgcgatgtgacagccctgaacgtgagcacgctgaaggcttacttcagatgcgatggctacaagggctacgacctggtctacagcccccagagcggcttcacctgcgtgtccccgtgcagtaggggctactgtgaccatggaggccagtgccagcacctgcccagtgggccccgctgcagctgtgtgtccttctccatctacacggcctggggcgagcactgtgagcacctgagcatgaaactcgacgcgttcttcggcatcttctttggggccctgggcggcctcttgctgctgggggtcgggacgttcgtggtcctgcgcttctggggttgctccggggccaggttctcctatttcctgaactcagctgaggccttgccttgaaggggcagctgtggcctaggctacctcaagactcacctcatccttaccgcacatttaaggcgccattgcttttgggagactggaaaagggaaggtgactgaaggctgtcaggattcttcaaggagaatgaatactgggaatcaagacaagactataccttatccataggcgcaggtgcacagggggaggccataaagatcaaacatgcatggatgggtcctcacgcagacacacccacagaaggacactagcctgtgcacgcgcgcgtgcacacacacacacacacaagagttcataatgtggtgatggccctaagttaagcaaaatgcttctgcacacaaaactctctggtttacttcaaattaactctatttaaataaagtctctctgactttttgtgtcttcaaaa

SEQ ID NO: 155720 - DNA, 3693 bp, Homo sapiens
  Payload ID: 10597
  Gene Symbol: MUC4
  Gene Name: mucin 4, cell surface associated
  ENST ID: ENST00000630769
  CDS Start-End: 1-413
gaatgacaacaccgtcactgaagacagacggtgggagacgcacagccacatcaccaccccccacaacctcccagaccatcatttccaccattcccagcactgccatgcacacccgctccacagctgcccccatccccatcctgcctgagagaggagtttccctcttcccctatggggcagacgccggggacctggagttcgtcaggaggaccgtggacttcacctccccactcttcaagccggcgactggcttcccccttggctcctctctccgtgattccctctacgcttcacaggccgggaccctgtggccctggtggctccgttctgggacgatgctgacttctccactggtcgggggaccacattttatcaggaatacgagacgttctatggtgaacacagcctgctagtccagcaggccgagtcttggattagaaagatcacaaacaacgggggctacaaggccaggtgggccctaaaggtcacgtgggtcaatgcccacgcctatcctgcccagtggaccctcgggagcaacacctaccaagccatcctctccacggacgggagcaggtcctatgccctgtttctctaccagagcggtgggatgcagtgggacgtggcccagcgctcaggcaagccggtgctcatgggcttctctaggcctccaagggctgcagttctacaggctacaccgggaagaaaggcccaactaccgtctcgagtgcctgcagtggctgaagagccagcctcggtggcccagctggggctggaaccaggtctcctgcccttgttcctggcagcagggacgacgggacttacgattccaacccgtcagcataggtcgctggggcctcggcagtaggcagctgtgcagcttcacctcttggcgaggaggcgtgtgctgcagctacgggccctggggagagtttcgtgaaggctggcacgtgcagcgtccttggcagttggcccaggaactggagccacagagctggtgctgccgctggaatgacaagccctacctctgtgccctgtaccagcagaggcggccccacgtgggctgtgctacatacaggcccccacagcccgcctggatgttcggggacccccacatcaccaccttggatggtgtcagttacaccttcaatgggctgggggacttcctgctggtcggggcccaagacgggaactcctccttcctgcttcagggccgcaccgcccagactggctcagcccaggccaccaacttcatcgcctttgcggctcagtaccgctccagcagcctgggccccgtcacggtccaatggctccttgagcctcacgacgcaatccgtgtcctgctggataaccagactgtgacatttcagcctgaccatgaagacggcggaggccaggagacgttcaacgccaccggagtcctcctgagccgcaacggctctgaggtctccgccagcttcgacggctgggccaccgtctcggtgatcgcgctctccaacatcctccactcctccgccagcctcccgcccgagtaccagaaccgcacggaggggctcctgggggtctggaataacaatccagaggacgacttcaggatgcccaatggctccaccattcccccagggagccctgaggagatgcttttccactttggaatgacctggcagatcaacgggacaggcctccttggcaagaggaatgaccagctgccttccaacttcacccctgttttctactcacaactgcaaaaaaacagctcctgggctgaacatttgatctccaactgtgacggagatagctcatgcatctatgacaccctggccctgcgcaacgcaagcatcggacttcacacgagggaagtcagtaaaaactacgagcaggcgaacgccaccctcaatcagtacccgccctccatcaatggtggtcgtgtgattgaagcctacaaggggcagaccacgctgattcagtacaccagcaatgctgaggatgccaacttcacgctcagagacagctgcaccgacttggagctctttgagaatgggacgttgctgtggacacccaagtcgctggagccattcactctggagattctagcaagaagtgccaagattggcttggcatctgcactccagcccaggactgtggtctgccattgcaatgcagagagccagtgtttgtacaatcagaccagcagggtgggcaactcctccctggaggtggctggctgcaagtgtgacgggggcaccttcggccgctactgcgagggctccgaggatgcctgtgaggagccgtgcttcccgagtgtccactgcgttcctgggaagggctgcgaggcctgccctccaaacctgactggggatgggcggcactgtgcggctctggggagctctttcctgtgtcagaaccagtcctgccctgtgaattactgctacaatcaaggccactgctacatctcccagactctgggctgtcagcccatgtgcacctgccccccagccttcactgacagccgctgcttcctggctgggaacaacttcagtccaactgtcaacctagaacttcccttaagagtcatccagctcttgctcagtgaagaggaaaatgcctccatggcagaggtcaacgcctcggtggcatacagactggggaccctggacatgcgggcctttctccgcaacagccaagtggaacgaatcgattctgcagcaccggcctcgggaagccccatccaacactggatggtcatctcggagttccagtaccgccctcggggcccggtcattgacttcctgaacaaccagctgctggccgcggtggtggaggcgttcttataccacgttccacggaggagtgaggagcccaggaacgacgtggtcttccagcccatctccggggaagacgtgcgcgatgtgacagccctgaacgtgagcacgctgaaggcttacttcagatgcgatggctacaagggctacgacctggtctacagcccccagagcggcttcacctgcgtgtccccgtgcagtaggggctactgtgaccatggaggccagtgccagcacctgcccagtgggccccgctgcagctgtgtgtccttctccatctacacggcctggggcgagcactgtgagcacctgagcatgaaactcgacgcgttcttcggcatcttctttggggccctgggcggcctcttgctgctgggggtcgggacgttcgtggtcctgcgcttctggggttgctccggggccaggttctcctatttcctgaactcagctgaggccttgccttgaaggggcagctgtggcctaggctacctcaagactcacctcatccttaccgcacatttaaggcgccattgcttttgggagactggaaaagggaaggtgactgaaggctgtcaggattcttcaaggagaatgaatactgggaatcaagacaagactataccttatccataggcgcaggtgcacagggggaggccataaagatcaaacatgcatggatgggtcctcacgcagacacacccacagaaggacactagcctgtgcacgcgcgcgtgcacacacacacacacacaagagttcataatgtggtgatggccctaagttaagcaaaatgcttctgcacacaaaactctctggtttacttcaaattaactctatttaaataaagtctctctgactttttgtgtcttcaaaa

SEQ ID NO: 155721 - DNA, 22215 bp, Homo sapiens
  Payload ID: 10597
  Gene Symbol: MUC4
  Gene Name: mucin 4, cell surface associated
  ENST ID: ENST00000627165
  CDS Start-End: 73-19419
gtctgctcctcacactgcagctgctgggccgtggagcttccccagggagccagggggacttttgccgcagccatgaagggggcacgctggaggagggtcccctgggtgtccctgagctgcctgtgtctctgcctccttccgcatgtggtcccaggaaccacagaggacacattaataactggaagtaaaactcctgccccagtcacctcaacaggctcaacaacagcgacactagagggacaatcaactgcagcttcttcaaggacctctaatcaggacatatcagcttcatctcagaaccaccagactaagagcacggagaccaccagcaaagctcaaaccgacaccctcacgcagatgatgacatcaactcttttttcttccccaagtgtacacaatgtgatggagactgttacgcaggagacagctcctccagatgaaatgaccacatcatttccctccagtgtcaccaacacactcatgatgacatcaaagactataacaatgacaacctccacagactccactcttggaaacacagaagagacatcaacagcaggaactgaaagttctaccccagtgacctcagcagtctcaataacagctggacaggaaggacaatcacgaacaacttcctggaggacctctatccaagacacatcagcttcttctcagaaccactggactcggagcacgcagaccaccagggaatctcaaaccagcaccctaacacacagaaccacttcaactccttctttctctccaagtgtacacaatgtgacagggactgtttctcagaagacatctccttcaggtgaaacagctacctcatccctctgtagtgtcacaaacacatccatgatgacatcagagaagataacagtgacaacctccacaggctccactcttggaaacccaggggagacatcatcagtacctgttactggaagtcttatgccagtcacctcagcagccttagtaacagttgatccagaaggacaatcaccagtaactttctcaaggacttctactcaggacacaacagctttttctaagaaccaccagactcagagcgtggagaccaccagagtatctcaaatcaacaccctcaacaccctcacaccggttacaacatcaactgttttatcctcaccaagtggattcaacccaagtggaacagtttctcaggagacattcccttctggtgaaacaaccatctcatccccttccagtgtcagcaatacattcctggtaacatcaaaggtgttcagaatgccaatctccagagactctactcttggaaacacagaggagacatcactatctgtaagtggaaccatttctgcaatcacttccaaagtttcaaccatatggtggtcagacactctgtcaacagcactctcccccagttctctacctccaaaaatatccacagctttccacacccagcagagtgaaggtgcagagaccacaggacggcctcatgagaggagctcattctctccaggtgtgtctcaagaaatatttactctacatgaaacaacaacatggccttcctcattctccagcaaaggccacacaacttggtcacaaacagaactgccctcaacatcaacaggtgctgccactaggcttgtcacaggaaatccatctacaggggcagctggcactattccaagggtcccctctaaggtctcagcaataggggaaccaggagagcccaccacatactcctcccacagcacaactctcccaaaaacaacaggggcaggcgcccagacacaatggacacaagaaacggggaccactggagaggctcttctcagcagcccaagctacagtgtgactcagatgataaaaacggccacatccccatcttcttcacctatgctggatagacacacatcacaacaaattacaacggcaccatcaacaaatcattcaacaatacattccacaagcacctctcctcaggaatcaccagctgtttcccaaaggggtcacactcaagccccgcagaccacacaagaatcacaaaccacgaggtccgtctcccccatgactgacaccaagacagtcaccaccccaggttcttccttcacagccagtgggcactcgccctcagaaattgttcctcaggacgcacccaccataagtgcagcaacaacctttgccccagctcccaccggggatggtcacacaacccaggccccgaccacagcactgcaggcagcacccagcagccatgatgccaccctggggccctcaggaggcacgtcactttccaaaacaggtgcccttactctggccaactctgtagtgtcaacaccagggggcccagaaggacaatggacatcagcctctgccagcacctcacctgacacagcagcagccatgacccatacccaccaggctgagagcacagaggcctctggacaaacacagaccagcgaaccggcctcctcagggtcacgaaccacctcagcgggcacagctaccccttcctcatccggggcgagtggcacaacaccttcaggaagcgaaggaatatccacctcaggagagacgacaaggttttcatcaaacccctccagggacagtcacacaacccagtcaacaaccgaattgctgtccgcctcagccagtcatggtgccatcccagtaagcacaggaatggcgtcttcgatcgtccccggcacctttcatcccaccctctctgaggcctccactgcagggagaccgacaggacagtcaagcccaacttctcccagtgcctctcctcaggagacagccgccatttcccggatggcccagactcagaggacaagaaccagcagagggtctgacactatcagcctggcgtcccaggcaaccgacaccttctcaacagtcccacccacacctccatcgatcacatccagtgggcttacatctccacaaacccagacccacactctgtcaccttcagggtctggtaaaaccttcaccacggccctcatcagcaacgccacccctcttcctgtcacctacgcttcctcggcatccacaggtcacaccacccctcttcatgtcaccgatgcttcctcagtatccacaggtcacgccacccctcttcctgtcaccgacacttcctcagaatccacaggtcacgccacccctcttcctgtcaccagcccttcctcagtatccacaggtcacaccacccctcttcctgtcaccgacacttcctcagaatccacaggtcatgtcacccctcttcctgtcaccagcctttcctcagcatccacaggtgacagcacccctcttcctgtcactgacacttcctcagcatccacaggtcacgtcacccctcttcctgtcaccagcctttcctcagcatccacaggtgacaccacccctcttcctgtcactgacacttcctcagcatccacaggtcacgccacctctcttcctgtcaccgacacttcctcagtatccacaggtcacaccacccctcttcctgtcaccgacacttcctcagcatccacaggtcacgccacctctcttcctgtcaccgacacttcctcagtatccacagctcacgccaccccacttcctgtcaccggcctttcttcagcttccacagatgacaccacccgtcttcctgtcaccgacgtttcctcggcatccacaggtcaggccatccctcttcctgtcaccagcccttcctcagcatccacaggtgacaccacccctcttcctgtcaccgacgcttcctcagcatccacaggtgacaccacctctcttcctgtcaccatcccttcctcagcatcttcaggtcacaccacctctcttcctgtcaccgacgcttcctcagtgtccacaggtcacgccacctctcttcttgtcaccgacgcttcctcagtatccacaggtgacaccacccctcttcctgtcaccgacactaactcagcatccacaggtgacaccacccctcttcatgtcaccgacgcttcctcagtatccacaggtcacgccacctctcttcctgtcaccagcctttcctcagcatccacaggtgacaccacgcctcttcctgtcactagcccttcctcagcatcctcaggtcacaccacccctcttcctgtcaccgacgcttcctcagtacccacaggtcacgccacctctcttcctgtcaccgacgcttcctcagtgtccacaggtcacgccacccctcttcctgtcaccgacgcttcctcagtgtccacaggtcatgccacccctcttccggtcaccgacacttcctcagtatctacaggacaggccacccctcttcctgtcaccagcctttcctcagcatccactggtgacaccacgccgcttcctgtcaccgatacttcctcagcatccacaggtcaggacacccctcttcctgtcaccagcctttcctcagtatccacaggtgacaccacgcctcttcctgtcactagcccttcctcagcatccacaggtcacgccacccctcttcttgtcaccgacgcttcctcagtatccacaggtcacgccacctctcttcttgtcaccgacgcttcctcagtatccacaggtcacgccaccgctcttcatgtcaccgatgcttcctcattatccacaggggacaccacccctcttcctgtcaccagcccttcctcagcatccacaggtgacaccacccctcttcctgtcaccgacacttcctcagcatccacaggtcacgccacctctcttcctgtcaccgacacttcctcagcatccacaggtcacgccacccctcttcctgtcaccgacacttcctcagcatccacaggtcaggccacccctcttcctgtcaccggcccttcctcagcatccacaggtcacgccatccctcttcttgtcaccgacacttcctcagcatccacaggacaggccacccctcttcctgtcaccagcctttcctcagcatccacaggtgacaccacccctcttcctgtcaccgacgcttcctcagtgtccacaggtcacgccacctctcttcctgtcaccagcctttcctcagtatccacaggtgacaccacccctcttcctgtcaccagcccttcctcagcatcctcaggtcacaccacccctcttcctgtcaccgacgcttcctcagtatccacaggtgacaccacccctcttcctgtcaccagcccttcctcagcatcctcaggtcacaccacccctcttcctgtcaccagcccttcctcagcatcctcaggtcacaccacccctcttcctgtcaccgacgcttcctcagcatccacaggtgacaccacccctcttcctgtcaccgacacttcctcagcatccacaggtcacgccacccatcttcctgtcaccggcctttcctcagcttccacaggtgacaccacccgtcttcctgtcaccaacgtttcctcggcatccacaggtcatgccacccctcttcctgtcaccagcacttcctcagcatccacaggtgacaccacccctcttcctggcaccgacacttcctcagtatccacaggtcacaccacccctcttcttgtcaccgacgcttcgtcagtatccacaggtgacaccacccgtcttcctgtcaccagcccttcctcagcatctacaggtcacaccacccctctacctgtcaccgacactccctcagcatccacaggtgacaccacccctcttcctgtcaccaatgcttcctcattatccacacgtcacaccacctctcttcatgtcaccagcccttcctcagcatccacaggtcacgccacctctcttcctgtcaccgacacttcctcagtatccacaggtcatgccacccctcttcatgtcaccagcccttcctcagcatccacaggtgacaccacccctcttcctgtcaccgacacttactcagcatccacaggtcaggccacccctcttcctgtcaccgacacttcctcagcatccacaggtgacaccacccctcttcctgtcaccgacacttcctcagcatccacaggtcacgccacccctcttcctgtcaccaacacttcctcagtatccacaggtcacgccacccctcttcatgtcaccagcccttcctcagcatccacaggtcacaccacccctcttcctgtcaccgacgcttcgtcagtgtccacaggtcacgccacctctcttcctgtcaccgacgcttcctcagtgttcacaggtcacgccacctcgcttcctgtcaccatcccttcctcagcatcctcaggtcacaccacccctcttcctgtcaccgacgcttcctcagtgtccacaggtcacgccacctctcttcctgtcaccgacgcttcctcagtgtccacaggtcacgccacccctcttcctgtcaccgacgcttcctcagtgtccacaggtcacgctacccctcttcctgtcaccgacacttcctcagtatccacaggtcacgccacccctcttcctctcaccagcctttcctcagtatccacaggtgacaccacgcctcttcctgtcaccgacacttcctcagcatccacaggtcaggccacccctcttcctgtcaccagcctttcctcagtatccacaggtgacaccacccctcttcctgtcaccgacacttcctcagcatccacaggtcacgccacctctcttcctgtcaccgacacttcctcagcatccacaggtcacgccacccctcttcctgacaccgacacttcctcagcatccacaggtcacgccacccctcttcctgtcaccgacacttcctcagcatccacaggtcacgccacccttcttcctgtcaccgacacttcctcagcatccataggtcacgccacccctcttcctgtcaccgacacttcctcaatatccacaggtcacgccacccctcttcatgtcaccagcccttcctcagcatccaccggtcacgccaccccgcttcctgtcaccgacacttcctcagcatccacaggtcacgccaaccctcttcatgtcaccagcccttcctcagcatccaccggtcacgccaccccgcttcctgtcaccgacacttcctcagcatccacaggtcacgccacccctcttcctgtcaccagcctttcctcagtatccacaggtgacaccacgcctcttcctgtcactagcccttcctcagcatccacaggtcacaccacccctcttcctgtcaccgacacttcctcagcatccacaggtcaggccaccgctcttcctgtcaccagcacttcctcagcatccacaggtgacaccacccctcttcctgttaccgacacttcctcagcatccacaggtcaggccacccctcttcctgtcaccagcctttcctcagtatccacaggtgacaccacgcctcttcctgtcactagcccttcctcagcatccacaggtcacgccactcctcttcttgtcaccgacgcttcctcagcatccacaggtcaggccacccctcttcctgtcaccgacacttcctcagcatacacaggtgacaccacctctcttcctgtcaccgacacttcctcatcatccacaggtgacaccacccctcttcttgtcaccgagacttcctcagcatccacaggtcacgccacccctcttcatgtcaccagcccttcctcagcatccacaggtgacaccacccctgtgcctgtcaccgacacttcctcagtatccacaggtcacgccacccctcttcctgtcaccggcctttcctcagcttccacaggtgacaccacccgtcttcctgtcaccgacatttcctcggcatccacaggtcaggccacccctcttcctgtcaccaacacttcctcagcatccacaggtcacgccacccctcttcctgtcaccggcctttcctcagcttccacaggtgacaccacccgtcttcctgtcaccgacatttcctcggcatccacaggtcaggccacccctcttcctgtcaccaacacttcctcagtatccacaggtgacaccatgcctcttcctgtcactagcccttcctcagcatccacaggtcacgccacccctcttcctgtcaccagcacttcctcagcatccaccggtcacgccacccctgttcctgtcaccagcacttcctcagcatctacaggtcacaccacccctcttcctgtcaccgacacttcctcagcatccacaggtgacaccacccctcttcctgtcaccagcccttcctcagcatctacaggtcacaccacccctcttcatgtcaccatcccttcctcagcatccacaggtgacaccagcactcttcctgtcaccggcgcttcctcagcatccaccggtcacgccacccctcttcctgtcaccgacacttcctcagtatccacaggtcacgccacccctcttcctgtcaccagcttttcctcagtatccacaggtgacaccacgcctcttcctgtcaccgacacttcctcagtatccacaggtcacgccacccctcttcctgtcaccagcttttcctcagtatccacaggtgacaccacccctcttcctgtcaccgacgcttcctcggcatccaccggtcacgccacccctcttcctgtcaccgacacttcctcagtatccacaggtcacgccacccctcttcctctcaccagcctttcctcagtatccacaggtgacaccacgactcttcctgtcaccgacacttcctcagtatccacaggtcacgccacccctcttcctgtcaccagcttttcctcagtatccacaggtgacaccacccctcttcctgtcaccgacgcttcctcggcatccaccggtcacgccacccctcttcctgtcaccgacacttcctcagtatccaccggtcacgccacgcctcttcctgtcaccagcctttcctcagtatccacaggtgacaccacccctcttcctgtcaccgacgcttcctcggcatccacaggtcaggccacccctcttcctgtcaccagcctttcctcagtatcaacaggtgacaccacgcctcttcctgtcaccatcccttcctcagcatcctcaggtcacaccacctctcttcctgtcaccgacacttcctcagcatccacaggtcaggccacccctcttcctgtcaccagcctttcctcagtatccacaggtgacaccacccctcttcttgtcaccgacgcttcctcagtatccacaggtcacgccacccctcttcctgtcaccgacacttcctcagcatccacaggtgacaccacccgtcttcctgtcacagacacttcctcagcatccacaggtcaggccacccctcttcctgtcaccagcctttcctcagtatccacaggtgacaccacccctcttcttgtcaccaacacttcctcagtatccagaggtcacgccacctctcttcctgtcaccatcccttcctcatcatcctcaggtcacaccacccctcttcctgtcaccagcacttcctcagtatctacaggtcacgtcacccctcttcctgtcaccagcacttcctcagcatccacaggtcacgccacctctcttcctgtcaccgacacttcctcagtatccacaggtcacgccacctctcttcctgtcaccgacacttcctcagtatccacaggtcacgccacccctcttcctgtcaccgacgcttcctcagtgtccacaggtcacgccacgcctcttcctgtcaccgacgcttcctcagcatccacaggtgacaccacccctcttcctgtcaccaacacttcctcagcatccacaggtcaggccacccctcttcctgtcaccagcctttcctcagtatccacaggtgacaccatgcctcttcctgtcactagcccttcctcagcatccacaggtcacgccacccctcttcctgttaccggcctttcctcagcttccacaggtgacaccacccctcttcctgtcactgacacttcctcagcatccacaggtcacgtcacccctcttcctgtcaccagcctttcctcagcatccacaggtgacagcacccctcttcctgtcactgacacttcctcagcatccacaggtcacgtcacccctcttcctgtcaccagcctttcctcagcatccacaggtgacaccacccctcttcctgtcactgacacttcctcagcatccacaggtcacgccacccctcttcatgtcactgatgcttcctcagcatccacaggtcaggccacccttcttcctgtcaccagcctttcctcagtatccacaggtgacaccacgcctcttcctgtcactagcccttcctcagcatccacaggtcacgccacccctcttcttgtcaccgacacttcctcagcatccacaggacacgccacccctcttcctgtcacggacgcttcctcagtgtccacaggtcacgccacctctcttcctgtaaccatccgttcctcaggttccacaggtcacaccacccctcttcctgtcaccgacacttcctcagcatccacaggtcaggccacctctcttcttgtcaccgacacttcctcagtatccacaggtgacaccacgcctcttcctgtcactagcacttcctcagcatccacaggtcacgtcactcctcttcatgtcaccagcccttcctcagcatccacaggtcacgccacccctcttcctgtcaccagcctttcctcagcatccacaggtgacaccatgcctcttcctgtcactagcccttcctcagcatccacaggtgacaccacccctcttcctgtcaccgacgcttcctcagtatccacaggtcacaccacccctcttcctgtcaccagcccttcctcagcatctacaggtcacaccacccctcttcctgtcaccgacactacctcagcatccaaaggtgacaccacccctcttcctgtcaccagcccttcctcagcatctacaggtcacaccacccctcttcctgtcaccgacacttcctcagcatccacaggtgacaccacccctcttcctgtcaccagcccttcctcagcatccacaggtcacgccacccctcttcctgtcaccaatgcttcctcattatccacaggtcacgccacccctcttcatgtcaccagcccttcctcagcatccacaggtcacgccacccctcttcctgtcaccagcacttcctcagcatccaccggtcacgccacctctcttcctgtcaccagcacttcctcagcatccaccggtcacgccacccctcttcctgtcaccgacaattcctcagtatccacaggtcacgccacccctcttcctgtcaccggcctttcctcagctaccacagatgacaccacccgtcttcctgtcaccgacgtttcctcggcatccacaggtcaggccacccctcttcctgtcaccagcctttcctcagtatccacaggtgacaccacgcctcttcctgtcactagcccttcctcagcatccacaggtcacgccagccctcttcttgtcactgacgcttcctcagcatccacaggtcaggccacccctcttcctgtcaccgacacttcctcagtatccacagctcacgccaccccacttcctgtcaccggcctttcttcagcttccacagatgacaccacccgtcttcctgtcaccgacgtttcctcggcatccacaggtcaggccatccctcttcctgtcaccagcccttcctcagcatccacaggtgacaccacccctcttcctgtcaccgacgcttcctcagcatccacaggtgacaccacctctcttcctgtcaccatcccttcctcagcatcttcaggtcacaccacctctcttcctgtcaccgacgcttcctcagtgtccacaggtcacgccacctctcttcttgtcaccgacgcttcctcagtatccacaggtgacaccacccctcttcctgtcaccgacactaactcagcatccacaggtgacaccacccctcttcatgtcaccgacgcttcctcagtatccacaggtcacgccacctctcttcctgtcaccagcctttcctcagcatccacaggtgacaccacgcctcttcctgtcactagcccttcctcagcatcctcaggtgacaccacccctcttcctgtcaccgacacttcctcagcatccacaggtcacgccacccatcttcctgtcaccggcctttcctcagcttccacaggtgacaccacccgtcttcctgtcaccaacgtttcctcggcatccacaggtcatgccacccctcttcctgtcaccagcacttcctcagcatccacaggtgacaccacccctcttcctggcaccgacacttcctcagtatccacaggtcacaccacccctcttcttgtcaccgacgcttcgtcagtatccacaggtgacaccacccgtcttcctgtcaccagcccttcctcagcatctacaggtcacaccacccctcttcatgtcaccgatgcttcctcagtatccacaggtcacaccacccctcttcctgtcaccgacacttcctcagcatccacaggtcaggccacctctcttcttgtcaccgacacttcctcagtatccacaggtgacaccacgcctcttcctgtcactagcacttcctcagcatccacaggtcacgtcactcctcttcatgtcaccagcccttcctcagcatccacaggtcacgccacccctcttcctgtcaccagcctttcctcagcatccacaggtgacaccacccctcttcctgtcaccgacacttcctcagtatccacaggtcacaccacccctcttcctgtcaccagcccttcctcagcatctacaggtcacaccacccctcttcctgtcaccgacacttcctcagcatccaaaggtgacaccacccctcttcctgtcaccagcccttcctcagcatctacaggtcacaccacccctcttcctgtcaccgacacttcctcagcatccacaggtgacaccacccctcttcctgtcaccaatgcttcctcattatccacaggtcacgccacccctcttcatgtcaccagcccttcctcagcatccacaggtcacgccacccctcttcctgtcaccagcacttcctcagcatccaccggtcacgccacccctcttcctgtcaccagcacttcctcagcatccaccggtcacgccacccctcttcctgtcaccgacaattcctcagtatccacaggtcatgccacccctcttcctgtcaccggcctttcctcagctaccacagatgacaccacccgtcttcctgtcaccgacgtgtcctcggcatccacaggtcaggccacccctcttcctgtcaccagcctttcctcagtatccacaggtgacaccacgcctcttcctgtcactagcccttcctcagcatccacaggtcacgccagccctcttcttgtcactgacgcttcctcagcatccacaggtcaggccacccctcttcctgtcaccgacacttcctcagtatccacagctcacgccaccccacttcctgtcaccggcctttcctcagcttccacagatgacaccacccgtcttcctgtcaccgacgtttcctcggcatccacaggtcaggccatccctcttcctgtcaccagcccttcctcagcatccacaggtgacaccacccctcttcctgtcaccgacgcttcctcagcatccacaggtgacaccacctctcttcctgtcaccatcccttcctcagcatcttcaggtcacaccacctctcttcctgtcaccgacgcttcctcagtgtccacaggtcacgccacctctcttcttgtcaccgacgcttcctcagtatccacaggtgacaccacccctcttcctgtcaccgacactaactcagcatccacaggtgacaccacccctcttcatgtcaccgacgcttcctcagtatccacaggtcacgccacctctcttcctgtcaccagcctttcctcagcatccacaggtgacaccacgcctcttcctgtcactagcccttcctcagcatcctcaggtcacaccacctctcttcctgtcaccgacgcttcctcagtgtccacaggtcacgccacctctcttcctgtcaccatcccttcctcagcatcctcaggtcacaccacccctcttcctgtcaccgacgcttcctcagtacccacaggtcacgccacctctcttcctgtcaccgacgcttcctcagtgtccacaggtcacgccacccctcttcctgtcaccgacgcttcctcagtgtccacaggtcatgccacccctcttccggtcaccgacacttcctcagtatctacaggacaggccacccctcttcctgtcaccagcctttcctcagcatcatccactggtgacaccacgccgcttcctgtcactgatacttcctcagcatccacaggtcaggacacccctcttcctgtcaccagccttttctcagtatccacaggtgacaccacgcctcttcctgtcactagcccttcctcagcatccacaggtcacgccacccatcttcttgtcaccgacgcttcctcagtatccacaggtcacgccacctctcttcttgtcaccgacgcttcctcagtatccacaggtcacgccaccgctcttcatgtcaccgatgcttcctcattatccacaggggacaccacccctcttcctgtcaccagcccttcctcagcatccacaggtgacaccacccctcttcctgtcaccgacacttcctcagtatccacaggtcacgccacctctcttcctgtcactgacacttcctcagcatccacaggtcacgccacctctcttcctgtcaccgacacttcctcagcatccacaggtcaggccacccctcttcctgtcaccagcccttcctcagcatccacaggtcacgccatccctcttcttgtcaccgacacttcctcagcatccacaggacaggccacccctcttcctgtcaccagcctttcctcagcatccacaggtgacaccacccctcttcctgtcaccgatgcttcctcagtgtccacaggtcacgccacctctcttcctgtcaccagcctttcctcagtatccacaggtgacaccacccctcttcctgtcactagcccttcctcagcatccacaggtcacgccacccctcttcatgtcaccagcccttcctcagcatccacaggtcacgccacccctcttcctgtcaccagcctttcctcagcatccacaggtgacaccacgcctcttcctgtcactagcccttcctcagcatccacaggtcacgccacccctcttcatgtcaccgacgcttcctcagtatccacaggtgacaccacccctcttcctgtcaccagcccttcctcagcatcctcaggtcacaccacccctcttcctgtcaccgacgcttcctcagcatccacaggtgacaccacccctcttcctgtcaccgacacttcctcagcatccacaggtcacgccacccatcttcctgtcaccggcctttcctcagcttccacaggtgacaccacccgtcttcctgtcaccgacgtttcctcggcatccacaggtcatgccacccctcttcctgtcaccagcacttcctcagcatccacaggtgacaccacccctcttcctggcaccgacacttcctcagtatccacaggtcacaccacccctcttcttgtcaccgacgcttcgtcagtatccacaggtgacaccacccgtcttcctgtcaccagcccttcctcagcatctacaggtcacaccacccctctacctgtcaccgacactccctcagcatccacaggtgacaccacccctcttcctgtcaccaatgcttcctcattatccacacgtcacgccacctctcttcatgtcaccagcccttcctcagcatccaccggtcacgccacccctcttcctgttaccgacacttccgcagcatccacaggtcacgccacccctcttcctgtcaccagcacttcctcagcatccacaggtgacaccacccctcttcctgtcaccgacacttcctcagcatccacaggtcacgccacccctcttcctgtcaccaacacttcctcagtatccacaggtcacgccacccctcttcatgtcaccagcccttcctcagcatccacaggtcacaccacccctcttcctgtcaccgacgcttcgtcagtgtccacaggtcacgccacctctcttcctgtcaccgacgcttcctcagtgtccacaggtcacgccacccctcttcctgtcaccgacgcttcctcagtgtccacaggtcacgctacccctcttcctctcaccagcctttcctcagtatccacaggtgacaccacgcctcttcctgtcaccgacacttcctcagcatccacaggtcaggccacccctcttcctgtcaccagcctttcctcagtatccacaggtgacaccacccctcttcctgtcaccgacacttcctcagcatccacaggtcacgccacctctcttcctgtcaccgacacttcctcagcatccacaggtcacgccacccctcttcctgtcaccgacacttcctcaatatccacaggtcacgccacccctcttcatgtcaccagcccttcctcagcatccaccggtcacgccaccccgcttcctgtcaccgacacttcctcagcatccacaggtcacgccacccctcttcctgtcaccagcctttcctcagtatccacaggtgacaccacgcctcttcctgtcactagcccttcctcagcatccacaggtcacgccactcctcttcttgtcaccgacgcttcctcagcatccacaggtcaggccacccctcttcctgtcaccagcctttcctcagtatccacaggtgacaccacgcctcttcctgtcactagcccttcctcagcatccaccggtcatgccacctctcttcctgtcaccgacacttcctcagcatccacaggtgacaccacctctcttcctgtcaccgacacttcctcagcatacacaggtgacaccacctctcttcctgtcaccgacacttcctcatcatccacaggtgacaccacccctcttcttgtcaccgagacttcctcagcatccacaggtgacaccacccctgtgcctgtcaccgacacttcctcagtatccacaggtcacgccacccctcttcctgtcaccggcctttcctcagcttccacaggtgacaccacccgtcttcctgtcaccgacatttcctcggcatccacaggtcaggccacccctcttcctgtcaccaacacttcctcagtatccacaggtgacaccatgcctcttcctgtcactagcccttcctcagcatccacaggtcacgccacccctcttcctgtcaccagcacttcctcagcatccaccggtcacgccacccctgttcctgtcaccagcacttccttagcatccacaggtcacaccacccctcttcctgtcaccagcccttcctcagcatctacaggtcacaccacccctcttcctgtcaccgacacttcctcagcatccacaggtgacaccacccctcttcctgtcaccaatgcttcctcattatccacaggacacaccacccctcttcatgtcaccatcccttcctcagcatccacaggtgacaccagcactcttcctgtcaccggcgcttcctcagcatccaccggtcacgccacccctcttcctgtcaccgacacttcctcagtatccacaggtcacgccacccctcttcctgtcaccagcttttcctcagtatccacaggtgacaccacccctcttcctgtcaccgacgcttcctcggcatccaccggtcacgccacccctcttcctgtcaccgacacttcctcagcatccacaggtgacaccacccctcttcctgtcaccgacgcttcctcggcatccacaggtcaggccacccctcttcctgtcaccagcctttcctcagtatcaacaggtgacaccacgcctcttcctgtcaccatcccttcctcagcatcctcaggtcacaccacctctcttcctgtcagcgacacttcctcagcatccacaggtcaggccacccctcttcctgtcaccagcctttcctcagtatccacaggtgacaccacccctcttcttgtcaccgacgcttcctcagtatccacaggtcacgccacccctcttcctgtcaccgacacttcctcagcatccacaggtgacaccacccgtcttcctgtcacggacacttcctcagcatccacaggtcaggccacccctcttcctgtcaccagcctttcctcagtatccacaggtgacaccacccctcttcttgtcaccaacacttcctcagtatccacaggtcacgccacctctcttcctgtcaccatcccttcctcatcatcctcaggtcacaccacccctcttcctgtcaccagcacttcctcagtatctacaggtcacgtcacccctcttcatgtcaccagcccttcctcatcatccacaggtcaggccacccctcttcctgtcaccagcacttcctcagtatctacaggtcacgtcacccctcttcatgtcaccagcccttcctcagcatccacaggtcacgccacccctcttcctgtcaccagcacttcctcagcatccacaggtcacgccacccctcttcctgtcaccgacgcttcctcagtgtccacaggtcacgccacgcctcttcctgtcaccgacacttcctcagcatccacaggtgacaccacccctcttcctgtcaccgacacttcctcagcatccacaggtcaggccacccctcttcctgtcaccagcctttcctcagtatccacaggtcacgccacccctcttgctgtcagcagtgctacctcagcttccacagtatcctcggactcccctctgaagatggaaacatcaggaatgacaacaccgtcactgaagacagacggtgggagacgcacagccacatcaccaccccccacaacctcccagaccatcatttccaccattcccagcactgccatgcacacccgctccacagctgcccccatccccatcctgcctgagagaggagtttccctcttcccctatggggcagacgccggggacctggagttcgtcaggaggaccgtggacttcacctccccactcttcaagccggcgactggcttcccccttggctcctctctccgtgattccctctacgcttcacaggccgggaccctgtggccctggtggctccgttctgggacgatgctgacttctccactggtcgggggaccacattttatcagagcaacacctaccaagccatcctctccacggacgggagcaggtcctatgccctgtttctctaccagagcggtgggatgcagtgggacgtggcccagcgctcaggcaacccggtgctcatgggcttctctagtggagatggctatttcgaaaacagcccactgatgtcccagccagtgtgggagaggtatcgccctgatagattcctgaattccaactcaggcctccaagggctgcagttctacaggctacaccgggaagaaaggcccaactaccgtctcgagtgcctgcagtggctgaagagccagcctcggtggcccagctggggctggaaccaggtctcctgcccttgttcctggcagcagggacgacgggacttacgattccaacccgtcagcataggtcgctggggcctcggcagtaggcagctgtgcagcttcacctcttggcgaggaggcgtgtgctgcagctacgggccctggggagagtttcgtgaaggctggcacgtgcagcgtccttggcagttggcccaggaactggagccacagagctggtgctgccgctggaatgacaagccctacctctgtgccctgtaccagcagaggcggccccacgtgggctgtgctacatacaggcccccacagcccgcctggatgttcggggacccccacatcaccaccttggatggtgtcagttacaccttcaatgggctgggggacttcctgctggtcggggcccaagacgggaactcctccttcctgcttcagggccgcaccgcccagactggctcagcccaggccaccaacttcatcgcctttgcggctcagtaccgctccagcagcctgggccccgtcacggtccaatggctccttgagcctcacgacgcaatccgtgtcctgctggataaccagactgtgacatttcagcctgaccatgaagacggcggaggccaggagacgttcaacgccaccggagtcctcctgagccgcaacggctctgaggtctcggccagcttcgacggctgggccaccgtctcggtgatcgcgctctccaacatcctccacgcctccgccagcctcccgcccgagtaccagaaccgcacggaggggctcctgggggtctggaataacaatccagaggacgacttcaggatgcccaatggctccaccattcccccagggagccctgaggagatgcttttccactttggaatgacctggcagatcaacgggacaggcctccttggcaagaggaatgaccagctgccttccaacttcacccctgttttctactcacaactgcaaaaaaacagctcctgggctgaacatttgatctccaactgtgacggagatagctcatgcatctatgacaccctggccctgcgcaacgcaagcatcggacttcacacgagggaagtcagtaaaaactacgagcaggcgaacgccaccctcaatcagtacccgccctccatcaatggtggtcgtgtgattgaagcctacaaggggcagaccacgctgattcagtacaccagcaatgctgaggatgccaacttcacgctcagagacagctgcaccgacttggagctctttgagaatgggacgttgctgtggacacccaagtcgctggagccattcactctggagattctagcaagaagtgccaagattggcttggcatctgcactccagcccaggactgtggtctgccattgcaatgcagagagccagtgtttgtacaatcagaccagcagggtgggcaactcctccctggaggtggctggctgcaagtgtgacgggggcaccttcggccgctactgcgagggctccgaggatgcctgtgaggagccgtgcttcccgagtgtccactgcgttcctgggaagggctgcgaggcctgccctccaaacctgactggggatgggcggcactgtgcggctctggggagctctttcctgtgtcagaaccagtcctgccctgtgaattactgctacaatcaaggccactgctacatctcccagactctgggctgtcagcccatgtgcacctgccccccagccttcactgacagccgctgcttcctggctgggaacaacttcagtccaactgtcaacctagaacttcccttaagagtcatccagctcttgctcagtgaagaggaaaatgcctccatggcagaagtcaacgcctcggtggcatacagactggggaccctggacatgcgggcctttctccgcaacagccaagtggaacgaatcgattctgcagcaccggcctcgggaagccccatccaacactggatggtcatctcggagttccagtaccgccctcggggcccggtcattgacttcctgaacaaccagctgctggccgcggtggtggaggcgttcttataccacgttccacggaggagtgaggagcccaggaacgacgtggtcttccagcccatctccggggaagacgtgcgcgatgtgacagccctgaacgtgagcacgctgaaggcttacttcagatgcgatggctacaagggctacgacctggtctacagcccccagagcggcttcacctgcgtgtccccgtgcagtaggggctactgtgaccatggaggccagtgccagcacctgcccagtgggccccgctgcagctgtgtgtccttctccatctacacggcctggggcgagcactgtgagcacctgagcatgaaactcgacgcgttcttcggcatcttctttggggccctgggcggcctcttgctgctgggggtcgggacgttcgtggtcctgcgcttctggggttgctccggggccaggttctcctatttcctgaactcagctgaggccttgccttgaaggggcagctgtggcctaggctacctcaagactcacctcatccttaccgcacatttaaggcgccattgcttttgggagactggaaaagggaaggtgactgaaggctgtcaggattctt

SEQ ID NO: 155722 - DNA, 16202 bp, Homo sapiens
  Payload ID: 10597
  Gene Symbol: MUC4
  Gene Name: mucin 4, cell surface associated
  ENST ID: ENST00000628330
  CDS Start-End: 1-13124
gaaccacagaggacacattaataactggaagtaaaactgctgccccagtcacctcaacaggctcaacaacagcgacactagagggacaatcaactgcagcttcttcaaggacctctaatcaggacatatcagcttcatctcagaaccaccagactaagagcacggagaccaccagcaaagctcaaaccgacaccctcacgcagatgatgacatcaactcttttttcttccccaagtgtacacaatgtgatggagacagctcctccagatgaaatgaccacatcatttccctccagtgtcaccaacacactcatgatgacatcaaagactataacaatgacaacctccacagactccactcttggaaacacagaagagacatcaacagcaggaactgaaagttctaccccagtgacctcagcagtctcaataacagctggacaggaaggacaatcacgaacaacttcctggaggacctctatccaagacacatcagcttcttctcagaaccactggactcggagcacgcagaccaccagggaatctcaaaccagcaccctaacacacagaaccacttcaactccttctttctctccaagtgtacacaatgtgacagggactgtttctcagaagacatctccttcaggtgaaacagctacctcatccctctgtagtgtcacaaacacatccatgatgacatcagagaagataacagtgacaacctccacaggctccactcttggaaacccaggggagacatcatcagtacctgttactggaagtcttatgccagtcacctcagcagccttagtaacatttgatccagaaggacaatcaccagcaactttctcaaggacttctactcaggacacaacagctttttctaagaaccaccagactcagagcgtggagaccaccagagtatctcaaatcaacaccctcaacaccctcacaccggttacaacatcaactgttttatcctcaccaagtggattcaacccaagtggaacagtttctcaggagacattcccttctggtgaaacaaccacctcatccccttccagtgtcagcaatacattcctggtaacatcaaaggtgttcagaatgccaacctccagagactctactcttggaaacacagaggagacatcactatctgtaagtggaaccatttctgcaatcacttccaaagtttcaaccatatggtggtcagacactctgtcaacagcactctcccccagttctctacctccaaaaatatccacagctttccacacccagcagagtgaaggtgcagagaccacaggacggcctcatgagaggagctcattctctccaggtgtgtctcaagaaatatttactctacatgaaacaacaacatggccttcctcattctccagcaaaggccacacaacttggtcacaaacagaactgccctcaacatcaacaggtgctgccactaggcttgtcacaggaaatccatctacagggacagctggcactattccaagggtcccctctaaggtctcagcaataggggaaccaggagagcccaccacatactcctcccacagcacaactctcccaaaaacaacaggggcaggcgcccagacacaatggacacaagaaacggggaccactggagaggctcttctcagcagcccaagctacagtgtgactcagatgataaaaacggccacatccccatcttcttcacctatgctggatagacacacatcccaacaaattacaacggcaccatcaacaaatcattcaacaatacattccacaagcacctctcctcaggaatcaccagctgtttcccaaaggggtcacactcaagccccgcagaccacacaagaatcacaaaccacgaggtccgtctcccccatgactgacaccaagacagtcaccaccccaggttcttccttcacagccagtgggcactcgccctcagaaattgttcctcaggacgcacccaccataagtgcagcaacaacctttgccccagctcccaccggggatggtcacacaacccaggccccgaccacagcactgcaggcagcacccagcagccatgatgccaccctggggccctcaggaggcacgtcactttccaaaacaggtgcccttactctggccaactctgtagtgtcaacaccagggggcccagaaggacaatggacatcagcctctgccagcacctcacctgacacagcagcagccatgacccatacccaccaggctgagagcacagaggcctctggacaaacacagaccagcgaaccggcctcctcagggtcacgaaccacctcagcgggcacagctaccccttcctcatccggggcgagtggcacaacaccttcaggaagcgaaggaatatccacctcaggagagacgacaaggttttcatcaaacccctccagggacagtcacacaacccagtcaacaaccgaattgctgtccgcctcagccagtcatggtgccatcccagtaagcacaggaatggcgtcttcgatcgtccccggcacctttcatcccaccctctctgaggcctccactgcagggagaccgacaggacagtcaagcccaacttctcccagtgcctctcctcaggagacagccgccatttcccggatggcccagactcagaggacaagaaccagcagagggtctgacactatcagcctggcgtcccaggcaaccgacaccttctcaacagtcccacccacacctccatcgatcacatccactgggcttacatctccacaaaccgagacccacactctgtcaccttcagggtctggtaaaaccttcaccacggccctcatcagcaacgccacccctcttcctgtcacctacgcttcctcggcatccacaggtcacaccacccctcttcatgtcaccgatgcttcctcagtatccacaggtcacgccacccctcttcctgtcaccagcccttcctcagtatccacaggtcacaccacccctcttcctgtcaccgacacttcctcagaatccacaggtcacgtcacccctcttcctgtcaccagcttttcctcagcatccacaggtgacagcacccctcttcctgtcactgacacttcctcagcatccacaggtcacgtcacccctcttcctgtcaccagcctttcctcagcatccacaggtgacaccacccctcttcctgtcactgacacttcctcagcatccacaggtcacgccacctctcttcctgtcaccgacacttcctcagtatccacaggtcacaccacccctcttcctgtcaccgacacttcctcagcatccacaggtcacgccacctctcttcctgtcaccgacacttcctcagtatccacaggtcacaccacccctcttcatgtcactgatgcttcctcagcatccacaggtcaggccacccctcttcctgtcaccagcctttcctcagtatccacaggtgacaccacgcctcttcctgtcactagcccttcctcagcatccacaggtcacgccacccctcttcttgtcaccgacacttcctcagcatccacaggacacgccacccctcttcctgtcaccgacgcttcctcagtgtccacagatcacgccacctctcttcctgtaaccatcccttccgcagcatccacaggtcacaccacccctcttcctgtcaccgacacttcctcagcatccacaggtcaggccacctctcttcttgtcaccgacacttcctcagtatccacaggtgacaccacgcctcttcctgtcactagcacttcctcagcatccacaggtcacgtcactcctcttcatgtcaccagcccttcctcagcatccacaggtcacgccacccctcttcctgtcaccagcctttcctcagcatccacaggtgacaccatgcctcttcctgtcactagcccttcctcagcatccacaggtgacaccacccctcttcctgtcaccgacgcttcctcagtatccacaggtcacaccacccctcttcatgtcactgatgcttcctcagcatccacaggtcaggccacccctcttcctgtcaccagcctttcctcagtatccacaggtgacaccacgcctcttcctgtcactagcccttcctcagcatccacaggtcacgccacccctcttcttgtcaccgacacttcctcagcatccacaggacacgccacccctcttcctgtcaccgacgcttcctcagtgtccacagatcacgccacctctcttcctgtaaccatcccttccgcagcatccacaggtcacaccacccctcttcctgtcaccgacacttcctcagcatccacaggtcaggccacctctcttcttgtcaccgacacttcctcagtatccacaggtgacaccacgcctcttcctgtcactagcacttcctcagcatccacaggtcacgtcactcctcttcatgtcaccagcccttcctcagcatccacaggtcacgccacccctcttcctgtcaccagcctttcctcagcatccacaggtgacaccatgcctcttcctgtcactagcccttcctcagcatccacaggtgacaccacccctcttcctgtcaccgacgcttcctcagtatccacaggtcacaccacccctcttcctgtcaccagcccttcctcagcatctacaggtcacaccacccctcttcctgtcaccgacacttcctcagcatccaaaggtgacaccacccctcttcctgtcaccagcccttcctcagcatctacaggtcacaccacccctcttcctgtcaccgacacttcctcagcatccacaggtgacaccacccctcttcctgtcaccaatgcttcctcattatccacaggtcacgccacccctcttcatgtcaccagcccttcctcagcatccacaggtcacgccacccctcttcctgtcaccagcacttcctcagcatccaccggtcacgccacccctcttcctgtcaccggcctttcctcagctaccacagatgacaccacccgtcttcctgtcaccgacgtttcctcggcatccacaggtcaggccacccctcttcctgtcaccagcctttcctcagtatccacaggtgacaccacgcctcttcctgtcactagcccttcctcagcatccacaggtcacgccagccctcttcttgtcactgacgcttcctcagcatccacaggtcaggccacccctcttcctgtcaccgacacttcctcagtatccacagctcacgccaccccacttcctgtcaccggcctttcttcagcttccacagatgacaccacccgtcttcctgtcaccgacgtttcctcggcatccacaggtcaggccatccctcttcctgtcaccagcccttcctcagcatccacaggtgacaccacccctcttcctgtcaccgacgcttcctcagcatccacaggtgacaccacctctcttcctgtcaccatcccttcctcagcatcttcaggtcacaccacctctcttcctgtcaccgacgcttcctcagtgtccacaggtcacgccacctctcttcttgtcaccgacgcttcctcagtatccacaggtgacaccacccctcttcctgtcaccgacactaactcagcatccacaggtgacaccacccctcttcatgtcaccgacgcttcctcagtatccacaggtcacgccacctctcttcctgtcaccagcctttcctcagcatccacaggtgacaccacgcctcttcctgtcactagcccttcctcagcatcctcaggtcacaccacccctcttcctgtcaccgacgcttcctcagtacccacaggtcacgccacctctcttcctgtcaccgacgcttcctcagtgtccacaggtcacgccacccctcttcctgtcaccgacgcttcctcagtgtccacaggtcatgccacccctcttccggtcaccgacacttcctcagtatctacaggacaggccacccctcttcctgtcaccagcctttcctcagcatccacaggtgacaccacccctcttcctgtcaccgacacttcctcagcatccacaggtcacgccccccatcttcctgtcaccggcctttcctcagcttccacaggtgacaccacccgtcttcctgtcaccaacgtttcctcggcatccacaggtcatgccacccctcttcctgtcaccagcacttcctcagcatccacaggtgacaccacccctcttcctggcaccgacacttcctcagtatccacaggtcacaccacccctcttcttgtcaccgacgcttcgtcagtatccacaggtgacaccacccgtcttcctgtcaccagcccttcctcagcatctacaggtcacaccacccctcttcatgtcaccgatgcttcctcagtatccacaggtcacaccacccctcttcctgtcaccgacacttcctcagcatccacaggtcaggccacctctcttcttgtcaccgacacttcctcagtatccacaggtgacaccacgcctcttcctgtcactagcacttcctcagcatccacaggtcacgtcactcctcttcatgtcaccagcccttcctcagcatccacaggtcacgccacccctcttcctgtcaccagcctttcctcagcatccacaggtgacaccacccctcttcctgtcaccgacacttcctcagtatccacaggtcacaccacccctcttcctgtcaccagcccttcctcagcatctacaggtcacaccacccctcttcctgtcaccgacacttcctcagcatccaaaggtgacaccacccctcttcctgtcaccagcccttcctcagcatctacaggtcacaccacccctcttcctgtcaccgacacttcctcagcatccacaggtgacaccacccctcttcctgtcaccaatgcttcctcattatccacaggtcacgccacccctcttcatgtcaccagcccttcctcagcatccacaggtcacgccacccctcttcctgtcaccagcacttcctcagcatccaccggtcacgccacccctcttcctgtcaccagcacttcctcagcatccaccggtcacgccacccctcttcctgtcaccgacaattcctcagtatccacaggtcatgccacccctcttcctgtcaccggcctttcctcagctaccacagatgacaccacccgtcttcctgtcaccgacgtgtcctcggcatccacaggtcaggccacccctcttcctgtcaccagcctttcctcagtatccacaggtgacaccacgcctcttcctgtcactagcccttcctcagcatccacaggtcacgccagccctcttcttgtcactgacgcttcctcagcatccacaggtcaggccacccctcttcctgtcaccgacacttcctcagtatccacagctcacgccaccccacttcctgtcaccggcctttcctcagcttccacagatgacaccacccgtcttcctgtcaccgacgtttcctcggcatccacaggtcaggccatccctcttcctgtcaccagcccttcctcagcatccacaggtgacaccacccctcttcctgtcaccgacgcttcctcagcatccacaggtgacaccacctctcttcctgtcaccatcccttcctcagcatcttcaggtcacaccacctctcttcctgtcaccgacgcttcctcagtgtccacaggtcacgccacctctcttcttgtcaccgacgcttcctcagtatccacaggtgacaccacccctcttcctgtcaccgacactaactcagcatccacaggtgacaccacccctcttcatgtcaccgacgcttcctcagtatccacaggtcacgccacctctcttcctgtcaccagcctttcctcagcatccacaggtgacaccacgcctcttcctgtcactagcccttcctcagcatcctcaggtcacaccacctctcttcctgtcaccgacgcttcctcagtgtccacaggtcacgccacctctcttcctgtcaccatcccttcctcagcatcctcaggtcacaccacccctcttcctgtcaccgacgcttcctcagtacccacaggtcacgccacctctcttcctgtcaccgacgcttcctcagtgtccacaggtcacgccacccctcttcctgtcaccgacgcttcctcagtgtccacaggtcatgccacccctcttccggtcaccgacacttcctcagtatctacaggacaggccacccctcttcctgtcaccagcctttcctcagcatcatccactggtgacaccacgccgcttcctgtcactgatacttcctcagcatccacaggtcaggacacccctcttcctgtcaccagccttttctcagtatccacaggtgacaccacgcctcttcctgtcactagcccttcctcagcatccacaggtcacgccacccatcttcttgtcaccgacgcttcctcagtatccacaggtcacgccacctctcttcttgtcaccgacgcttcctcagtatccacaggtcacgccaccgctcttcatgtcaccgatgcttcctcattatccacaggggacaccacccctcttcctgtcaccagcccttcctcagcatccacaggtgacaccacccctcttcctgtcaccgacacttcctcagtatccacaggtcacgccacctctcttcctgtcactgacacttcctcagcatccacaggtcacgccacctctcttcctgtcaccgacacttcctcagcatccacaggtcaggccacccctcttcctgtcaccagcccttcctcagcatccacaggtcacgccatccctcttcttgtcaccgacacttcctcagcatccacaggacaggccacccctcttcctgtcaccagcctttcctcagcatccacaggtgacaccacccctcttcctgtcaccgatgcttcctcagtgtccacaggtcacgccacctctcttcctgtcaccagcctttcctcagtatccacaggtgacaccacccctcttcctgtcactagcccttcctcagcatccacaggtcacgccacccctcttcatgtcaccagcccttcctcagcatccacaggtcacgccacccctcttcctgtcaccagcctttcctcagcatccacaggtgacaccacgcctcttcctgtcactagcccttcctcagcatccacaggtcacgccacccctcttcatgtcaccgacgcttcctcagtatccacaggtgacaccacccctcttcctgtcaccagcccttcctcagcatcctcaggtcacaccacccctcttcctgtcaccgacgcttcctcagcatccacaggtgacaccacccctcttcctgtcaccgacacttcctcagcatccacaggtcacgccacccatcttcctgtcaccggcctttcctcagcttccacaggtgacaccacccgtcttcctgtcaccgacgtttcctcggcatccacaggtcatgccacccctcttcctgtcaccagcacttcctcagcatccacaggtgacaccacccctcttcctggcaccgacacttcctcagtatccacaggtcacaccacccctcttcttgtcaccgacgcttcgtcagtatccacaggtgacaccacccgtcttcctgtcaccagcccttcctcagcatctacaggtcacaccacccctctacctgtcaccgacactccctcagcatccacaggtgacaccacccctcttcctgtcaccaatgcttcctcattatccacacgtcacgccacctctcttcatgtcaccagcccttcctcagcatccaccggtcacgccacccctcttcctgttaccgacacttccgcagcatccacaggtcacgccacccctcttcctgtcaccagcacttcctcagcatccacaggtgacaccacccctcttcctgtcaccgacacttcctcagcatccacaggtcatgccacccctcttcctgtcaccaacacttcctcagtatccacaggtcacgccacccctcttcatgtcaccagcccttcctcagcatccacaggtcacaccacccctcttcctgtcaccgacgcttcgtcagtgtccacaggtcacgccacctctcttcctgtcaccgacgcttcctcagtgtccacaggtcacgccacccctcttcctgtcaccgacgcttcctcagtgtccacaggtcacgctacccctcttcctctcaccagcctttcctcagtatccacaggtgacaccacgcctcttcctgtcaccgacacttcctcagcatccacaggtcaggccacccctcttcctgtcaccagcctttcctcagtatccacaggtgacaccacccctcttcctgtcaccgacacttcctcagcatccacaggtcacgccacctctcttcctgtcaccgacacttcctcagcatccacaggtcacgccacccctcttcatgtcaccagcccttcctcagcatccaccggtcacgccaccccgcttcctgtcaccgacacttcctcagcatccacaggtcacgccacccctcttcctgtcaccagcctttcctcagtatccacaggtgacaccacgcctcttcctgtcactagcccttcctcagcatccacaggtcacgccactcctcttcttgtcaccgacgcttcctcagcatccacaggtcaggccacccctcttcctgtcaccagcctttcctcagtatccacaggtgacaccacgcctcttcctgtcactagcccttcctcagcatccaccggtcatgccacctctcttcctgtcaccgacacttcctcagcatccacaggtgacaccacctctcttcctgtcaccgacacttcctcagcatacacaggtgacaccacctctcttcctgtcaccgacacttcctcatcatccacaggtgacaccacccctcttcttgtcaccgagacttcctcagcatccacaggtgacaccacccctgtgcctgtcaccgacacttcctcagtatccacaggtcacgccacccctcttcctgtcaccggcctttcctcagcttccacaggtgacaccacccgtcttcctgtcaccgacatttcctcggcatccacaggtcaggccacccctcttcctgtcaccaacacttcctcagtatccacaggtgacaccatgcctcttcctgtcactagcccttcctcagcatccacaggtcacgccacccctcttcctgtcaccagcacttcctcagcatccaccggtcacgccacccctgttcctgtcaccagcacttcctcagcatccacaggtcacaccacccctcttcctgtcaccagcccttcctcagcatctacaggtcacaccacccctcttcctgtcaccgacacttcctcagcatccacaggtgacaccacccctcttcctgtcaccaatgcttcctcattatccacaggacacaccacccctcttcatgtcaccatcccttcctcagcatccacaggtgacaccagcactcttcctgtcaccggcgcttcctcagcatccaccggtcacgccacccctcttcctgtcaccgacacttcctcagtatccacaggtcacgccacccctcttcctgtcaccagcttttcctcagtatccacaggtgacaccacccctcttcctgtcaccgacgcttcctcggcatccaccggtcacgccacccctcttcctgtcaccgacacttcctcagcatccacaggtgacaccacccctcttcctgtcaccgacgcttcctcggcatccacaggtcaggccacccctcttcctgtcaccagcctttcctcagtatcaacaggtgacaccacgcctcttcctgtcaccatcccttcctcagcatcctcaggtcacaccacctctcttcctgtcagcgacacttcctcagcatccacaggtcaggccacccctcttcctgtcaccagcctttcctcagtatccacaggtgacaccacccctcttcttgtcaccgacgcttcctcagtatccacaggtcacgccacccctcttcctgtcaccgacacttcctcagcatccacaggtgacaccacccgtcttcctgtcacggacacttcctcagcatccacaggtcaggccacccctcttcctgtcaccagcctttcctcagtatccacaggtgacaccacccctcttcttgtcaccaacacttcctcagtatccacaggtcacgccacctctcttcctgtcaccatcccttcctcatcatcctcaggtcacaccacccctcttcctgtcaccagcacttcctcagtatctacaggtcacgtcacccctcttcatgtcaccagcccttcctcatcatccacaggtcaggccacccctcttcctgtcaccagcacttcctcatcatccacaggtcaggccacccctcttcctgtcaccagcacttcctcagcatccacaggtcacgccacccctcttcctgtcaccgacgcttcctcagtgtccacaggtcacgccacgcctcttcctgtcaccgacacttcctcagcatccacaggtgacaccacccctcttcctgtcaccgacacttcctcagcatccacaggtcaggccacccctcttcctgtcaccagcctttcctcagtatccacaggtcacgccacccctcttgctgtcagcagtgctacctcagcttccacagtatcctcggactcccctctgaagatggaaacatcaggaatgacaacaccgtcactgaagacagacggtgggagacgcacagccacatcaccaccccccacaacctcccagaccatcatttccaccattcccagcactgccatgcacacccgctccacagctgcccccatccccatcctgcctgagagaggagtttccctcttcccctatggggcagacgccggggacctggagttcgtcaggaggaccgtggacttcacctccccactcttcaagccggcgactggcttcccccttggctcctctctccgtgattccctctacgcttcacaggccgggaccctgtggccctggtggctccgttctgggacgatgctgacttctccactggtcgggggaccacattttatcaggaatacgagacgttctatggtgaacacagcctgctagtccagcaggccgagtcttggattagaaagatcacaaacaacgggggctacaaggccaggtgggccctaaaggtcacgtgggtcaatgcccacgcctatcctgcccagtggaccctcgggagcaacacctaccaagccatcctctccacggacgggagcaggtcctatgccctgtttctctaccagagcggtgggatgcagtgggacgtggcccagcgctcaggcaagccggtgctcatgggcttctctagtggagatggctatttcgaaaacagcccactgatgtcccagccagtgtgggagaggtatcgccctgatagattcctgaattccaactcaggcctccaagggctgcagttctacaggctacaccgggaagaaaggcccaactaccgtctcgagtgcctgcagtggctgaagagccagcctcggtggcccagctggggctggaaccaggtctcctgcccttgttcctggcagcagggacgacgggacttacgattccaacccgtcagcataggtcgctggggcctcggcagtaggcagctgtgcagcttcacctcttggcgaggaggcgtgtgctgcagctacgggccctggggagagtttcgtgaaggctggcacgtgcagcgtccttggcagttggcccaggaactggagccacagagctggtgctgccgctggaatgacaagccctacctctgtgccctgtaccagcagaggcggccccacgtgggctgtgctacatacaggcccccacagcccgcctggatgttcggggacccccacatcaccaccttggatggtgtcagttacaccttcaatgggctgggggacttcctgctggtcggggcccaagacgggaactcctccttcctgcttcagggccgcaccgcccagactggctcagcccaggccaccaacttcatcgcctttgcggctcagtaccgctccagcagcctgggccccgtcacggtccaatggctccttgagcctcacgacgcaatccgtgtcctgctggataaccagactgtgacatttcagcctgaccatgaagacggcggaggccaggagacgttcaacgccaccggagtcctcctgagccgcaacggctctgaggtctccgccagcttcgacggctgggccaccgtctcggtgatcgcgctctccaacatcctccactcctccgccagcctcccgcccgagtaccagaaccgcacggaggggctcctgggggtctggaataacaatccagaggacgacttcaggatgcccaatggctccaccattcccccagggagccctgaggagatgcttttccactttggaatgacctggcagatcaacgggacaggcctccttggcaagaggaatgaccagctgccttccaacttcacccctgttttctactcacaactgcaaaaaaacagctcctgggctgaacatttgatctccaactgtgacggagatagctcatgcatctatgacaccctggccctgcgcaacgcaagcatcggacttcacacgagggaagtcagtaaaaactacgagcaggcgaacgccaccctcaatcagtacccgccctccatcaatggtggtcgtgtgattgaagcctacaaggggcagaccacgctgattcagtacaccagcaatgctgaggatgccaacttcacgctcagagacagctgcaccgacttggagctctttgagaatgggacgttgctgtggacacccaagtcgctggagccattcactctggagattctagcaagaagtgccaagattggcttggcatctgcactccagcccaggactgtggtctgccattgcaatgcagagagccagtgtttgtacaatcagaccagcagggtgggcaactcctccctggaggtggctggctgcaagtgtgacgggggcaccttcggccgctactgcgagggctccgaggatgcctgtgaggagccgtgcttcccgagtgtccactgcgttcctgggaagggctgcgaggcctgccctccaaacctgactggggatgggcggcactgtgcggctctggggagctctttcctgtgtcagaaccagtcctgccctgtgaattactgctacaatcaaggccactgctacatctcccagactctgggctgtcagcccatgtgcacctgccccccagccttcactgacagccgctgcttcctggctgggaacaacttcagtccaactgtcaacctagaacttcccttaagagtcatccagctcttgctcagtgaagaggaaaatgcctccatggcagaggtcaacgcctcggtggcatacagactggggaccctggacatgcgggcctttctccgcaacagccaagtggaacgaatcgattctgcagcaccggcctcgggaagccccatccaacactggatggtcatctcggagttccagtaccgccctcggggcccggtcattgacttcctgaacaaccagctgctggccgcggtggtggaggcgttcttataccacgttccacggaggagtgaggagcccaggaacgacgtggtcttccagcccatctccggggaagacgtgcgcgatgtgacagccctgaacgtgagcacgctgaaggcttacttcagatgcgatggctacaagggctacgacctggtctacagcccccagagcggcttcacctgcgtgtccccgtgcagtaggggctactgtgaccatggaggccagtgccagcacctgcccagtgggccccgctgcagctgtgtgtccttctccatctacacggcctggggcgagcactgtgagcacctgagcatgaaactcgacgcgttcttcggcatcttctttggggccctgggcggcctcttgctgctgggggtcgggacgttcgtggtcctgcgcttctggggttgctccggggccaggttctcctatttcctgaactcagctgaggccttgccttgaaggggcagctgtggcctaggctacctcaagactcacctcatccttaccgcacatttaaggcgccattgcttttgggagactggaaaagggaaggtgactgaaggctgtcaggattctt

SEQ ID NO: 155723 - DNA, 22263 bp, Homo sapiens
  Payload ID: 10597
  Gene Symbol: MUC4
  Gene Name: mucin 4, cell surface associated
  ENST ID: ENST00000631201
  CDS Start-End: 73-19467
gtctgctcctcacactgcagctgctgggccgtggagcttccccagggagccagggggacttttgccgcagccatgaagggggcacgctggaggagggtcccctgggtgtccctgagctgcctgtgtctctgcctccttccgcatgtggtcccaggaaccacagaggacacattaataactggaagtaaaactcctgccccagtcacctcaacaggctcaacaacagcgacactagagggacaatcaactgcagcttcttcaaggacctctaatcaggacatatcagcttcatctcagaaccaccagactaagagcacggagaccaccagcaaagctcaaaccgacaccctcacgcagatgatgacatcaactcttttttcttccccaagtgtacacaatgtgatggagactgttacgcaggagacagctcctccagatgaaatgaccacatcatttccctccagtgtcaccaacacactcatgatgacatcaaagactataacaatgacaacctccacagactccactcttggaaacacagaagagacatcaacagcaggaactgaaagttctaccccagtgacctcagcagtctcaataacagctggacaggaaggacaatcacgaacaacttcctggaggacctctatccaagacacatcagcttcttctcagaaccactggactcggagcacgcagaccaccagggaatctcaaaccagcaccctaacacacagaaccacttcaactccttctttctctccaagtgtacacaatgtgacagggactgtttctcagaagacatctccttcaggtgaaacagctacctcatccctctgtagtgtcacaaacacatccatgatgacatcagagaagataacagtgacaacctccacaggctccactcttggaaacccaggggagacatcatcagtacctgttactggaagtcttatgccagtcacctcagcagccttagtaacagttgatccagaaggacaatcaccagtaactttctcaaggacttctactcaggacacaacagctttttctaagaaccaccagactcagagcgtggagaccaccagagtatctcaaatcaacaccctcaacaccctcacaccggttacaacatcaactgttttatcctcaccaagtggattcaacccaagtggaacagtttctcaggagacattcccttctggtgaaacaaccatctcatccccttccagtgtcagcaatacattcctggtaacatcaaaggtgttcagaatgccaatctccagagactctactcttggaaacacagaggagacatcactatctgtaagtggaaccatttctgcaatcacttccaaagtttcaaccatatggtggtcagacactctgtcaacagcactctcccccagttctctacctccaaaaatatccacagctttccacacccagcagagtgaaggtgcagagaccacaggacggcctcatgagaggagctcattctctccaggtgtgtctcaagaaatatttactctacatgaaacaacaacatggccttcctcattctccagcaaaggccacacaacttggtcacaaacagaactgccctcaacatcaacaggtgctgccactaggcttgtcacaggaaatccatctacaggggcagctggcactattccaagggtcccctctaaggtctcagcaataggggaaccaggagagcccaccacatactcctcccacagcacaactctcccaaaaacaacaggggcaggcgcccagacacaatggacacaagaaacggggaccactggagaggctcttctcagcagcccaagctacagtgtgactcagatgataaaaacggccacatccccatcttcttcacctatgctggatagacacacatcacaacaaattacaacggcaccatcaacaaatcattcaacaatacattccacaagcacctctcctcaggaatcaccagctgtttcccaaaggggtcacactcaagccccgcagaccacacaagaatcacaaaccacgaggtccgtctcccccatgactgacaccaagacagtcaccaccccaggttcttccttcacagccagtgggcactcgccctcagaaattgttcctcaggacgcacccaccataagtgcagcaacaacctttgccccagctcccaccggggatggtcacacaacccaggccccgaccacagcactgcaggcagcacccagcagccatgatgccaccctggggccctcaggaggcacgtcactttccaaaacaggtgcccttactctggccaactctgtagtgtcaacaccagggggcccagaaggacaatggacatcagcctctgccagcacctcacctgacacagcagcagccatgacccatacccaccaggctgagagcacagaggcctctggacaaacacagaccagcgaaccggcctcctcagggtcacgaaccacctcagcgggcacagctaccccttcctcatccggggcgagtggcacaacaccttcaggaagcgaaggaatatccacctcaggagagacgacaaggttttcatcaaacccctccagggacagtcacacaacccagtcaacaaccgaattgctgtccgcctcagccagtcatggtgccatcccagtaagcacaggaatggcgtcttcgatcgtccccggcacctttcatcccaccctctctgaggcctccactgcagggagaccgacaggacagtcaagcccaacttctcccagtgcctctcctcaggagacagccgccatttcccggatggcccagactcagaggacaagaaccagcagagggtctgacactatcagcctggcgtcccaggcaaccgacaccttctcaacagtcccacccacacctccatcgatcacatccagtgggcttacatctccacaaacccagacccacactctgtcaccttcagggtctggtaaaaccttcaccacggccctcatcagcaacgccacccctcttcctgtcacctacgcttcctcggcatccacaggtcacaccacccctcttcatgtcaccgatgcttcctcagtatccacaggtcacgccacccctcttcctgtcaccgacacttcctcagaatccacaggtcacgccacccctcttcctgtcaccagcccttcctcagtatccacaggtcacaccacccctcttcctgtcaccgacacttcctcagaatccacaggtcatgtcacccctcttcctgtcaccagcctttcctcagcatccacaggtgacagcacccctcttcctgtcactgacacttcctcagcatccacaggtcacgtcacccctcttcctgtcaccagcctttcctcagcatccacaggtgacaccacccctcttcctgtcactgacacttcctcagcatccacaggtcacgccacctctcttcctgtcaccgacacttcctcagtatccacaggtcacaccacccctcttcctgtcaccgacacttcctcagcatccacaggtcacgccacctctcttcctgtcaccgacacttcctcagtatccacagctcacgccaccccacttcctgtcaccggcctttcttcagcttccacagatgacaccacccgtcttcctgtcaccgacgtttcctcggcatccacaggtcaggccatccctcttcctgtcaccagcccttcctcagcatccacaggtgacaccacccctcttcctgtcaccgacgcttcctcagcatccacaggtgacaccacctctcttcctgtcaccatcccttcctcagcatcttcaggtcacaccacctctcttcctgtcaccgacgcttcctcagtgtccacaggtcacgccacctctcttcttgtcaccgacgcttcctcagtatccacaggtgacaccacccctcttcctgtcaccgacactaactcagcatccacaggtgacaccacccctcttcatgtcaccgacgcttcctcagtatccacaggtcacgccacctctcttcctgtcaccagcctttcctcagcatccacaggtgacaccacgcctcttcctgtcactagcccttcctcagcatcctcaggtcacaccacccctcttcctgtcaccgacgcttcctcagtacccacaggtcacgccacctctcttcctgtcaccgacgcttcctcagtgtccacaggtcacgccacccctcttcctgtcaccgacgcttcctcagtgtccacaggtcatgccacccctcttccggtcaccgacacttcctcagtatctacaggacaggccacccctcttcctgtcaccagcctttcctcagcatccactggtgacaccacgccgcttcctgtcaccgatacttcctcagcatccacaggtcaggacacccctcttcctgtcaccagcctttcctcagtatccacaggtgacaccacgcctcttcctgtcactagcccttcctcagcatccacaggtcacgccacccctcttcttgtcaccgacgcttcctcagtatccacaggtcacgccacctctcttcttgtcaccgacgcttcctcagtatccacaggtcacgccaccgctcttcatgtcaccgatgcttcctcattatccacaggggacaccacccctcttcctgtcaccagcccttcctcagcatccacaggtgacaccacccctcttcctgtcaccgacacttcctcagcatccacaggtcacgccacctctcttcctgtcaccgacacttcctcagcatccacaggtcacgccacccctcttcctgtcaccgacacttcctcagcatccacaggtcaggccacccctcttcctgtcaccggcccttcctcagcatccacaggtcacgccatccctcttcttgtcaccgacacttcctcagcatccacaggacaggccacccctcttcctgtcaccagcctttcctcagcatccacaggtgacaccacccctcttcctgtcaccgacgcttcctcagtgtccacaggtcacgccacctctcttcctgtcaccagcctttcctcagtatccacaggtgacaccacccctcttcctgtcaccagcccttcctcagcatcctcaggtcacaccacccctcttcctgtcaccgacgcttcctcagtatccacaggtgacaccacccctcttcctgtcaccagcccttcctcagcatcctcaggtcacaccacccctcttcctgtcaccagcccttcctcagcatcctcaggtcacaccacccctcttcctgtcaccgacgcttcctcagcatccacaggtgacaccacccctcttcctgtcaccgacacttcctcagcatccacaggtcacgccacccatcttcctgtcaccggcctttcctcagcttccacaggtgacaccacccgtcttcctgtcaccaacgtttcctcggcatccacaggtcatgccacccctcttcctgtcaccagcacttcctcagcatccacaggtgacaccacccctcttcctggcaccgacacttcctcagtatccacaggtcacaccacccctcttcttgtcaccgacgcttcgtcagtatccacaggtgacaccacccgtcttcctgtcaccagcccttcctcagcatctacaggtcacaccacccctctacctgtcaccgacactccctcagcatccacaggtgacaccacccctcttcctgtcaccaatgcttcctcattatccacacgtcacaccacctctcttcatgtcaccagcccttcctcagcatccacaggtcacgccacctctcttcctgtcaccgacacttcctcagtatccacaggtcatgccacccctcttcatgtcaccagcccttcctcagcatccacaggtgacaccacccctcttcctgtcaccgacacttactcagcatccacaggtcaggccacccctcttcctgtcaccgacacttcctcagcatccacaggtgacaccacccctcttcctgtcaccgacacttcctcagcatccacaggtcacgccacccctcttcctgtcaccaacacttcctcagtatccacaggtcacgccacccctcttcatgtcaccagcccttcctcagcatccacaggtcacaccacccctcttcctgtcaccgacgcttcgtcagtgtccacaggtcacgccacctctcttcctgtcaccgacgcttcctcagtgttcacaggtcacgccacctcgcttcctgtcaccatcccttcctcagcatcctcaggtcacaccacccctcttcctgtcaccgacgcttcctcagtgtccacaggtcacgccacctctcttcctgtcaccgacgcttcctcagtgtccacaggtcacgccacccctcttcctgtcaccgacgcttcctcagtgtccacaggtcacgctacccctcttcctgtcaccgacacttcctcagtatccacaggtcacgccacccctcttcctctcaccagcctttcctcagtatccacaggtgacaccacgcctcttcctgtcaccgacacttcctcagcatccacaggtcaggccacccctcttcctgtcaccagcctttcctcagtatccacaggtgacaccacccctcttcctgtcaccgacacttcctcagcatccacaggtcacgccacctctcttcctgtcaccgacacttcctcagcatccacaggtcacgccacccctcttcctgacaccgacacttcctcagcatccacaggtcacgccacccctcttcctgtcaccgacacttcctcagcatccacaggtcacgccacccttcttcctgtcaccgacacttcctcagcatccataggtcacgccacccctcttcctgtcaccgacacttcctcaatatccacaggtcacgccacccctcttcatgtcaccagcccttcctcagcatccaccggtcacgccaccccgcttcctgtcaccgacacttcctcagcatccacaggtcacgccaaccctcttcatgtcaccagcccttcctcagcatccaccggtcacgccaccccgcttcctgtcaccgacacttcctcagcatccacaggtcacgccacccctcttcctgtcaccagcctttcctcagtatccacaggtgacaccacgcctcttcctgtcactagcccttcctcagcatccacaggtcacaccacccctcttcctgtcaccgacacttcctcagcatccacaggtcaggccaccgctcttcctgtcaccagcacttcctcagcatccacaggtgacaccacccctcttcctgttaccgacacttcctcagcatccacaggtcaggccacccctcttcctgtcaccagcctttcctcagtatccacaggtgacaccacgcctcttcctgtcactagcccttcctcagcatccacaggtcacgccactcctcttcttgtcaccgacgcttcctcagcatccacaggtcaggccacccctcttcctgtcaccgacacttcctcagcatacacaggtgacaccacctctcttcctgtcaccgacacttcctcatcatccacaggtgacaccacccctcttcttgtcaccgagacttcctcagcatccacaggtcacgccacccctcttcatgtcaccagcccttcctcagcatccacaggtgacaccacccctgtgcctgtcaccgacacttcctcagtatccacaggtcacgccacccctcttcctgtcaccggcctttcctcagcttccacaggtgacaccacccgtcttcctgtcaccgacatttcctcggcatccacaggtcaggccacccctcttcctgtcaccaacacttcctcagcatccacaggtcacgccacccctcttcctgtcaccggcctttcctcagcttccacaggtgacaccacccgtcttcctgtcaccgacatttcctcggcatccacaggtcaggccacccctcttcctgtcaccaacacttcctcagtatccacaggtgacaccatgcctcttcctgtcactagcccttcctcagcatccacaggtcacgccacccctcttcctgtcaccagcacttcctcagcatccaccggtcacgccacccctgttcctgtcaccagcacttcctcagcatctacaggtcacaccacccctcttcctgtcaccgacacttcctcagcatccacaggtgacaccacccctcttcctgtcaccagcccttcctcagcatctacaggtcacaccacccctcttcatgtcaccatcccttcctcagcatccacaggtgacaccagcactcttcctgtcaccggcgcttcctcagcatccaccggtcacgccacccctcttcctgtcaccgacacttcctcagtatccacaggtcacgccacccctcttcctgtcaccagcttttcctcagtatccacaggtgacaccacgcctcttcctgtcaccgacacttcctcagtatccacaggtcacgccacccctcttcctgtcaccagcttttcctcagtatccacaggtgacaccacccctcttcctgtcaccgacgcttcctcggcatccaccggtcacgccacccctcttcctgtcaccgacacttcctcagtatccacaggtcacgccacccctcttcctctcaccagcctttcctcagtatccacaggtgacaccacgactcttcctgtcaccgacacttcctcagtatccacaggtcacgccacccctcttcctgtcaccagcttttcctcagtatccacaggtgacaccacccctcttcctgtcaccgacgcttcctcggcatccaccggtcacgccacccctcttcctgtcaccgacacttcctcagtatccaccggtcacgccacgcctcttcctgtcaccagcctttcctcagtatccacaggtgacaccacccctcttcctgtcaccgacgcttcctcggcatccacaggtcaggccacccctcttcctgtcaccagcctttcctcagtatcaacaggtgacaccacgcctcttcctgtcaccatcccttcctcagcatcctcaggtcacaccacctctcttcctgtcaccgacacttcctcagcatccacaggtcaggccacccctcttcctgtcaccagcctttcctcagtatccacaggtgacaccacccctcttcttgtcaccgacgcttcctcagtatccacaggtcacgccacccctcttcctgtcaccgacacttcctcagcatccacaggtgacaccacccgtcttcctgtcacagacacttcctcagcatccacaggtcaggccacccctcttcctgtcaccagcctttcctcagtatccacaggtgacaccacccctcttcttgtcaccaacacttcctcagtatccagaggtcacgccacctctcttcctgtcaccatcccttcctcatcatcctcaggtcacaccacccctcttcctgtcaccagcacttcctcagtatctacaggtcacgtcacccctcttcctgtcaccagcacttcctcagcatccacaggtcacgccacctctcttcctgtcaccgacacttcctcagtatccacaggtcacgccacctctcttcctgtcaccgacacttcctcagtatccacaggtcacgccacccctcttcctgtcaccgacgcttcctcagtgtccacaggtcacgccacgcctcttcctgtcaccgacgcttcctcagcatccacaggtgacaccacccctcttcctgtcaccaacacttcctcagcatccacaggtcaggccacccctcttcctgtcaccagcctttcctcagtatccacaggtgacaccatgcctcttcctgtcactagcccttcctcagcatccacaggtcacgccacccctcttcctgttaccggcctttcctcagcttccacaggtgacaccacccctcttcctgtcactgacacttcctcagcatccacaggtcacgtcacccctcttcctgtcaccagcctttcctcagcatccacaggtgacagcacccctcttcctgtcactgacacttcctcagcatccacaggtcacgtcacccctcttcctgtcaccagcctttcctcagcatccacaggtgacaccacccctcttcctgtcactgacacttcctcagcatccacaggtcacgccacccctcttcatgtcactgatgcttcctcagcatccacaggtcaggccacccttcttcctgtcaccagcctttcctcagtatccacaggtgacaccacgcctcttcctgtcactagcccttcctcagcatccacaggtcacgccacccctcttcttgtcaccgacacttcctcagcatccacaggacacgccacccctcttcctgtcacggacgcttcctcagtgtccacaggtcacgccacctctcttcctgtaaccatccgttcctcaggttccacaggtcacaccacccctcttcctgtcaccgacacttcctcagcatccacaggtcaggccacctctcttcttgtcaccgacacttcctcagtatccacaggtgacaccacgcctcttcctgtcactagcacttcctcagcatccacaggtcacgtcactcctcttcatgtcaccagcccttcctcagcatccacaggtcacgccacccctcttcctgtcaccagcctttcctcagcatccacaggtgacaccatgcctcttcctgtcactagcccttcctcagcatccacaggtgacaccacccctcttcctgtcaccgacgcttcctcagtatccacaggtcacaccacccctcttcctgtcaccagcccttcctcagcatctacaggtcacaccacccctcttcctgtcaccgacactacctcagcatccaaaggtgacaccacccctcttcctgtcaccagcccttcctcagcatctacaggtcacaccacccctcttcctgtcaccgacacttcctcagcatccacaggtgacaccacccctcttcctgtcaccagcccttcctcagcatccacaggtcacgccacccctcttcctgtcaccaatgcttcctcattatccacaggtcacgccacccctcttcatgtcaccagcccttcctcagcatccacaggtcacgccacccctcttcctgtcaccagcacttcctcagcatccaccggtcacgccacctctcttcctgtcaccagcacttcctcagcatccaccggtcacgccacccctcttcctgtcaccgacaattcctcagtatccacaggtcacgccacccctcttcctgtcaccggcctttcctcagctaccacagatgacaccacccgtcttcctgtcaccgacgtttcctcggcatccacaggtcaggccacccctcttcctgtcaccagcctttcctcagtatccacaggtgacaccacgcctcttcctgtcactagcccttcctcagcatccacaggtcacgccagccctcttcttgtcactgacgcttcctcagcatccacaggtcaggccacccctcttcctgtcaccgacacttcctcagtatccacagctcacgccaccccacttcctgtcaccggcctttcttcagcttccacagatgacaccacccgtcttcctgtcaccgacgtttcctcggcatccacaggtcaggccatccctcttcctgtcaccagcccttcctcagcatccacaggtgacaccacccctcttcctgtcaccgacgcttcctcagcatccacaggtgacaccacctctcttcctgtcaccatcccttcctcagcatcttcaggtcacaccacctctcttcctgtcaccgacgcttcctcagtgtccacaggtcacgccacctctcttcttgtcaccgacgcttcctcagtatccacaggtgacaccacccctcttcctgtcaccgacactaactcagcatccacaggtgacaccacccctcttcatgtcaccgacgcttcctcagtatccacaggtcacgccacctctcttcctgtcaccagcctttcctcagcatccacaggtgacaccacgcctcttcctgtcactagcccttcctcagcatcctcaggtgacaccacccctcttcctgtcaccgacacttcctcagcatccacaggtcacgccacccatcttcctgtcaccggcctttcctcagcttccacaggtgacaccacccgtcttcctgtcaccaacgtttcctcggcatccacaggtcatgccacccctcttcctgtcaccagcacttcctcagcatccacaggtgacaccacccctcttcctggcaccgacacttcctcagtatccacaggtcacaccacccctcttcttgtcaccgacgcttcgtcagtatccacaggtgacaccacccgtcttcctgtcaccagcccttcctcagcatctacaggtcacaccacccctcttcatgtcaccgatgcttcctcagtatccacaggtcacaccacccctcttcctgtcaccgacacttcctcagcatccacaggtcaggccacctctcttcttgtcaccgacacttcctcagtatccacaggtgacaccacgcctcttcctgtcactagcacttcctcagcatccacaggtcacgtcactcctcttcatgtcaccagcccttcctcagcatccacaggtcacgccacccctcttcctgtcaccagcctttcctcagcatccacaggtgacaccacccctcttcctgtcaccgacacttcctcagtatccacaggtcacaccacccctcttcctgtcaccagcccttcctcagcatctacaggtcacaccacccctcttcctgtcaccgacacttcctcagcatccaaaggtgacaccacccctcttcctgtcaccagcccttcctcagcatctacaggtcacaccacccctcttcctgtcaccgacacttcctcagcatccacaggtgacaccacccctcttcctgtcaccaatgcttcctcattatccacaggtcacgccacccctcttcatgtcaccagcccttcctcagcatccacaggtcacgccacccctcttcctgtcaccagcacttcctcagcatccaccggtcacgccacccctcttcctgtcaccagcacttcctcagcatccaccggtcacgccacccctcttcctgtcaccgacaattcctcagtatccacaggtcatgccacccctcttcctgtcaccggcctttcctcagctaccacagatgacaccacccgtcttcctgtcaccgacgtgtcctcggcatccacaggtcaggccacccctcttcctgtcaccagcctttcctcagtatccacaggtgacaccacgcctcttcctgtcactagcccttcctcagcatccacaggtcacgccagccctcttcttgtcactgacgcttcctcagcatccacaggtcaggccacccctcttcctgtcaccgacacttcctcagtatccacagctcacgccaccccacttcctgtcaccggcctttcctcagcttccacagatgacaccacccgtcttcctgtcaccgacgtttcctcggcatccacaggtcaggccatccctcttcctgtcaccagcccttcctcagcatccacaggtgacaccacccctcttcctgtcaccgacgcttcctcagcatccacaggtgacaccacctctcttcctgtcaccatcccttcctcagcatcttcaggtcacaccacctctcttcctgtcaccgacgcttcctcagtgtccacaggtcacgccacctctcttcttgtcaccgacgcttcctcagtatccacaggtgacaccacccctcttcctgtcaccgacactaactcagcatccacaggtgacaccacccctcttcatgtcaccgacgcttcctcagtatccacaggtcacgccacctctcttcctgtcaccagcctttcctcagcatccacaggtgacaccacgcctcttcctgtcactagcccttcctcagcatcctcaggtcacaccacctctcttcctgtcaccgacgcttcctcagtgtccacaggtcacgccacctctcttcctgtcaccatcccttcctcagcatcctcaggtcacaccacccctcttcctgtcaccgacgcttcctcagtacccacaggtcacgccacctctcttcctgtcaccgacgcttcctcagtgtccacaggtcacgccacccctcttcctgtcaccgacgcttcctcagtgtccacaggtcatgccacccctcttccggtcaccgacacttcctcagtatctacaggacaggccacccctcttcctgtcaccagcctttcctcagcatcatccactggtgacaccacgccgcttcctgtcactgatacttcctcagcatccacaggtcaggacacccctcttcctgtcaccagccttttctcagtatccacaggtgacaccacgcctcttcctgtcactagcccttcctcagcatccacaggtcacgccacccatcttcttgtcaccgacgcttcctcagtatccacaggtcacgccacctctcttcttgtcaccgacgcttcctcagtatccacaggtcacgccaccgctcttcatgtcaccgatgcttcctcattatccacaggggacaccacccctcttcctgtcaccagcccttcctcagcatccacaggtgacaccacccctcttcctgtcaccgacacttcctcagtatccacaggtcacgccacctctcttcctgtcactgacacttcctcagcatccacaggtcacgccacctctcttcctgtcaccgacacttcctcagcatccacaggtcaggccacccctcttcctgtcaccagcccttcctcagcatccacaggtcacgccatccctcttcttgtcaccgacacttcctcagcatccacaggacaggccacccctcttcctgtcaccagcctttcctcagcatccacaggtgacaccacccctcttcctgtcaccgatgcttcctcagtgtccacaggtcacgccacctctcttcctgtcaccagcctttcctcagtatccacaggtgacaccacccctcttcctgtcactagcccttcctcagcatccacaggtcacgccacccctcttcatgtcaccagcccttcctcagcatccacaggtcacgccacccctcttcctgtcaccagcctttcctcagcatccacaggtgacaccacgcctcttcctgtcactagcccttcctcagcatccacaggtcacgccacccctcttcatgtcaccgacgcttcctcagtatccacaggtgacaccacccctcttcctgtcaccagcccttcctcagcatcctcaggtcacaccacccctcttcctgtcaccgacgcttcctcagcatccacaggtgacaccacccctcttcctgtcaccgacacttcctcagcatccacaggtcacgccacccatcttcctgtcaccggcctttcctcagcttccacaggtgacaccacccgtcttcctgtcaccgacgtttcctcggcatccacaggtcatgccacccctcttcctgtcaccagcacttcctcagcatccacaggtgacaccacccctcttcctggcaccgacacttcctcagtatccacaggtcacaccacccctcttcttgtcaccgacgcttcgtcagtatccacaggtgacaccacccgtcttcctgtcaccagcccttcctcagcatctacaggtcacaccacccctctacctgtcaccgacactccctcagcatccacaggtgacaccacccctcttcctgtcaccaatgcttcctcattatccacacgtcacgccacctctcttcatgtcaccagcccttcctcagcatccaccggtcacgccacccctcttcctgttaccgacacttccgcagcatccacaggtcacgccacccctcttcctgtcaccagcacttcctcagcatccacaggtgacaccacccctcttcctgtcaccgacacttcctcagcatccacaggtcacgccacccctcttcctgtcaccaacacttcctcagtatccacaggtcacgccacccctcttcatgtcaccagcccttcctcagcatccacaggtcacaccacccctcttcctgtcaccgacgcttcgtcagtgtccacaggtcacgccacctctcttcctgtcaccgacgcttcctcagtgtccacaggtcacgccacccctcttcctgtcaccgacgcttcctcagtgtccacaggtcacgctacccctcttcctctcaccagcctttcctcagtatccacaggtgacaccacgcctcttcctgtcaccgacacttcctcagcatccacaggtcaggccacccctcttcctgtcaccagcctttcctcagtatccacaggtgacaccacccctcttcctgtcaccgacacttcctcagcatccacaggtcacgccacctctcttcctgtcaccgacacttcctcagcatccacaggtcacgccacccctcttcctgtcaccgacacttcctcaatatccacaggtcacgccacccctcttcatgtcaccagcccttcctcagcatccaccggtcacgccaccccgcttcctgtcaccgacacttcctcagcatccacaggtcacgccacccctcttcctgtcaccagcctttcctcagtatccacaggtgacaccacgcctcttcctgtcactagcccttcctcagcatccacaggtcacgccactcctcttcttgtcaccgacgcttcctcagcatccacaggtcaggccacccctcttcctgtcaccagcctttcctcagtatccacaggtgacaccacgcctcttcctgtcactagcccttcctcagcatccaccggtcatgccacctctcttcctgtcaccgacacttcctcagcatccacaggtgacaccacctctcttcctgtcaccgacacttcctcagcatacacaggtgacaccacctctcttcctgtcaccgacacttcctcatcatccacaggtgacaccacccctcttcttgtcaccgagacttcctcagcatccacaggtgacaccacccctgtgcctgtcaccgacacttcctcagtatccacaggtcacgccacccctcttcctgtcaccggcctttcctcagcttccacaggtgacaccacccgtcttcctgtcaccgacatttcctcggcatccacaggtcaggccacccctcttcctgtcaccaacacttcctcagtatccacaggtgacaccatgcctcttcctgtcactagcccttcctcagcatccacaggtcacgccacccctcttcctgtcaccagcacttcctcagcatccaccggtcacgccacccctgttcctgtcaccagcacttccttagcatccacaggtcacaccacccctcttcctgtcaccagcccttcctcagcatctacaggtcacaccacccctcttcctgtcaccgacacttcctcagcatccacaggtgacaccacccctcttcctgtcaccaatgcttcctcattatccacaggacacaccacccctcttcatgtcaccatcccttcctcagcatccacaggtgacaccagcactcttcctgtcaccggcgcttcctcagcatccaccggtcacgccacccctcttcctgtcaccgacacttcctcagtatccacaggtcacgccacccctcttcctgtcaccagcttttcctcagtatccacaggtgacaccacccctcttcctgtcaccgacgcttcctcggcatccaccggtcacgccacccctcttcctgtcaccgacacttcctcagcatccacaggtgacaccacccctcttcctgtcaccgacgcttcctcggcatccacaggtcaggccacccctcttcctgtcaccagcctttcctcagtatcaacaggtgacaccacgcctcttcctgtcaccatcccttcctcagcatcctcaggtcacaccacctctcttcctgtcagcgacacttcctcagcatccacaggtcaggccacccctcttcctgtcaccagcctttcctcagtatccacaggtgacaccacccctcttcttgtcaccgacgcttcctcagtatccacaggtcacgccacccctcttcctgtcaccgacacttcctcagcatccacaggtgacaccacccgtcttcctgtcacggacacttcctcagcatccacaggtcaggccacccctcttcctgtcaccagcctttcctcagtatccacaggtgacaccacccctcttcttgtcaccaacacttcctcagtatccacaggtcacgccacctctcttcctgtcaccatcccttcctcatcatcctcaggtcacaccacccctcttcctgtcaccagcacttcctcagtatctacaggtcacgtcacccctcttcatgtcaccagcccttcctcatcatccacaggtcaggccacccctcttcctgtcaccagcacttcctcagtatctacaggtcacgtcacccctcttcatgtcaccagcccttcctcagcatccacaggtcacgccacccctcttcctgtcaccagcacttcctcagcatccacaggtcacgccacccctcttcctgtcaccgacgcttcctcagtgtccacaggtcacgccacgcctcttcctgtcaccgacacttcctcagcatccacaggtgacaccacccctcttcctgtcaccgacacttcctcagcatccacaggtcaggccacccctcttcctgtcaccagcctttcctcagtatccacaggtcacgccacccctcttgctgtcagcagtgctacctcagcttccacagtatcctcggactcccctctgaagatggaaacatcaggaatgacaacaccgtcactgaagacagacggtgggagacgcacagccacatcaccaccccccacaacctcccagaccatcatttccaccattcccagcactgccatgcacacccgctccacagctgcccccatccccatcctgcctgagagaggagtttccctcttcccctatggggcagacgccggggacctggagttcgtcaggaggaccgtggacttcacctccccactcttcaagccggcgactggcttcccccttggctcctctctccgtgattccctctacttcacagacaatggccagatcatcttcccagagtcagactaccagattttctcctaccccaacccactcccaacaggcttcacaggccgggaccctgtggccctggtggctccgttctgggacgatgctgacttctccactggtcgggggaccacattttatcagagcaacacctaccaagccatcctctccacggacgggagcaggtcctatgccctgtttctctaccagagcggtgggatgcagtgggacgtggcccagcgctcagtggagatggctatttcgaaaacagcccactgatgtcccagccagtgtgggagaggtatcgccctgatagattcctgaattccaactcaggcctccaagggctgcagttctacaggctacaccgggaagaaaggcccaactaccgtctcgagtgcctgcagtggctgaagagccagcctcggtggcccagctggggctggaaccaggtctcctgcccttgttcctggcagcagggacgacgggacttacgattccaacccgtcagcataggtcgctggggcctcggcagtaggcagctgtgcagcttcacctcttggcgaggaggcgtgtgctgcagctacgggccctggggagagtttcgtgaaggctggcacgtgcagcgtccttggcagttggcccaggaactggagccacagagctggtgctgccgctggaatgacaagccctacctctgtgccctgtaccagcagaggcggccccacgtgggctgtgctacatacaggcccccacagcccgcctggatgttcggggacccccacatcaccaccttggatggtgtcagttacaccttcaatgggctgggggacttcctgctggtcggggcccaagacgggaactcctccttcctgcttcagggccgcaccgcccagactggctcagcccaggccaccaacttcatcgcctttgcggctcagtaccgctccagcagcctgggccccgtcacggtccaatggctccttgagcctcacgacgcaatccgtgtcctgctggataaccagactgtgacatttcagcctgaccatgaagacggcggaggccaggagacgttcaacgccaccggagtcctcctgagccgcaacggctctgaggtctcggccagcttcgacggctgggccaccgtctcggtgatcgcgctctccaacatcctccacgcctccgccagcctcccgcccgagtaccagaaccgcacggaggggctcctgggggtctggaataacaatccagaggacgacttcaggatgcccaatggctccaccattcccccagggagccctgaggagatgcttttccactttggaatgacctggcagatcaacgggacaggcctccttggcaagaggaatgaccagctgccttccaacttcacccctgttttctactcacaactgcaaaaaaacagctcctgggctgaacatttgatctccaactgtgacggagatagctcatgcatctatgacaccctggccctgcgcaacgcaagcatcggacttcacacgagggaagtcagtaaaaactacgagcaggcgaacgccaccctcaatcagtacccgccctccatcaatggtggtcgtgtgattgaagcctacaaggggcagaccacgctgattcagtacaccagcaatgctgaggatgccaacttcacgctcagagacagctgcaccgacttggagctctttgagaatgggacgttgctgtggacacccaagtcgctggagccattcactctggagattctagcaagaagtgccaagattggcttggcatctgcactccagcccaggactgtggtctgccattgcaatgcagagagccagtgtttgtacaatcagaccagcagggtgggcaactcctccctggaggtggctggctgcaagtgtgacgggggcaccttcggccgctactgcgagggctccgaggatgcctgtgaggagccgtgcttcccgagtgtccactgcgttcctgggaagggctgcgaggcctgccctccaaacctgactggggatgggcggcactgtgcggctctggggagctctttcctgtgtcagaaccagtcctgccctgtgaattactgctacaatcaaggccactgctacatctcccagactctgggctgtcagcccatgtgcacctgccccccagccttcactgacagccgctgcttcctggctgggaacaacttcagtccaactgtcaacctagaacttcccttaagagtcatccagctcttgctcagtgaagaggaaaatgcctccatggcagaagtcaacgcctcggtggcatacagactggggaccctggacatgcgggcctttctccgcaacagccaagtggaacgaatcgattctgcagcaccggcctcgggaagccccatccaacactggatggtcatctcggagttccagtaccgccctcggggcccggtcattgacttcctgaacaaccagctgctggccgcggtggtggaggcgttcttataccacgttccacggaggagtgaggagcccaggaacgacgtggtcttccagcccatctccggggaagacgtgcgcgatgtgacagccctgaacgtgagcacgctgaaggcttacttcagatgcgatggctacaagggctacgacctggtctacagcccccagagcggcttcacctgcgtgtccccgtgcagtaggggctactgtgaccatggaggccagtgccagcacctgcccagtgggccccgctgcagctgtgtgtccttctccatctacacggcctggggcgagcactgtgagcacctgagcatgaaactcgacgcgttcttcggcatcttctttggggccctgggcggcctcttgctgctgggggtcgggacgttcgtggtcctgcgcttctggggttgctccggggccaggttctcctatttcctgaactcagctgaggccttgccttgaaggggcagctgtggcctaggctacctcaagactcacctcatccttaccgcacatttaaggcgccattgcttttgggagactggaaaagggaaggtgactgaaggctgtcaggattctt

SEQ ID NO: 155724 - DNA, 3756 bp, Homo sapiens
  Payload ID: 10597
  Gene Symbol: MUC4
  Gene Name: mucin 4, cell surface associated
  ENST ID: ENST00000629801
  CDS Start-End: 1-413
gaatgacaacaccgtcactgaagacagacggtgggagacgcacagccacatcaccaccccccacaacctcccagaccatcatttccaccattcccagcactgccatgcacacccgctccacagctgcccccatccccatcctgcctgagagaggagtttccctcttcccctatggggcagacgccggggacctggagttcgtcaggaggaccgtggacttcacctccccactcttcaagccggcgactggcttcccccttggctcctctctccgtgattccctctacgcttcacaggccgggaccctgtggccctggtggctccgttctgggacgatgctgacttctccactggtcgggggaccacattttatcaggaatacgagacgttctatggtgaacacagcctgctagtccagcaggccgagtcttggattagaaagatgacaaacaacgggggctacaaggccaggtgggccctaaaggtcacgtgggtcaatgcccacgcctatcctgcccagtggaccctcgggagcaacacctaccaagccatcctctccacggacgggagcaggtcctatgccctgtttctctaccagagcggtgggatgcagtgggacgtggcccagcgctcagtggagatggctatttcgaaaacagcccactgatgtcccagccagtgtgggagaggtatcgccctgatagattcctgaattccaactcaggcctccaagggctgcagttctacaggctacaccgggaagaaaggcccaactaccgtctcgagtgcctgcagtggctgaagagccagcctcggtggcccagctggggctggaaccaggtctcctgcccttgttcctggcagcagggacgacgggacttacgattccaacccgtcagcataggtcgctggggcctcggcagtaggcagctgtgcagcttcacctcttggcgaggaggcgtgtgctgcagctacgggccctggggagagtttcgtgaaggctggcacgtgcagcgtccttggcagttggcccaggaactggagccacagagctggtgctgccgctggaatgacaagccctacctctgtgccctgtaccagcagaggcggccccacgtgggctgtgctacatacaggcccccacagcccgcctggatgttcggggacccccacatcaccaccttggatggtgtcagttacaccttcaatgggctgggggacttcctgctggtcggggcccaagacgggaactcctccttcctgcttcagggccgcaccgcccagactggctcagcccaggccaccaacttcatcgcctttgcggctcagtaccgctccagcagcctgggccccgtcacggtccaatggctccttgagcctcacgacgcaatccgtgtcctgctggataaccagactgtgacatttcagcctgaccatgaagacggcggaggccaggagacgttcaacgccaccggagtcctcctgagccgcaacggctctgaggtctcggccagcttcgacggctgggccaccgtctcggtgatcgcgctctccaacatcctccacgcctccgccagcctcccgcccgagtaccagaaccgcacggaggggctcctgggggtctggaataacaatccagaggacgacttcaggatgcccaatggctccaccattcccccagggagccctgaggagatgcttttccactttggaatgacctggcagatcaacgggacaggcctccttggcaagaggaatgaccagctgccttccaacttcacccctgttttctactcacaactgcaaaaaaacagctcctgggctgaacatttgatctccaactgtgacggagatagctcatgcatctatgacaccctggccctgcgcaacgcaagcatcggacttcacacgagggaagtcagtaaaaactacgagcaggcgaacgccaccctcaatcagtacccgccctccatcaatggtggtcgtgtgattgaagcctacaaggggcagaccacgctgattcagtacaccagcaatgctgaggatgccaacttcacgctcagagacagctgcaccgacttggagctctttgagaatgggacgttgctgtggacacccaagtcgctggagccattcactctggagattctagcaagaagtgccaagattggcttggcatctgcactccagcccaggactgtggtctgccattgcaatgcagagagccagtgtttgtacaatcagaccagcagggtgggcaactcctccctggaggtggctggctgcaagtgtgacgggggcaccttcggccgctactgcgagggctccgaggatgcctgtgaggagccgtgcttcccgagtgtccactgcgttcctgggaagggctgcgaggcctgccctccaaacctgactggggatgggcggcactgtgcggctctggggagctctttcctgtgtcagaaccagtcctgccctgtgaattactgctacaatcaaggccactgctacatctcccagactctgggctgtcagcccatgtgcacctgccccccagccttcactgacagccgctgcttcctggctgggaacaacttcagtccaactgtcaacctagaacttcccttaagagtcatccagctcttgctcagtgaagaggaaaatgcctccatggcagaagtcaacgcctcggtggcatacagactggggaccctggacatgcgggcctttctccgcaacagccaagtggaacgaatcgattctgcagcaccggcctcgggaagccccatccaacactggatggtcatctcggagttccagtaccgccctcggggcccggtcattgacttcctgaacaaccagctgctggccgcggtggtggaggcgttcttataccacgttccacggaggagtgaggagcccaggaacgacgtggtcttccagcccatctccggggaagacgtgcgcgatgtgacagccctgaacgtgagcacgctgaaggcttacttcagatgcgatggctacaagggctacgacctggtctacagcccccagagcggcttcacctgcgtgtccccgtgcagtaggggctactgtgaccatggaggccagtgccagcacctgcccagtgggccccgctgcagctgtgtgtccttctccatctacacggcctggggcgagcactgtgagcacctgagcatgaaactcgacgcgttcttcggcatcttctttggggccctgggcggcctcttgctgctgggggtcgggacgttcgtggtcctgcgcttctggggttgctccggggccaggttctcctatttcctgaactcagctgaggccttgccttgaaggggcagctgtggcctaggctacctcaagactcacctcatccttaccgcacatttaaggcgccattgcttttgggagactggaaaagggaaggtgactgaaggctgtcaggattcttcaaggagaatgaatactgggaatcaagacaagactataccttatccataggcgcaggtgcacagggggaggccataaagatcaaacatgcatggatgggtcctcacgcagacacacccacagaaggacactagcctgtgcacgcgcgcgtgcacacacacacacacacacacgagttcataatgtggtgatggccctaagttaagcaaaatgcttctgcacacaaaactctctggtttacttcaaattaactctatttaaataaagtctctctgactttttgtgtctccaaaa

SEQ ID NO: 155725 - DNA, 16247 bp, Homo sapiens
  Payload ID: 10597
  Gene Symbol: MUC4
  Gene Name: mucin 4, cell surface associated
  ENST ID: ENST00000629006
  CDS Start-End: 1-13451
gaaccacagaggacacattaataactggaagtaaaactgctgccccagtcacctcaacaggctcaacaacagcgacactagagggacaatcaactgcagcttcttcaaggacctctaatcaggacatatcagcttcatctcagaaccaccagactaagagcacggagaccaccagcaaagctcaaaccgacaccctcacgcagatgatgacatcaactcttttttcttccccaagtgtacacaatgtgatggagacagctcctccagatgaaatgaccacatcatttccctccagtgtcaccaacacactcatgatgacatcaaagactataacaatgacaacctccacagactccactcttggaaacacagaagagacatcaacagcaggaactgaaagttctaccccagtgacctcagcagtctcaataacagctggacaggaaggacaatcacgaacaacttcctggaggacctctatccaagacacatcagcttcttctcagaaccactggactcggagcacgcagaccaccagggaatctcaaaccagcaccctaacacacagaaccacttcaactccttctttctctccaagtgtacacaatgtgacagggactgtttctcagaagacatctccttcaggtgaaacagctacctcatccctctgtagtgtcacaaacacatccatgatgacatcagagaagataacagtgacaacctccacaggctccactcttggaaacccaggggagacatcatcagtacctgttactggaagtcttatgccagtcacctcagcagccttagtaacatttgatccagaaggacaatcaccagcaactttctcaaggacttctactcaggacacaacagctttttctaagaaccaccagactcagagcgtggagaccaccagagtatctcaaatcaacaccctcaacaccctcacaccggttacaacatcaactgttttatcctcaccaagtggattcaacccaagtggaacagtttctcaggagacattcccttctggtgaaacaaccacctcatccccttccagtgtcagcaatacattcctggtaacatcaaaggtgttcagaatgccaacctccagagactctactcttggaaacacagaggagacatcactatctgtaagtggaaccatttctgcaatcacttccaaagtttcaaccatatggtggtcagacactctgtcaacagcactctcccccagttctctacctccaaaaatatccacagctttccacacccagcagagtgaaggtgcagagaccacaggacggcctcatgagaggagctcattctctccaggtgtgtctcaagaaatatttactctacatgaaacaacaacatggccttcctcattctccagcaaaggccacacaacttggtcacaaacagaactgccctcaacatcaacaggtgctgccactaggcttgtcacaggaaatccatctacagggacagctggcactattccaagggtcccctctaaggtctcagcaataggggaaccaggagagcccaccacatactcctcccacagcacaactctcccaaaaacaacaggggcaggcgcccagacacaatggacacaagaaacggggaccactggagaggctcttctcagcagcccaagctacagtgtgactcagatgataaaaacggccacatccccatcttcttcacctatgctggatagacacacatcccaacaaattacaacggcaccatcaacaaatcattcaacaatacattccacaagcacctctcctcaggaatcaccagctgtttcccaaaggggtcacactcaagccccgcagaccacacaagaatcacaaaccacgaggtccgtctcccccatgactgacaccaagacagtcaccaccccaggttcttccttcacagccagtgggcactcgccctcagaaattgttcctcaggacgcacccaccataagtgcagcaacaacctttgccccagctcccaccggggatggtcacacaacccaggccccgaccacagcactgcaggcagcacccagcagccatgatgccaccctggggccctcaggaggcacgtcactttccaaaacaggtgcccttactctggccaactctgtagtgtcaacaccagggggcccagaaggacaatggacatcagcctctgccagcacctcacctgacacagcagcagccatgacccatacccaccaggctgagagcacagaggcctctggacaaacacagaccagcgaaccggcctcctcagggtcacgaaccacctcagcgggcacagctaccccttcctcatccggggcgagtggcacaacaccttcaggaagcgaaggaatatccacctcaggagagacgacaaggttttcatcaaacccctccagggacagtcacacaacccagtcaacaaccgaattgctgtccgcctcagccagtcatggtgccatcccagtaagcacaggaatggcgtcttcgatcgtccccggcacctttcatcccaccctctctgaggcctccactgcagggagaccgacaggacagtcaagcccaacttctcccagtgcctctcctcaggagacagccgccatttcccggatggcccagactcagaggacaagaaccagcagagggtctgacactatcagcctggcgtcccaggcaaccgacaccttctcaacagtcccacccacacctccatcgatcacatccactgggcttacatctccacaaaccgagacccacactctgtcaccttcagggtctggtaaaaccttcaccacggccctcatcagcaacgccacccctcttcctgtcacctacgcttcctcggcatccacaggtcacaccacccctcttcatgtcaccgatgcttcctcagtatccacaggtcacgccacccctcttcctgtcaccagcccttcctcagtatccacaggtcacaccacccctcttcctgtcaccgacacttcctcagaatccacaggtcacgtcacccctcttcctgtcaccagcttttcctcagcatccacaggtgacagcacccctcttcctgtcactgacacttcctcagcatccacaggtcacgtcacccctcttcctgtcaccagcctttcctcagcatccacaggtgacaccacccctcttcctgtcactgacacttcctcagcatccacaggtcacgccacctctcttcctgtcaccgacacttcctcagtatccacaggtcacaccacccctcttcctgtcaccgacacttcctcagcatccacaggtcacgccacctctcttcctgtcaccgacacttcctcagtatccacaggtcacaccacccctcttcatgtcactgatgcttcctcagcatccacaggtcaggccacccctcttcctgtcaccagcctttcctcagtatccacaggtgacaccacgcctcttcctgtcactagcccttcctcagcatccacaggtcacgccacccctcttcttgtcaccgacacttcctcagcatccacaggacacgccacccctcttcctgtcaccgacgcttcctcagtgtccacagatcacgccacctctcttcctgtaaccatcccttccgcagcatccacaggtcacaccacccctcttcctgtcaccgacacttcctcagcatccacaggtcaggccacctctcttcttgtcaccgacacttcctcagtatccacaggtgacaccacgcctcttcctgtcactagcacttcctcagcatccacaggtcacgtcactcctcttcatgtcaccagcccttcctcagcatccacaggtcacgccacccctcttcctgtcaccagcctttcctcagcatccacaggtgacaccatgcctcttcctgtcactagcccttcctcagcatccacaggtgacaccacccctcttcctgtcaccgacgcttcctcagtatccacaggtcacaccacccctcttcatgtcactgatgcttcctcagcatccacaggtcaggccacccctcttcctgtcaccagcctttcctcagtatccacaggtgacaccacgcctcttcctgtcactagcccttcctcagcatccacaggtcacgccacccctcttcttgtcaccgacacttcctcagcatccacaggacacgccacccctcttcctgtcaccgacgcttcctcagtgtccacagatcacgccacctctcttcctgtaaccatcccttccgcagcatccacaggtcacaccacccctcttcctgtcaccgacacttcctcagcatccacaggtcaggccacctctcttcttgtcaccgacacttcctcagtatccacaggtgacaccacgcctcttcctgtcactagcacttcctcagcatccacaggtcacgtcactcctcttcatgtcaccagcccttcctcagcatccacaggtcacgccacccctcttcctgtcaccagcctttcctcagcatccacaggtgacaccatgcctcttcctgtcactagcccttcctcagcatccacaggtgacaccacccctcttcctgtcaccgacgcttcctcagtatccacaggtcacaccacccctcttcctgtcaccagcccttcctcagcatctacaggtcacaccacccctcttcctgtcaccgacacttcctcagcatccaaaggtgacaccacccctcttcctgtcaccagcccttcctcagcatctacaggtcacaccacccctcttcctgtcaccgacacttcctcagcatccacaggtgacaccacccctcttcctgtcaccaatgcttcctcattatccacaggtcacgccacccctcttcatgtcaccagcccttcctcagcatccacaggtcacgccacccctcttcctgtcaccagcacttcctcagcatccaccggtcacgccacccctcttcctgtcaccggcctttcctcagctaccacagatgacaccacccgtcttcctgtcaccgacgtttcctcggcatccacaggtcaggccacccctcttcctgtcaccagcctttcctcagtatccacaggtgacaccacgcctcttcctgtcactagcccttcctcagcatccacaggtcacgccagccctcttcttgtcactgacgcttcctcagcatccacaggtcaggccacccctcttcctgtcaccgacacttcctcagtatccacagctcacgccaccccacttcctgtcaccggcctttcttcagcttccacagatgacaccacccgtcttcctgtcaccgacgtttcctcggcatccacaggtcaggccatccctcttcctgtcaccagcccttcctcagcatccacaggtgacaccacccctcttcctgtcaccgacgcttcctcagcatccacaggtgacaccacctctcttcctgtcaccatcccttcctcagcatcttcaggtcacaccacctctcttcctgtcaccgacgcttcctcagtgtccacaggtcacgccacctctcttcttgtcaccgacgcttcctcagtatccacaggtgacaccacccctcttcctgtcaccgacactaactcagcatccacaggtgacaccacccctcttcatgtcaccgacgcttcctcagtatccacaggtcacgccacctctcttcctgtcaccagcctttcctcagcatccacaggtgacaccacgcctcttcctgtcactagcccttcctcagcatcctcaggtcacaccacccctcttcctgtcaccgacgcttcctcagtacccacaggtcacgccacctctcttcctgtcaccgacgcttcctcagtgtccacaggtcacgccacccctcttcctgtcaccgacgcttcctcagtgtccacaggtcatgccacccctcttccggtcaccgacacttcctcagtatctacaggacaggccacccctcttcctgtcaccagcctttcctcagcatccactggtgacaccacgccgcttcctgtcaccgatacttcctcagcatccacaggtcaggacacccctcttcctgtcaccagcctttcctcagtatccacaggtgacaccacgcctcttcctgtcactaacccttcctcagcatccacaggtcacgccacccctcttcttgtcaccgacgcttcctcaatatccacaggtcacgccacctctcttcttgtcaccgacgcttcctcagtatccacaggtcacgccaccgctcttcatgacaccgatgcttcctcattatccacaggggacaccacccctcttcctgtcaccagcccttcctcaacatccacaggtgacaccacccctcttcctgtcaccgaaacttcctcagtatccacaggtcacgccacctctcttcctgtcaccgacacttcctcagcatccacaggtcacgccacctctcttcctgtcaccgacacttcctcagcatccacaggtcacgccacccctcttcctgtcaccgacacttcctcagcatccacaggtcaggccacccctcttcctgtcaccagcccttcctcagcatccacaggtcacgccatccctcttcttgtcaccgacacttcctcagcatccacaggacaggccacccctcttcctgtcaccagcctttcctcagcatccacaggtgacaccacccctcttcctgtcaccgacgcttcctcagtgtccacaggtcacgccacctctcttcctgtcaccagcctttcctcagtatccacaggtgacaccactcctcttcctgtcactagcccttcctcagcatccacaggtcacgccacccctcttcatgtcaccgacgcttcctcagcatccacaggtcacgccacccctcttcctgtcaccagcctttcctcagcatccacaggtgacaccacgcctcttcctgtcactagcccttcctcagcatccacaggtcacgccacccctcttcatgtcaccgacgcttcctcagtatccacaggtgacaccacccctcttcctgtcaccagctcttcctcagcatcctcaggtcacaccacccctcttcctgtcaccgacgcttcctcagcatccacaggtgacaccacccctcttcctgtcaccgacacttcctcagcatccacaggtcacgccacccatcttcctgtcaccggcctttcctcagcttccacaggtgacaccacccgtcttcctgtcaccaacgtttcctcggcatccacaggtcatgccacccctcttcctgtcaccagcacttcctcagcatccacaggtgacaccacccctcttcctggcaccgacacttcctcagtatccacaggtcacaccacccctcttcttgtcaccgacgcttcgtcagtatccacaggtgacaccacccgtcttcctgtcaccagcccttcctcagcatctacaggtcacaccacccctctacctgtcaccgacactccctcagcatccacaggtgacaccacccctcttcctgtcaccaatgcttcctcattatccacacgtcacgccacctctcttcatgtcaccagcccttcctcagcatccacaggtcacgccacctctcttcctgtcaccgacacttccgcagcatccacaggtcacgccacccctcttcctgtcaccagcacttcctcagcatccacaggtgacaccacccctcttcctgtcaccgacacttactcagcatccacaggtcaggccacccctcttcctgtcaccagcctttcctcagtatccacaggtgacaccacgcctcttcctgtcactagcccttcctcagcatccacaggtcacgccactcctcttcttgtcaccgacgcttcctcagcatccacaggtcaggccacccctcttcctgtcaccagcctttcctcagtatccacaggtgacaccacgcctcttcctgtcactagcccttcctcagcatccaccggtcatgccacctctcttcctgtcaccgacacttcctcagcatccacaggtgacaccacctctcttcctgtcaccgacacttcctcagcatacacaggtgacaccacctctcttcctgtcaccgacacttcctcatcatccacaggtgacaccacccctcttcttgtcaccgagacttcctcagtatccacaggtgacaccacccctcttcctgtcaccgacacttcctcagcatccacaggtcacgccacccctcttcctgtcaccaacacttcctcagtatccacaggtcacgccacccctcttcatgtcaccagcccttcctcagcatccacaggtcacaccacccctcttcctgtcaccgacgcttcgtcagtgtccacaggtcacgccacctctcttcctgtcaccgacgcttcctcagtgttcacaggtcatgccacctctcttcctgtcaccatcccttcctcagcatcctcaggtcacaccacccctcttcctgtcaccgacgcttcctcagtgtccacaggtcacgccacctctcttcctgtcaccgacgcttcctcagtgtccacaggtcatgccacccctcttcctgtcaccgacgcttcctcagtgtccacaggtcacgctacccctcttcctctcaccagcctttcctcagtatccacaggtgacaccacgcctcttcctgtcaccgacacttcctcagcatccacaggtcaggccacccctcttcctgtcaccagcctttcctcagtatccacaggtgacaccacccctcttcctgtcaccgacacttcctcagcatccacaggtcacgccacctctcttcctgtcaccgacacttcctcagcatccacaggtcacgccacccctcttcctgacaccgacacttcctcagcatccacaggtcacgccacccttcttcctgtcaccgacacttcctcagcatccataggtcacgccacctctcttcctgtcaccgacacttcctcaatatccacaggtcacgccacccctcttcatgtcaccagcccttcctcagcatccaccggtcacgccaccccgcttcctgtcaccgacacttcctcagcatccacaggtcacgccaaccctcttcatgtcaccagcccttcctcagcatccaccggtcacgccaccccgcttcctgtcaccgacacttcctcagcatccacaggtcacgccacccctcttcctgtcaccagcctttcctcagtatccacaggtgacaccacgcctcttcctgtcactagcccttcctcagcatccacaggtcacaccacccctcttcctgtcaccgacacttcctcagcatccacaggtcaggccaccgctcttcctgtcaccagcacttcctcagcatccacaggtgacaccacccctcttcctgtcaccgacacttcctcagcatccacaggtcaggccacccctcttcctgtcaccagcctttcctcagtatccacaggtgacaccacgcctcttcctgtcactagcccttcctcagcatccacaggtcacgccactcctcttcttgtcaccgacgcttcctcagcatccacaggtcaggccacccctcttcctgtcaccagcctttcctcagtatccacaggtgacaccacgcctcttcctgtcactagcccttcctcagcatccaccggtcatgccacctctcttcctgtcaccgacacttcctcagcatccacaggtgacaccacctctcttcctgtcaccgacacttcctcagcatacacaggtgacaccacctctcttcctgtcaccgacacttcctcatcatccacaggtgacaccacccctcttcttgtcaccgagacttcctcagtatccacaggtcacgccactcctcttcttgtcaccgacgcttcctcagcatccacaggtcacgccacccctcttcatgtcaccagcccttcctcagcatccacaggtgacaccacccctgtgcctgtcaccgacacttcctcagtatccacaggtcacgccacccctcttcctgtcaccggcctttcctcagcttccacaggtgacaccacccgtcttcctgtcaccgacatttcctcggcatccacaggtcaggccacccctcttcctgtcaccaacacttcctcagtatccacaggtgacaccatgcctcttcctgtcactagcccttcctcagcatccacaggtcacgccacccctcttcctgtcaccagcacttcctcagcatccaccggtcacgccacccctgttcctgtcaccagcacttcctcagcatctacaggtcacaccacccctcttcctgtcaccgacacttcctcagcatccacaggtgacaccacccctcttcctgtcaccagcccttcctcagcatctacaggtcacaccacccctcttcatgtcaccatcccttcctcagcatccacaggtgacaccagcactcttcctgtcaccggcgcttcctcagcatccaccggtcacgccacccctcttcctgtcaccgacacttcctcagtatccaccggtcacgccacgcctcttcctgtcaccagcctttcctcagtatccacaggtgacaccacccctcttcctgtcaccgacgcttcctcggcatccacaggtcaggccacccctcttcctgtcaccagcctttcctcagtatccacaggtgacaccacccctcttcttgtcaccgacgcttcctcagtatccacaggtcacgccacccctcttcctgtcaccgacacttcctcagcatccacaggtgacaccacccgtcttcctgtcacggacacttcctcagcatccacaggtcaggccacccctcttcctgtcaccagcctttcctcagtatccacaggtgacaccacccctcttcttgtcaccgacgcttcctcagtatccacaggtcacgccacccctcttcctgtcaccgacacttcctcagcatccacaggtgacaccacccgtcttcctgtcacggacacttcctcagcatccacaggtcaggccacccctcttcctgtcaccatcccttcctcatcatcctcaggtcacaccacccctcttcctgtcaccagcacttcctcagtatctacaggtcacgtcacccctcttcatgtcaccagcccttcctcagcatccacaggtcacgtcacccctcttcctgtcaccagcacttcctcagcatccacaggtcacgccacccctcttcttgtcaccgacgcttcctcagtgtccacaggtcacgccacgcctcttcctgtcaccgacgcttcctcagcatccacaggtgacaccacccctcttcctgtcaccgacacttcctcagcatccacaggtcaggccacccctcttcctgtcaccagcctttcctcagtatccacaggtgacaccacccctcttcctgtcaccgacgcttcctcagcatccacaggtcacgccacccctcttcctgtcaccatcccttcctcagtatccacaggtgacaccatgcctcttcctgtcactagcccttcctcagcatccacaggtcacgccacccctcttcctgttaccggcctttcctcagcttccacaggtgacaccacccctcttcctgtcaccgacacttcctcagcatccacacgtcacgccacccctcttcctgtcaccgacacttcctcagcttccacagatgacaccacccgtcttcctgtcaccgacgtttcctcggcatccacaggacatgccacccctcttcctgtcaccagcacttcctcagcatccacaggtgacaccacccctcttcctgtcaccgacacttcctcagtatccacaggtcacgccacctctcttcctgtcaccagccgttcctcagcatccacaggtcacgccaccccccttcctgtcaccgacacttcctcagtatccacaggtcacgccacccctcttcctgtcaccagcacttcctcagtatctacaggtcacgccacccctcttcctgtcaccagcccttcctcagcatccacaggtcacgccacccctgttcctgtcaccagcacttcctcagcatccacaggtgacaccacccctcttcctgtcaccaatgcttcctcattatccacaggtcacgccacccctcttcatgtcaccagcccttcctcagcatccagaggtgacaccagcactcttcctgtcaccgatgcttcctcagcatccaccggtcacgccacccctcttcctctcaccagcctttcctcagtatccacaggtgacaccacgcctcttcctgtcaccgacacttcctctgcatccacaggtcaggccacccctcttcctgtcaccagcctttcctcagtatccacaggtgacaccacgcctcttcctgtcaccatcccttcctcagcatcctcaggtcacaccacctctcttcctgtcaccgacgcttcctcagtgtccacaggtcacggcacccctcttcctgtcaccagcacttcctcagcatccacaggtgacaccacccctcttcctgtcaccgacacttcctcagcatccacaggtcacgccacccctcttcctgtcaccgacacttcctcagcatccacaggtcacgccacccctcttcctgtcaccagcctttcctcagtatccacaggtcacgccacccctcttgctgtcagcagtgctacctcagcttccacagtatcctcggactcccctctgaagatggaaacaccaggaatgacaacaccgtcactgaagacagacggtgggagacgcacagccacatcaccaccccccacaacctcccagaccatcatttccaccattcccagcactgccatgcacacccgctccacagctgcccccatccccatcctgcctgagagaggagtttccctcttcccctatggggcaggcgccggggacctggagttcgtcaggaggaccgtggacttcacctccccactcttcaagccggcgactggcttcccccttggctcctctctccgtgattccctctacttcacagacaatggccagatcatcttcccagagtcagactaccagattttctcctaccccaacccactcccaacaggcttcacaggccgggaccctgtggccctggtggctccgttctgggacgatgctgacttctccactggtcgggggaccacattttatcaggaatacgagacgttctatggtgaacacagcctgctagtccagcaggccgagtcttggattagaaagatgacaaacaacgggggctacaaggccaggtgggccctaaaggtcacgtgggtcaatgcccacgcctatcctgcccagtggaccctcgggagcaacacctaccaagccatcctctccacggacgggagcaggtcctatgccctgtttctctaccagagcggtgggatgcagtgggacgtggcccagcgctcagtggagatggctatttcgaaaacagcccactgatgtcccagccagtgtgggagaggtatcgccctgatagattcctgaattccaactcaggcctccaagggctgcagttctacaggctacaccgggaagaaaggcccaactaccgtctcgagtgcctgcagtggctgaagagccagcctcggtggcccagctggggctggaaccaggtctcctgcccttgttcctggcagcagggacgacgggacttacgattccaacccgtcagcataggtcgctggggcctcggcagtaggcagctgtgcagcttcacctcttggcgaggaggcgtgtgctgcagctacgggccctggggagagtttcgtgaaggctggcacgtgcagcgtccttggcagttggcccaggaactggagccacagagctggtgctgccgctggaatgacaagccctacctctgtgccctgtaccagcagaggcggccccacgtgggctgtgctacatacaggcccccacagcccgcctggatgttcggggacccccacatcaccaccttggatggtgtcagttacaccttcaatgggctgggggacttcctgctggtcggggcccaagacgggaactcctccttcctgcttcagggccgcaccgcccagactggctcagcccaggccaccaacttcatcgcctttgcggctcagtaccgctccagcagcctgggccccgtcacggtccaatggctccttgagcctcacgacgcaatccgtgtcctgctggataaccagactgtgacatttcagcctgaccatgaagacggcggaggccaggagacgttcaacgccaccggagtcctcctgagccgcaacggctctgaggtctcggccagcttcgacggctgggccaccgtctcggtgatcgcgctctccaacatcctccacgcctccgccagcctcccgcccgagtaccagaaccgcacggaggggctcctgggggtctggaataacaatccagaggacgacttcaggatgcccaatggctccaccattcccccagggagccctgaggagatgcttttccactttggaatgacctggcagatcaacgggacaggcctccttggcaagaggaatgaccagctgccttccaacttcacccctgttttctactcacaactgcaaaaaaacagctcctgggctgaacatttgatctccaactgtgacggagatagctcatgcatctatgacaccctggccctgcgcaacgcaagcatcggacttcacacgagggaagtcagtaaaaactacgagcaggcgaacgccaccctcaatcagtacccgccctccatcaatggtggtcgtgtgattgaagcctacaaggggcagaccacgctgattcagtacaccagcaatgctgaggatgccaacttcacgctcagagacagctgcaccgacttggagctctttgagaatgggacgttgctgtggacacccaagtcgctggagccattcactctggagattctagcaagaagtgccaagattggcttggcatctgcactccagcccaggactgtggtctgccattgcaatgcagagagccagtgtttgtacaatcagaccagcagggtgggcaactcctccctggaggtggctggctgcaagtgtgacgggggcaccttcggccgctactgcgagggctccgaggatgcctgtgaggagccgtgcttcccgagtgtccactgcgttcctgggaagggctgcgaggcctgccctccaaacctgactggggatgggcggcactgtgcggctctggggagctctttcctgtgtcagaaccagtcctgccctgtgaattactgctacaatcaaggccactgctacatctcccagactctgggctgtcagcccatgtgcacctgccccccagccttcactgacagccgctgcttcctggctgggaacaacttcagtccaactgtcaacctagaacttcccttaagagtcatccagctcttgctcagtgaagaggaaaatgcctccatggcagaagtcaacgcctcggtggcatacagactggggaccctggacatgcgggcctttctccgcaacagccaagtggaacgaatcgattctgcagcaccggcctcgggaagccccatccaacactggatggtcatctcggagttccagtaccgccctcggggcccggtcattgacttcctgaacaaccagctgctggccgcggtggtggaggcgttcttataccacgttccacggaggagtgaggagcccaggaacgacgtggtcttccagcccatctccggggaagacgtgcgcgatgtgacagccctgaacgtgagcacgctgaaggcttacttcagatgcgatggctacaagggctacgacctggtctacagcccccagagcggcttcacctgcgtgtccccgtgcagtaggggctactgtgaccatggaggccagtgccaacacctgcccagtgggccccgctgcagctgtgtgtccttctccatctacacggcctggggcgagcactgtgagcacctgagcatgaaactcgacgcgttcttcggcatcttctttggggccctgggcggcctcttgctgctgggggtcgggacgttcgtggtcctgcgcttctggggttgctccggggccaggttctcctatttcctgaactcagctgaggccttgccttgaaggggcagctgtggcctaggctacctcaagactcacctcatccttaccgcacatttaaggcgccattgcttttgggagactggaaaagggaaggtgactgaaggctgtcaggattctt

SEQ ID NO: 155726 - DNA, 3858 bp, Homo sapiens
  Payload ID: 10597
  Gene Symbol: MUC4
  Gene Name: mucin 4, cell surface associated
  ENST ID: ENST00000631127
  CDS Start-End: 1-3449
gaatgacaacaccgtcactgaagacagacggtgggagacgcacagccacatcaccaccccccacaacctcccagaccatcatttccaccattcccagcactgccatgcacacccgctccacagctgcccccatccccatcctgcctgagagaggagtttccctcttcccctatggggcaggcgccggggacctggagttcgtcaggaggaccgtggacttcacctccccactcttcaagccggcgactggcttcccccttggctcctctctccgtgattccctctacttcacagacaatggccagatcatcttcccagagtcagactaccagattttctcctaccccaacccactcccaacaggcttcacaggccgggaccctgtggccctggtggctccgttctgggacgatgctgacttctccactggtcgggggaccacattttatcaggaatacgagacgttctatggtgaacacagcctgctagtccagcaggccgagtcttggattagaaagatgacaaacaacgggggctacaaggccaggtgggccctaaaggtcacgtgggtcaatgcccacgcctatcctgcccagtggaccctcgggagcaacacctaccaagccatcctctccacggacgggagcaggtcctatgccctgtttctctaccagagcggtgggatgcagtgggacgtggcccagcgctcaggcaacccggtgctcatgggcttctctagtggagatggctatttcgaaaacagcccactgatgtcccagccagtgtgggagaggtatcgccctgatagattcctgaattccaactcaggcctccaagggctgcagttctacaggctacaccgggaagaaaggcccaactaccgtctcgagtgcctgcagtggctgaagagccagcctcggtggcccagctggggctggaaccaggtctcctgcccttgttcctggcagcagggacgacgggacttacgattccaacccgtcagcataggtcgctggggcctcggcagtaggcagctgtgcagcttcacctcttggcgaggaggcgtgtgctgcagctacgggccctggggagagtttcgtgaaggctggcacgtgcagcgtccttggcagttggcccaggaactggagccacagagctggtgctgccgctggaatgacaagccctacctctgtgccctgtaccagcagaggcggccccacgtgggctgtgctacatacaggcccccacagcccgcctggatgttcggggacccccacatcaccaccttggatggtgtcagttacaccttcaatgggctgggggacttcctgctggtcggggcccaagacgggaactcctccttcctgcttcagggccgcaccgcccagactggctcagcccaggccaccaacttcatcgcctttgcggctcagtaccgctccagcagcctgggccccgtcacggtccaatggctccttgagcctcacgacgcaatccgtgtcctgctggataaccagactgtgacatttcagcctgaccatgaagacggcggaggccaggagacgttcaacgccaccggagtcctcctgagccgcaacggctctgaggtctcggccagcttcgacggctgggccaccgtctcggtgatcgcgctctccaacatcctccacgcctccgccagcctcccgcccgagtaccagaaccgcacggaggggctcctgggggtctggaataacaatccagaggacgacttcaggatgcccaatggctccaccattcccccagggagccctgaggagatgcttttccactttggaatgacctggcagatcaacgggacaggcctccttggcaagaggaatgaccagctgccttccaacttcacccctgttttctactcacaactgcaaaaaaacagctcctgggctgaacatttgatctccaactgtgacggagatagctcatgcatctatgacaccctggccctgcgcaacgcaagcatcggacttcacacgagggaagtcagtaaaaactacgagcaggcgaacgccaccctcaatcagtacccgccctccatcaatggtggtcgtgtgattgaagcctacaaggggcagaccacgctgattcagtacaccagcaatgctgaggatgccaacttcacgctcagagacagctgcaccgacttggagctctttgagaatgggacgttgctgtggacacccaagtcgctggagccattcactctggagattctagcaagaagtgccaagattggcttggcatctgcactccagcccaggactgtggtctgccattgcaatgcagagagccagtgtttgtacaatcagaccagcagggtgggcaactcctccctggaggtggctggctgcaagtgtgacgggggcaccttcggccgctactgcgagggctccgaggatgcctgtgaggagccgtgcttcccgagtgtccactgcgttcctgggaagggctgcgaggcctgccctccaaacctgactggggatgggcggcactgtgcggctctggggagctctttcctgtgtcagaaccagtcctgccctgtgaattactgctacaatcaaggccactgctacatctcccagactctgggctgtcagcccatgtgcacctgccccccagccttcactgacagccgctgcttcctggctgggaacaacttcagtccaactgtcaacctagaacttcccttaagagtcatccagctcttgctcagtgaagaggaaaatgcctccatggcagaagtcaacgcctcggtggcatacagactggggaccctggacatgcgggcctttctccgcaacagccaagtggaacgaatcgattctgcagcaccggcctcgggaagccccatccaacactggatggtcatctcggagttccagtaccgccctcggggcccggtcattgacttcctgaacaaccagctgctggccgcggtggtggaggcgttcttataccacgttccacggaggagtgaggagcccaggaacgacgtggtcttccagcccatctccggggaagacgtgcgcgatgtgacagccctgaacgtgagcacgctgaaggcttacttcagatgcgatggctacaagggctacgacctggtctacagcccccagagcggcttcacctgcgtgtccccgtgcagtaggggctactgtgaccatggaggccagtgccagcacctgcccagtgggccccgctgcagctgtgtgtccttctccatctacacggcctggggcgagcactgtgagcacctgagcatgaaactcgacgcgttcttcggcatcttctttggggccctgggcggcctcttgctgctgggggtcgggacgttcgtggtcctgcgcttctggggttgctccggggccaggttctcctatttcctgaactcagctgaggccttgccttgaaggggcagctgtggcctaggctacctcaagactcacctcatccttaccgcacatttaaggcgccattgcttttgggagactggaaaagggaaggtgactgaaggctgtcaggattcttcaaggagaatgaatactgggaatcaagacaagactataccttatccataggcgcaggtgcacagggggaggccataaagatcaaacatgcatggatgggtcctcacgcagacacacccacagaaggacactagcctgtgcacgcgcgcgtgcacacacacacacacacaagagttcataatgtggtgatggccctaagttaagcaaaatgcttctgcacacaaaactctctggtttacttcaaattaactctatttaaataaagtctctctgactttttgtgtcttcaaaa

SEQ ID NO: 155727 - DNA, 3622 bp, Homo sapiens
  Payload ID: 10597
  Gene Symbol: MUC4
  Gene Name: mucin 4, cell surface associated
  ENST ID: ENST00000627062
  CDS Start-End: 1-413
gaatgacaacaccgtcactgaagacagacggtgggagacgcacagccacatcaccaccccccacaacctcccagaccatcatttccaccattcccagcactgccatgcacacccgctccacagctgcccccatccccatcctgcctgagagaggagtttccctcttcccctatggggcagacgccggggacctggagttcgtcaggaggaccgtggacttcacctccccactcttcaagccggcgactggcttcccccttggctcctctctccgtgattccctctacgcttcacaggccgggaccctgtggccctggtggctccgttctgggacgatgctgacttctccactggtcgggggaccacattttatcaggaatacgagacgttctatggtgaacacagcctgctagtccagcaggccgagtcttggattagaaagatcacaaacaacgggggctacaaggccaggtgggccctaaaggtcacgtgggtcaatgcccacgcctatcctgcccagtggaccctcgggagcaacacctaccaagccatcctctccacggacgggagcaggtcctatgccctgtttctctaccagagcggtgggatgcagtgggacgtggcccagcgctcaggcaagccggtgctcatgggcttctctagtggagatggctatttcgaaaacagcccactgatgtcccagccagtgtgggagaggtatcgccctgatagattcctgaattccaactcaggcctccaagggctgcagttctacaggctacaccgggaagaaaggcccaactaccgtctcgagtgcctgcagtggctgaagagccagcctcggtggcccagctggggctggaaccaggtctcctgcccttgttcctggcagcagggacgacgggacttacgattccaacccgtcagcataggtcgctggggcctcggcagtaggcagctgtgcagcttcacctcttggcgaggaggcgtgtgctgcagctacgggccctggggagagtttcgtgaaggctggcacgtgcagcgtccttggcagttggcccaggaactggagccacagagctggtgctgccgctggaatgacaagccctacctctgtgccctgtaccagcagaggcggccccacgtgggctgtgctacatacaggcccccacagcccgcctggatgttcggggacccccacatcaccaccttggatggtgtcagttacaccttcaatgggctgggggacttcctgctggtcggggcccaagacgggaactcctccttcctgcttcagggccgcaccgcccagactggctcagcccaggccaccaacttcatcgcctttgcggctcagtaccgctccagcagcctgggccccgtcacggtccaatggctccttgagcctcacgacgcaatccgtgtcctgctggataaccagactgtgacatttcagcctgaccatgaagacggcggaggccaggagacgttcaacgccaccggagtcctcctgagccgcaacggctctgaggtctccgccagcttcgacggctgggccaccgtctcggtgatcgcgctctccaacatcctccactcctccgccagcctcccgcccgagtaccagaaccgcacggaggggctcctgggggtctggaataacaatccagaggacgacttcaggatgcccaatggctccaccattcccccagggagccctgaggagatgcttttccactttggaatgacctggcagatcaacgggacaggcctccttggcaagaggaatgaccagctgccttccaacttcacccctgttttctactcacaactgcaaaaaaacagctcctgggctgaacatttgatctccaactgtgacggagatagctcatgcatctatgacaccctggccctgcgcaacgcaagcatcggacttcacacgagggaagtcagtaaaaactacgagcaggcgaacgccaccctcaatcagtacccgccctccatcaatggtggtcgtgtgattgaagcctacaaggggcagaccacgctgattcagtacaccagcaatgctgaggatgccaacttcacgctcagagacagctgcaccgacttggagctctttgagaatgggacgttgctgtggacacccaagtcgctggagccattcactctggagattctagcaagaagtgccaagattggcttggcatctgcactccagcccaggactgtggtctgccattgcaatgcagagagccagtgtttgtacaatcagaccagcagggtgggcaactcctccctggagctctggggagctctttcctgtgtcagaaccagtcctgccctgtgaattactgctacaatcaaggccactgctacatctcccagactctgggctgtcagcccatgtgcacctgccccccagccttcactgacagccgctgcttcctggctgggaacaacttcagtccaactgtcaacctagaacttcccttaagagtcatccagctcttgctcagtgaagaggaaaatgcctccatggcagaggtcaacgcctcggtggcatacagactggggaccctggacatgcgggcctttctccgcaacagccaagtggaacgaatcgattctgcagcaccggcctcgggaagccccatccaacactggatggtcatctcggagttccagtaccgccctcggggcccggtcattgacttcctgaacaaccagctgctggccgcggtggtggaggcgttcttataccacgttccacggaggagtgaggagcccaggaacgacgtggtcttccagcccatctccggggaagacgtgcgcgatgtgacagccctgaacgtgagcacgctgaaggcttacttcagatgcgatggctacaagggctacgacctggtctacagcccccagagcggcttcacctgcgtgtccccgtgcagtaggggctactgtgaccatggaggccagtgccagcacctgcccagtgggccccgctgcagctgtgtgtccttctccatctacacggcctggggcgagcactgtgagcacctgagcatgaaactcgacgcgttcttcggcatcttctttggggccctgggcggcctcttgctgctgggggtcgggacgttcgtggtcctgcgcttctggggttgctccggggccaggttctcctatttcctgaactcagctgaggccttgccttgaaggggcagctgtggcctaggctacctcaagactcacctcatccttaccgcacatttaaggcgccattgcttttgggagactggaaaagggaaggtgactgaaggctgtcaggattcttcaaggagaatgaatactgggaatcaagacaagactataccttatccataggcgcaggtgcacagggggaggccataaagatcaaacatgcatggatgggtcctcacgcagacacacccacagaaggacactagcctgtgcacgcgcgcgtgcacacacacacacacacaagagttcataatgtggtgatggccctaagttaagcaaaatgcttctgcacacaaaactctctggtttacttcaaattaactctatttaaataaagtctctctgactttttgtgtcttcaaaa

SEQ ID NO: 155728 - DNA, 3716 bp, Homo sapiens
  Payload ID: 10597
  Gene Symbol: MUC4
  Gene Name: mucin 4, cell surface associated
  ENST ID: ENST00000631180
  CDS Start-End: 1-434
ctctgaagatggaaacaccaggaatgacaacaccgtcactgaagacagacggtgggagacgcacagccacatcaccaccccccacaacctcccagaccatcatttccaccattcccagcactgccatgcacacccgctccacagctgcccccatccccatcctgcctgagagaggagtttccctcttcccctatggggcaggcgccggggacctggagttcgtcaggaggaccgtggacttcacctccccactcttcaagccggcgactggcttcccccttggctcctctctccgtgattccctctacgcttcacaggccgggaccctgtggccctggtggctccgttctgggacgatgctgacttctccactggtcgggggaccacattttatcaggaatacgagacgttctatggtgaacacagcctgctagtccagcaggccgagtcttggattagaaagatgacaaacaacgggggctacaaggccaggtgggccctaaaggtcacgtgggtcaatgcccacgcctatcctgcccagtggaccctcgggagcaacacctaccaagccatcctctccacggacgggagcaggtcctatgccctgtttctctaccagagcggtgggatgcagtgggacgtggcccagcgctcaggcaacccggtgctcatgggcttctctaggcctccaagggctgcagttctacaggctacaccgggaagaaaggcccaactaccgtctcgagtgcctgcagtggctgaagagccagcctcggtggcccagctggggctggaaccaggtctcctgcccttgttcctggcagcagggacgacgggacttacgattccaacccgtcagcataggtcgctggggcctcggcagtaggcagctgtgcagcttcacctcttggcgaggaggcgtgtgctgcagctacgggccctggggagagtttcgtgaaggctggcacgtgcagcgtccttggcagttggcccaggaactggagccacagagctggtgctgccgctggaatgacaagccctacctctgtgccctgtaccagcagaggcggccccacgtgggctgtgctacatacaggcccccacagcccgcctggatgttcggggacccccacatcaccaccttggatggtgtcagttacaccttcaatgggctgggggacttcctgctggtcggggcccaagacgggaactcctccttcctgcttcagggccgcaccgcccagactggctcagcccaggccaccaacttcatcgcctttgcggctcagtaccgctccagcagcctgggccccgtcacggtccaatggctccttgagcctcacgacgcaatccgtgtcctgctggataaccagactgtgacatttcagcctgaccatgaagacggcggaggccaggagacgttcaacgccaccggagtcctcctgagccgcaacggctctgaggtctcggccagcttcgacggctgggccaccgtctcggtgatcgcgctctccaacatcctccacgcctccgccagcctcccgcccgagtaccagaaccgcacggaggggctcctgggggtctggaataacaatccagaggacgacttcaggatgcccaatggctccaccattcccccagggagccctgaggagatgcttttccactttggaatgacctggcagatcaacgggacaggcctccttggcaagaggaatgaccagctgccttccaacttcacccctgttttctactcacaactgcaaaaaaacagctcctgggctgaacatttgatctccaactgtgacggagatagctcatgcatctatgacaccctggccctgcgcaacgcaagcatcggacttcacacgagggaagtcagtaaaaactacgagcaggcgaacgccaccctcaatcagtacccgccctccatcaatggtggtcgtgtgattgaagcctacaaggggcagaccacgctgattcagtacaccagcaatgctgaggatgccaacttcacgctcagagacagctgcaccgacttggagctctttgagaatgggacgttgctgtggacacccaagtcgctggagccattcactctggagattctagcaagaagtgccaagattggcttggcatctgcactccagcccaggactgtggtctgccattgcaatgcagagagccagtgtttgtacaatcagaccagcagggtgggcaactcctccctggaggtggctggctgcaagtgtgacgggggcaccttcggccgctactgcgagggctccgaggatgcctgtgaggagccgtgcttcccgagtgtccactgcgttcctgggaagggctgcgaggcctgccctccaaacctgactggggatgggcggcactgtgcggctctggggagctctttcctgtgtcagaaccagtcctgccctgtgaattactgctacaatcaaggccactgctacatctcccagactctgggctgtcagcccatgtgcacctgccccccagccttcactgacagccgctgcttcctggctgggaacaacttcagtccaactgtcaacctagaacttcccttaagagtcatccagctcttgctcagtgaagaggaaaatgcctccatggcagaagtcaacgcctcggtggcatacagactggggaccctggacatgcgggcctttctccgcaacagccaagtggaacgaatcgattctgcagcaccggcctcgggaagccccatccaacactggatggtcatctcggagttccagtaccgccctcggggcccggtcattgacttcctgaacaaccagctgctggccgcggtggtggaggcgttcttataccacgttccacggaggagtgaggagcccaggaacgacgtggtcttccagcccatctccggggaagacgtgcgcgatgtgacagccctgaacgtgagcacgctgaaggcttacttcagatgcgatggctacaagggctacgacctggtctacagcccccagagcggcttcacctgcgtgtccccgtgcagtaggggctactgtgaccatggaggccagtgccaacacctgcccagtgggccccgctgcagctgtgtgtccttctccatctacacggcctggggcgagcactgtgagcacctgagcatgaaactcgacgcgttcttcggcatcttctttggggccctgggcggcctcttgctgctgggggtcgggacgttcgtggtcctgcgcttctggggttgctccggggccaggttctcctatttcctgaactcagctgaggccttgccttgaaggggcagctgtggcctaggctacctcaagactcacctcatccttaccgcacatttaaggcgccattgcttttgggagactggaaaagggaaggtgactgaaggctgtcaggattcttcaaggagaatgaatactgggaatcaagacaagactataccttatccataggcgcaggtgcacagggggaggccataaagatcaaacatgcatggatgggtcctcacgcagacacacccacagaaggacactagcctgtgcacgcgcgcgtgcacacacacacacacacacacgagttcataatgtggtgatggccctaagttaagcaaaatgcttctgcacacaaaactctctggtttacttcaaattaactctatttaaataaagtctctctgactttttgtgtcttcaaaa

SEQ ID NO: 155729 - DNA, 16289 bp, Homo sapiens; identical to SEQ ID NO: 155689
  Payload ID: 10597
  Gene Symbol: MUC4
  Gene Name: mucin 4, cell surface associated
  ENST ID: ENST00000626905
  CDS Start-End: 1-13211

SEQ ID NO: 155730 - DNA, 3643 bp, Homo sapiens; identical to SEQ ID NO: 155715
  Payload ID: 10597
  Gene Symbol: MUC4
  Gene Name: mucin 4, cell surface associated
  ENST ID: ENST00000628366
  CDS Start-End: 1-434

SEQ ID NO: 155731 - DNA, 16408 bp, Homo sapiens
  Payload ID: 10597
  Gene Symbol: MUC4
  Gene Name: mucin 4, cell surface associated
  ENST ID: ENST00000628987
  CDS Start-End: 1-15131
gaaccacagaggacacattaataactggaagtaaaactgctgccccagtcacctcaacaggctcaacaacagcgacactagagggacaatcaactgcagcttcttcaaggacctctaatcaggacatatcagcttcatctcagaaccaccagactaagagcacggagaccaccagcaaagctcaaaccgacaccctcacgcagatgatgacatcaactcttttttcttccccaagtgtacacaatgtgatggagacagctcctccagatgaaatgaccacatcatttccctccagtgtcaccaacacactcatgatgacatcaaagactataacaatgacaacctccacagactccactcttggaaacacagaagagacatcaacagcaggaactgaaagttctaccccagtgacctcagcagtctcaataacagctggacaggaaggacaatcacgaacaacttcctggaggacctctatccaagacacatcagcttcttctcagaaccactggactcggagcacgcagaccaccagggaatctcaaaccagcaccctaacacacagaaccacttcaactccttctttctctccaagtgtacacaatgtgacagggactgtttctcagaagacatctccttcaggtgaaacagctacctcatccctctgtagtgtcacaaacacatccatgatgacatcagagaagataacagtgacaacctccacaggctccactcttggaaacccaggggagacatcatcagtacctgttactggaagtcttatgccagtcacctcagcagccttagtaacatttgatccagaaggacaatcaccagcaactttctcaaggacttctactcaggacacaacagctttttctaagaaccaccagactcagagcgtggagaccaccagagtatctcaaatcaacaccctcaacaccctcacaccggttacaacatcaactgttttatcctcaccaagtggattcaacccaagtggaacagtttctcaggagacattcccttctggtgaaacaaccacctcatccccttccagtgtcagcaatacattcctggtaacatcaaaggtgttcagaatgccaacctccagagactctactcttggaaacacagaggagacatcactatctgtaagtggaaccatttctgcaatcacttccaaagtttcaaccatatggtggtcagacactctgtcaacagcactctcccccagttctctacctccaaaaatatccacagctttccacacccagcagagtgaaggtgcagagaccacaggacggcctcatgagaggagctcattctctccaggtgtgtctcaagaaatatttactctacatgaaacaacaacatggccttcctcattctccagcaaaggccacacaacttggtcacaaacagaactgccctcaacatcaacaggtgctgccactaggcttgtcacaggaaatccatctacagggacagctggcactattccaagggtcccctctaaggtctcagcaataggggaaccaggagagcccaccacatactcctcccacagcacaactctcccaaaaacaacaggggcaggcgcccagacacaatggacacaagaaacggggaccactggagaggctcttctcagcagcccaagctacagtgtgactcagatgataaaaacggccacatccccatcttcttcacctatgctggatagacacacatcccaacaaattacaacggcaccatcaacaaatcattcaacaatacattccacaagcacctctcctcaggaatcaccagctgtttcccaaaggggtcacactcaagccccgcagaccacacaagaatcacaaaccacgaggtccgtctcccccatgactgacaccaagacagtcaccaccccaggttcttccttcacagccagtgggcactcgccctcagaaattgttcctcaggacgcacccaccataagtgcagcaacaacctttgccccagctcccaccggggatggtcacacaacccaggccccgaccacagcactgcaggcagcacccagcagccatgatgccaccctggggccctcaggaggcacgtcactttccaaaacaggtgcccttactctggccaactctgtagtgtcaacaccagggggcccagaaggacaatggacatcagcctctgccagcacctcacctgacacagcagcagccatgacccatacccaccaggctgagagcacagaggcctctggacaaacacagaccagcgaaccggcctcctcagggtcacgaaccacctcagcgggcacagctaccccttcctcatccggggcgagtggcacaacaccttcaggaagcgaaggaatatccacctcaggagagacgacaaggttttcatcaaacccctccagggacagtcacacaacccagtcaacaaccgaattgctgtccgcctcagccagtcatggtgccatcccagtaagcacaggaatggcgtcttcgatcgtccccggcacctttcatcccaccctctctgaggcctccactgcagggagaccgacaggacagtcaagcccaacttctcccagtgcctctcctcaggagacagccgccatttcccggatggcccagactcagaggacaagaaccagcagagggtctgacactatcagcctggcgtcccaggcaaccgacaccttctcaacagtcccacccacacctccatcgatcacatccactgggcttacatctccacaaaccgagacccacactctgtcaccttcagggtctggtaaaaccttcaccacggccctcatcagcaacgccacccctcttcctgtcacctacgcttcctcggcatccacaggtcacaccacccctcttcatgtcaccgatgcttcctcagtatccacaggtcacgccacccctcttcctgtcaccagcccttcctcagtatccacaggtcacaccacccctcttcctgtcaccgacacttcctcagaatccacaggtcacgtcacccctcttcctgtcaccagcttttcctcagcatccacaggtgacagcacccctcttcctgtcactgacacttcctcagcatccacaggtcacgtcacccctcttcctgtcaccagcctttcctcagcatccacaggtgacaccacccctcttcctgtcactgacacttcctcagcatccacaggtcacgccacctctcttcctgtcaccgacacttcctcagtatccacaggtcacaccacccctcttcctgtcaccgacacttcctcagcatccacaggtcacgccacctctcttcctgtcaccgacacttcctcagtatccacaggtcacaccacccctcttcatgtcactgatgcttcctcagcatccacaggtcaggccacccctcttcctgtcaccagcctttcctcagtatccacaggtgacaccacgcctcttcctgtcactagcccttcctcagcatccacaggtcacgccacccctcttcttgtcaccgacacttcctcagcatccacaggacacgccacccctcttcctgtcaccgacgcttcctcagtgtccacagatcacgccacctctcttcctgtaaccatcccttccgcagcatccacaggtcacaccacccctcttcctgtcaccgacacttcctcagcatccacaggtcaggccacctctcttcttgtcaccgacacttcctcagtatccacaggtgacaccacgcctcttcctgtcactagcacttcctcagcatccacaggtcacgtcactcctcttcatgtcaccagcccttcctcagcatccacaggtcacgccacccctcttcctgtcaccagcctttcctcagcatccacaggtgacaccatgcctcttcctgtcactagcccttcctcagcatccacaggtgacaccacccctcttcctgtcaccgacgcttcctcagtatccacaggtcacaccacccctcttcatgtcactgatgcttcctcagcatccacaggtcaggccacccctcttcctgtcaccagcctttcctcagtatccacaggtgacaccacgcctcttcctgtcactagcccttcctcagcatccacaggtcacgccacccctcttcttgtcaccgacacttcctcagcatccacaggacacgccacccctcttcctgtcaccgacgcttcctcagtgtccacagatcacgccacctctcttcctgtaaccatcccttccgcagcatccacaggtcacaccacccctcttcctgtcaccgacacttcctcagcatccacaggtcaggccacctctcttcttgtcaccgacacttcctcagtatccacaggtgacaccacgcctcttcctgtcactagcacttcctcagcatccacaggtcacgtcactcctcttcatgtcaccagcccttcctcagcatccacaggtcacgccacccctcttcctgtcaccagcctttcctcagcatccacaggtgacaccatgcctcttcctgtcactagcccttcctcagcatccacaggtgacaccacccctcttcctgtcaccgacgcttcctcagtatccacaggtcacaccacccctcttcctgtcaccagcccttcctcagcatctacaggtcacaccacccctcttcctgtcaccgacacttcctcagcatccaaaggtgacaccacccctcttcctgtcaccagcccttcctcagcatctacaggtcacaccacccctcttcctgtcaccgacacttcctcagcatccacaggtgacaccacccctcttcctgtcaccaatgcttcctcattatccacaggtcacgccacccctcttcatgtcaccagcccttcctcagcatccacaggtcacgccacccctcttcctgtcaccagcacttcctcagcatccaccggtcacgccacccctcttcctgtcaccggcctttcctcagctaccacagatgacaccacccgtcttcctgtcaccgacgtttcctcggcatccacaggtcaggccacccctcttcctgtcaccagcctttcctcagtatccacaggtgacaccacgcctcttcctgtcactagcccttcctcagcatccacaggtcacgccagccctcttcttgtcactgacgcttcctcagcatccacaggtcaggccacccctcttcctgtcaccgacacttcctcagtatccacagctcacgccaccccacttcctgtcaccggcctttcttcagcttccacagatgacaccacccgtcttcctgtcaccgacgtttcctcggcatccacaggtcaggccatccctcttcctgtcaccagcccttcctcagcatccacaggtgacaccacccctcttcctgtcaccgacgcttcctcagcatccacaggtgacaccacctctcttcctgtcaccatcccttcctcagcatcttcaggtcacaccacctctcttcctgtcaccgacgcttcctcagtgtccacaggtcacgccacctctcttcttgtcaccgacgcttcctcagtatccacaggtgacaccacccctcttcctgtcaccgacactaactcagcatccacaggtgacaccacccctcttcatgtcaccgacgcttcctcagtatccacaggtcacgccacctctcttcctgtcaccagcctttcctcagcatccacaggtgacaccacgcctcttcctgtcactagcccttcctcagcatcctcaggtcacaccacccctcttcctgtcaccgacgcttcctcagtacccacaggtcacgccacctctcttcctgtcaccgacgcttcctcagtgtccacaggtcacgccacccctcttcctgtcaccgacgcttcctcagtgtccacaggtcatgccacccctcttccggtcaccgacacttcctcagtatctacaggacaggccacccctcttcctgtcaccagcctttcctcagcatccactggtgacaccacgccgcttcctgtcaccgatacttcctcagcatccacaggtcaggacacccctcttcctgtcaccagcctttcctcagtatccacaggtgacaccacgcctcttcctgtcactaacccttcctcagcatccacaggtcacgccacccctcttcttgtcaccgacgcttcctcaatatccacaggtcacgccacctctcttcttgtcaccgacgcttcctcagtatccacaggtcacgccaccgctcttcatgacaccgatgcttcctcattatccacaggggacaccacccctcttcctgtcaccagcccttcctcaacatccacaggtgacaccacccctcttcctgtcaccgaaacttcctcagtatccacaggtcacgccacctctcttcctgtcaccgacacttcctcagcatccacaggtcacgccacctctcttcctgtcaccgacacttcctcagcatccacaggtcacgccacccctcttcctgtcaccgacacttcctcagcatccacaggtcaggccacccctcttcctgtcaccagcccttcctcagcatccacaggtcacgccatccctcttcttgtcaccgacacttcctcagcatccacaggacaggccacccctcttcctgtcaccagcctttcctcagcatccacaggtgacaccacccctcttcctgtcaccgacgcttcctcagtgtccacaggtcacgccacctctcttcctgtcaccagcctttcctcagtatccacaggtgacaccactcctcttcctgtcactagcccttcctcagcatccacaggtcacgccacccctcttcatgtcaccgacgcttcctcagcatccacaggtcacgccacccctcttcctgtcaccagcctttcctcagcatccacaggtgacaccacgcctcttcctgtcactagcccttcctcagcatccacaggtcacgccacccctcttcatgtcaccgacgcttcctcagtatccacaggtgacaccacccctcttcctgtcaccagctcttcctcagcatcctcaggtcacaccacccctcttcctgtcaccgacgcttcctcagcatccacaggtgacaccacccctcttcctgtcaccgacacttcctcagcatccacaggtcacgccacccatcttcctgtcaccggcctttcctcagcttccacaggtgacaccacccgtcttcctgtcaccaacgtttcctcggcatccacaggtcatgccacccctcttcctgtcaccagcacttcctcagcatccacaggtgacaccacccctcttcctggcaccgacacttcctcagtatccacaggtcacaccacccctcttcttgtcaccgacgcttcgtcagtatccacaggtgacaccacccgtcttcctgtcaccagcccttcctcagcatctacaggtcacaccacccctctacctgtcaccgacactccctcagcatccacaggtgacaccacccctcttcctgtcaccaatgcttcctcattatccacacgtcacgccacctctcttcatgtcaccagcccttcctcagcatccacaggtcacgccacctctcttcctgtcaccgacacttccgcagcatccacaggtcacgccacccctcttcctgtcaccagcacttcctcagcatccacaggtgacaccacccctcttcctgtcaccgacacttactcagcatccacaggtcaggccacccctcttcctgtcaccagcctttcctcagtatccacaggtgacaccacgcctcttcctgtcactagcccttcctcagcatccacaggtcacgccactcctcttcttgtcaccgacgcttcctcagcatccacaggtcaggccacccctcttcctgtcaccagcctttcctcagtatccacaggtgacaccacgcctcttcctgtcactagcccttcctcagcatccaccggtcatgccacctctcttcctgtcaccgacacttcctcagcatccacaggtgacaccacctctcttcctgtcaccgacacttcctcagcatacacaggtgacaccacctctcttcctgtcaccgacacttcctcatcatccacaggtgacaccacccctcttcttgtcaccgagacttcctcagtatccacaggtgacaccacccctcttcctgtcaccgacacttcctcagcatccacaggtcacgccacccctcttcctgtcaccaacacttcctcagtatccacaggtcacgccacccctcttcatgtcaccagcccttcctcagcatccacaggtcacaccacccctcttcctgtcaccgacgcttcgtcagtgtccacaggtcacgccacctctcttcctgtcaccgacgcttcctcagtgttcacaggtcatgccacctctcttcctgtcaccatcccttcctcagcatcctcaggtcacaccacccctcttcctgtcaccgacgcttcctcagtgtccacaggtcacgccacctctcttcctgtcaccgacgcttcctcagtgtccacaggtcatgccacccctcttcctgtcaccgacgcttcctcagtgtccacaggtcacgctacccctcttcctctcaccagcctttcctcagtatccacaggtgacaccacgcctcttcctgtcaccgacacttcctcagcatccacaggtcaggccacccctcttcctgtcaccagcctttcctcagtatccacaggtgacaccacccctcttcctgtcaccgacacttcctcagcatccacaggtcacgccacctctcttcctgtcaccgacacttcctcagcatccacaggtcacgccacccctcttcctgacaccgacacttcctcagcatccacaggtcacgccacccttcttcctgtcaccgacacttcctcagcatccataggtcacgccacctctcttcctgtcaccgacacttcctcaatatccacaggtcacgccacccctcttcatgtcaccagcccttcctcagcatccaccggtcacgccaccccgcttcctgtcaccgacacttcctcagcatccacaggtcacgccaaccctcttcatgtcaccagcccttcctcagcatccaccggtcacgccaccccgcttcctgtcaccgacacttcctcagcatccacaggtcacgccacccctcttcctgtcaccagcctttcctcagtatccacaggtgacaccacgcctcttcctgtcactagcccttcctcagcatccacaggtcacaccacccctcttcctgtcaccgacacttcctcagcatccacaggtcaggccaccgctcttcctgtcaccagcacttcctcagcatccacaggtgacaccacccctcttcctgtcaccgacacttcctcagcatccacaggtcaggccacccctcttcctgtcaccagcctttcctcagtatccacaggtgacaccacgcctcttcctgtcactagcccttcctcagcatccacaggtcacgccactcctcttcttgtcaccgacgcttcctcagcatccacaggtcaggccacccctcttcctgtcaccagcctttcctcagtatccacaggtgacaccacgcctcttcctgtcactagcccttcctcagcatccaccggtcatgccacctctcttcctgtcaccgacacttcctcagcatccacaggtgacaccacctctcttcctgtcaccgacacttcctcagcatacacaggtgacaccacctctcttcctgtcaccgacacttcctcatcatccacaggtgacaccacccctcttcttgtcaccgagacttcctcagtatccacaggtcacgccactcctcttcttgtcaccgacgcttcctcagcatccacaggtcacgccacccctcttcatgtcaccagcccttcctcagcatccacaggtgacaccacccctgtgcctgtcaccgacacttcctcagtatccacaggtcacgccacccctcttcctgtcaccggcctttcctcagcttccacaggtgacaccacccgtcttcctgtcaccgacatttcctcggcatccacaggtcaggccacccctcttcctgtcaccaacacttcctcagtatccacaggtgacaccatgcctcttcctgtcactagcccttcctcagcatccacaggtcacgccacccctcttcctgtcaccagcacttcctcagcatccaccggtcacgccacccctgttcctgtcaccagcacttcctcagcatctacaggtcacaccacccctcttcctgtcaccgacacttcctcagcatccacaggtgacaccacccctcttcctgtcaccagcccttcctcagcatctacaggtcacaccacccctcttcatgtcaccatcccttcctcagcatccacaggtgacaccagcactcttcctgtcaccggcgcttcctcagcatccaccggtcacgccacccctcttcctgtcaccgacacttcctcagtatccaccggtcacgccacgcctcttcctgtcaccagcctttcctcagtatccacaggtgacaccacccctcttcctgtcaccgacgcttcctcggcatccacaggtcaggccacccctcttcctgtcaccagcctttcctcagtatccacaggtgacaccacccctcttcttgtcaccgacgcttcctcagtatccacaggtcacgccacccctcttcctgtcaccgacacttcctcagcatccacaggtgacaccacccgtcttcctgtcacggacacttcctcagcatccacaggtcaggccacccctcttcctgtcaccagcctttcctcagtatccacaggtgacaccacccctcttcttgtcaccgacgcttcctcagtatccacaggtcacgccacccctcttcctgtcaccgacacttcctcagcatccacaggtgacaccacccgtcttcctgtcacggacacttcctcagcatccacaggtcaggccacccctcttcctgtcaccatcccttcctcatcatcctcaggtcacaccacccctcttcctgtcaccagcacttcctcagtatctacaggtcacgtcacccctcttcatgtcaccagcccttcctcagcatccacaggtcacgtcacccctcttcctgtcaccagcacttcctcagcatccacaggtcacgccacccctcttcttgtcaccgacgcttcctcagtgtccacaggtcacgccacgcctcttcctgtcaccgacgcttcctcagcatccacaggtgacaccacccctcttcctgtcaccgacacttcctcagcatccacaggtcaggccacccctcttcctgtcaccagcctttcctcagtatccacaggtgacaccacccctcttcctgtcaccgacgcttcctcagcatccacaggtcacgccacccctcttcctgtcaccatcccttcctcagtatccacaggtgacaccatgcctcttcctgtcactagcccttcctcagcatccacaggtcacgccacccctcttcctgttaccggcctttcctcagcttccacaggtgacaccacccctcttcctgtcaccgacacttcctcagcatccacacgtcacgccacccctcttcctgtcaccgacacttcctcagcttccacagatgacaccacccgtcttcctgtcaccgacgtttcctcggcatccacaggacatgccacccctcttcctgtcaccagcacttcctcagcatccacaggtgacaccacccctcttcctgtcaccgacacttcctcagtatccacaggtcacgccacctctcttcctgtcaccagccgttcctcagcatccacaggtcacgccaccccccttcctgtcaccgacacttcctcagtatccacaggtcacgccacccctcttcctgtcaccagcacttcctcagtatctacaggtcacgccacccctcttcctgtcaccagcccttcctcagcatccacaggtcacgccacccctgttcctgtcaccagcacttcctcagcatccacaggtgacaccacccctcttcctgtcaccaatgcttcctcattatccacaggtcacgccacccctcttcatgtcaccagcccttcctcagcatccagaggtgacaccagcactcttcctgtcaccgatgcttcctcagcatccaccggtcacgccacccctcttcctctcaccagcctttcctcagtatccacaggtgacaccacgcctcttcctgtcaccgacacttcctctgcatccacaggtcaggccacccctcttcctgtcaccagcctttcctcagtatccacaggtgacaccacgcctcttcctgtcaccatcccttcctcagcatcctcaggtcacaccacctctcttcctgtcaccgacgcttcctcagtgtccacaggtcacggcacccctcttcctgtcaccagcacttcctcagcatccacaggtgacaccacccctcttcctgtcaccgacacttcctcagcatccacaggtcacgccacccctcttcctgtcaccgacacttcctcagcatccacaggtcacgccacccctcttcctgtcaccagcctttcctcagtatccacaggtcacgccacccctcttgctgtcagcagtgctacctcagcttccacagtatcctcggactcccctctgaagatggaaacaccaggaatgacaacaccgtcactgaagacagacggtgggagacgcacagccacatcaccaccccccacaacctcccagaccatcatttccaccattcccagcactgccatgcacacccgctccacagctgcccccatccccatcctgcctgagagaggagtttccctcttcccctatggggcaggcgccggggacctggagttcgtcaggaggaccgtggacttcacctccccactcttcaagccggcgactggcttcccccttggctcctctctccgtgattccctctacttcacagacaatggccagatcatcttcccagagtcagactaccagattttctcctaccccaacccactcccaacaggcttcacaggccgggaccctgtggccctggtggctccgttctgggacgatgctgacttctccactggtcgggggaccacattttatcaggaatacgagacgttctatggtgaacacagcctgctagtccagcaggccgagtcttggattagaaagatgacaaacaacgggggctacaaggccaggtgggccctaaaggtcacgtgggtcaatgcccacgcctatcctgcccagtggaccctcgggagcaacacctaccaagccatcctctccacggacgggagcaggtcctatgccctgtttctctaccagagcggtgggatgcagtgggacgtggcccagcgctcaggcaacccggtgctcatgggcttctctagtggagatggctatttcgaaaacagcccactgatgtcccagccagtgtgggagaggtatcgccctgatagattcctgaattccaactcaggcctccaagggctgcagttctacaggctacaccgggaagaaaggcccaactaccgtctcgagtgcctgcagtggctgaagagccagcctcggtggcccagctggggctggaaccaggtctcctgcccttgttcctggcagcagggacgacgggacttacgattccaacccgtcagcataggtcgctggggcctcggcagtaggcagctgtgcagcttcacctcttggcgaggaggcgtgtgctgcagctacgggccctggggagagtttcgtgaaggctggcacgtgcagcgtccttggcagttggcccaggaactggagccacagagctggtgctgccgctggaatgacaagccctacctctgtgccctgtaccagcagaggcggccccacgtgggctgtgctacatacaggcccccacagcccgcctggatgttcggggacccccacatcaccaccttggatggtgtcagttacaccttcaatgggctgggggacttcctgctggtcggggcccaagacgggaactcctccttcctgcttcagggccgcaccgcccagactggctcagcccaggccaccaacttcatcgcctttgcggctcagtaccgctccagcagcctgggccccgtcacggtccaatggctccttgagcctcacgacgcaatccgtgtcctgctggataaccagactgtgacatttcagcctgaccatgaagacggcggaggccaggagacgttcaacgccaccggagtcctcctgagccgcaacggctctgaggtctcggccagcttcgacggctgggccaccgtctcggtgatcgcgctctccaacatcctccacgcctccgccagcctcccgcccgagtaccagaaccgcacggaggggctcctgggggtctggaataacaatccagaggacgacttcaggatgcccaatggctccaccattcccccagggagccctgaggagatgcttttccactttggaatgacctggcagatcaacgggacaggcctccttggcaagaggaatgaccagctgccttccaacttcacccctgttttctactcacaactgcaaaaaaacagctcctgggctgaacatttgatctccaactgtgacggagatagctcatgcatctatgacaccctggccctgcgcaacgcaagcatcggacttcacacgagggaagtcagtaaaaactacgagcaggcgaacgccaccctcaatcagtacccgccctccatcaatggtggtcgtgtgattgaagcctacaaggggcagaccacgctgattcagtacaccagcaatgctgaggatgccaacttcacgctcagagacagctgcaccgacttggagctctttgagaatgggacgttgctgtggacacccaagtcgctggagccattcactctggagattctagcaagaagtgccaagattggcttggcatctgcactccagcccaggactgtggtctgccattgcaatgcagagagccagtgtttgtacaatcagaccagcagggtgggcaactcctccctggagctctggggagctctttcctgtgtcagaaccagtcctgccctgtgaattactgctacaatcaaggccactgctacatctcccagactctgggctgtcagcccatgtgcacctgccccccagccttcactgacagccgctgcttcctggctgggaacaacttcagtccaactgtcaacctagaacttcccttaagagtcatccagctcttgctcagtgaagaggaaaatgcctccatggcagaagtcaacgcctcggtggcatacagactggggaccctggacatgcgggcctttctccgcaacagccaagtggaacgaatcgattctgcagcaccggcctcgggaagccccatccaacactggatggtcatctcggagttccagtaccgccctcggggcccggtcattgacttcctgaacaaccagctgctggccgcggtggtggaggcgttcttataccacgttccacggaggagtgaggagcccaggaacgacgtggtcttccagcccatctccggggaagacgtgcgcgatgtgacagccctgaacgtgagcacgctgaaggcttacttcagatgcgatggctacaagggctacgacctggtctacagcccccagagcggcttcacctgcgtgtccccgtgcagtaggggctactgtgaccatggaggccagtgccaacacctgcccagtgggccccgctgcagctgtgtgtccttctccatctacacggcctggggcgagcactgtgagcacctgagcatgaaactcgacgcgttcttcggcatcttctttggggccctgggcggcctcttgctgctgggggtcgggacgttcgtggtcctgcgcttctggggttgctccggggccaggttctcctatttcctgaactcagctgaggccttgccttgaaggggcagctgtggcctaggctacctcaagactcacctcatccttaccgcacatttaaggcgccattgcttttgggagactggaaaagggaaggtgactgaaggctgtcaggattcttcaaggagaatgaatactgggaatcaagacaagactataccttatccataggcgcaggtgcacagggggaggccataaagatcaaacatgcatggatgggtcctcacgcagacacacccacagaaggacactagcctgtgcacgcgcgcgtgcacacacacacacacacacacgagttcataatgtggtgatggccctaagttaagcaaaatgcttctgcacacaaaactctctggtttacttcaaattaactctatttaaataaagtctctctgactttttgtgtcttcaaaa

SEQ ID NO: 155732 - DNA, 16247 bp, Homo sapiens
  Payload ID: 10597
  Gene Symbol: MUC4
  Gene Name: mucin 4, cell surface associated
  ENST ID: ENST00000627203
  CDS Start-End: 1-13451
gaaccacagaggacacattaataactggaagtaaaactgctgccccagtcacctcaacaggctcaacaacagcgacactagagggacaatcaactgcagcttcttcaaggacctctaatcaggacatatcagcttcatctcagaaccaccagactaagagcacggagaccaccagcaaagctcaaaccgacaccctcacgcagatgatgacatcaactcttttttcttccccaagtgtacacaatgtgatggagacagctcctccagatgaaatgaccacatcatttccctccagtgtcaccaacacactcatgatgacatcaaagactataacaatgacaacctccacagactccactcttggaaacacagaagagacatcaacagcaggaactgaaagttctaccccagtgacctcagcagtctcaataacagctggacaggaaggacaatcacgaacaacttcctggaggacctctatccaagacacatcagcttcttctcagaaccactggactcggagcacgcagaccaccagggaatctcaaaccagcaccctaacacacagaaccacttcaactccttctttctctccaagtgtacacaatgtgacagggactgtttctcagaagacatctccttcaggtgaaacagctacctcatccctctgtagtgtcacaaacacatccatgatgacatcagagaagataacagtgacaacctccacaggctccactcttggaaacccaggggagacatcatcagtacctgttactggaagtcttatgccagtcacctcagcagccttagtaacatttgatccagaaggacaatcaccagcaactttctcaaggacttctactcaggacacaacagctttttctaagaaccaccagactcagagcgtggagaccaccagagtatctcaaatcaacaccctcaacaccctcacaccggttacaacatcaactgttttatcctcaccaagtggattcaacccaagtggaacagtttctcaggagacattcccttctggtgaaacaaccacctcatccccttccagtgtcagcaatacattcctggtaacatcaaaggtgttcagaatgccaacctccagagactctactcttggaaacacagaggagacatcactatctgtaagtggaaccatttctgcaatcacttccaaagtttcaaccatatggtggtcagacactctgtcaacagcactctcccccagttctctacctccaaaaatatccacagctttccacacccagcagagtgaaggtgcagagaccacaggacggcctcatgagaggagctcattctctccaggtgtgtctcaagaaatatttactctacatgaaacaacaacatggccttcctcattctccagcaaaggccacacaacttggtcacaaacagaactgccctcaacatcaacaggtgctgccactaggcttgtcacaggaaatccatctacagggacagctggcactattccaagggtcccctctaaggtctcagcaataggggaaccaggagagcccaccacatactcctcccacagcacaactctcccaaaaacaacaggggcaggcgcccagacacaatggacacaagaaacggggaccactggagaggctcttctcagcagcccaagctacagtgtgactcagatgataaaaacggccacatccccatcttcttcacctatgctggatagacacacatcccaacaaattacaacggcaccatcaacaaatcattcaacaatacattccacaagcacctctcctcaggaatcaccagctgtttcccaaaggggtcacactcaagccccgcagaccacacaagaatcacaaaccacgaggtccgtctcccccatgactgacaccaagacagtcaccaccccaggttcttccttcacagccagtgggcactcgccctcagaaattgttcctcaggacgcacccaccataagtgcagcaacaacctttgccccagctcccaccggggatggtcacacaacccaggccccgaccacagcactgcaggcagcacccagcagccatgatgccaccctggggccctcaggaggcacgtcactttccaaaacaggtgcccttactctggccaactctgtagtgtcaacaccagggggcccagaaggacaatggacatcagcctctgccagcacctcacctgacacagcagcagccatgacccatacccaccaggctgagagcacagaggcctctggacaaacacagaccagcgaaccggcctcctcagggtcacgaaccacctcagcgggcacagctaccccttcctcatccggggcgagtggcacaacaccttcaggaagcgaaggaatatccacctcaggagagacgacaaggttttcatcaaacccctccagggacagtcacacaacccagtcaacaaccgaattgctgtccgcctcagccagtcatggtgccatcccagtaagcacaggaatggcgtcttcgatcgtccccggcacctttcatcccaccctctctgaggcctccactgcagggagaccgacaggacagtcaagcccaacttctcccagtgcctctcctcaggagacagccgccatttcccggatggcccagactcagaggacaagaaccagcagagggtctgacactatcagcctggcgtcccaggcaaccgacaccttctcaacagtcccacccacacctccatcgatcacatccactgggcttacatctccacaaaccgagacccacactctgtcaccttcagggtctggtaaaaccttcaccacggccctcatcagcaacgccacccctcttcctgtcacctacgcttcctcggcatccacaggtcacaccacccctcttcatgtcaccgatgcttcctcagtatccacaggtcacgccacccctcttcctgtcaccagcccttcctcagtatccacaggtcacaccacccctcttcctgtcaccgacacttcctcagaatccacaggtcacgtcacccctcttcctgtcaccagcttttcctcagcatccacaggtgacagcacccctcttcctgtcactgacacttcctcagcatccacaggtcacgtcacccctcttcctgtcaccagcctttcctcagcatccacaggtgacaccacccctcttcctgtcactgacacttcctcagcatccacaggtcacgccacctctcttcctgtcaccgacacttcctcagtatccacaggtcacaccacccctcttcctgtcaccgacacttcctcagcatccacaggtcacgccacctctcttcctgtcaccgacacttcctcagtatccacaggtcacaccacccctcttcatgtcactgatgcttcctcagcatccacaggtcaggccacccctcttcctgtcaccagcctttcctcagtatccacaggtgacaccacgcctcttcctgtcactagcccttcctcagcatccacaggtcacgccacccctcttcttgtcaccgacacttcctcagcatccacaggacacgccacccctcttcctgtcaccgacgcttcctcagtgtccacagatcacgccacctctcttcctgtaaccatcccttccgcagcatccacaggtcacaccacccctcttcctgtcaccgacacttcctcagcatccacaggtcaggccacctctcttcttgtcaccgacacttcctcagtatccacaggtgacaccacgcctcttcctgtcactagcacttcctcagcatccacaggtcacgtcactcctcttcatgtcaccagcccttcctcagcatccacaggtcacgccacccctcttcctgtcaccagcctttcctcagcatccacaggtgacaccatgcctcttcctgtcactagcccttcctcagcatccacaggtgacaccacccctcttcctgtcaccgacgcttcctcagtatccacaggtcacaccacccctcttcatgtcactgatgcttcctcagcatccacaggtcaggccacccctcttcctgtcaccagcctttcctcagtatccacaggtgacaccacgcctcttcctgtcactagcccttcctcagcatccacaggtcacgccacccctcttcttgtcaccgacacttcctcagcatccacaggacacgccacccctcttcctgtcaccgacgcttcctcagtgtccacagatcacgccacctctcttcctgtaaccatcccttccgcagcatccacaggtcacaccacccctcttcctgtcaccgacacttcctcagcatccacaggtcaggccacctctcttcttgtcaccgacacttcctcagtatccacaggtgacaccacgcctcttcctgtcactagcacttcctcagcatccacaggtcacgtcactcctcttcatgtcaccagcccttcctcagcatccacaggtcacgccacccctcttcctgtcaccagcctttcctcagcatccacaggtgacaccatgcctcttcctgtcactagcccttcctcagcatccacaggtgacaccacccctcttcctgtcaccgacgcttcctcagtatccacaggtcacaccacccctcttcctgtcaccagcccttcctcagcatctacaggtcacaccacccctcttcctgtcaccgacacttcctcagcatccaaaggtgacaccacccctcttcctgtcaccagcccttcctcagcatctacaggtcacaccacccctcttcctgtcaccgacacttcctcagcatccacaggtgacaccacccctcttcctgtcaccaatgcttcctcattatccacaggtcacgccacccctcttcatgtcaccagcccttcctcagcatccacaggtcacgccacccctcttcctgtcaccagcacttcctcagcatccaccggtcacgccacccctcttcctgtcaccggcctttcctcagctaccacagatgacaccacccgtcttcctgtcaccgacgtttcctcggcatccacaggtcaggccacccctcttcctgtcaccagcctttcctcagtatccacaggtgacaccacgcctcttcctgtcactagcccttcctcagcatccacaggtcacgccagccctcttcttgtcactgacgcttcctcagcatccacaggtcaggccacccctcttcctgtcaccgacacttcctcagtatccacagctcacgccaccccacttcctgtcaccggcctttcttcagcttccacagatgacaccacccgtcttcctgtcaccgacgtttcctcggcatccacaggtcaggccatccctcttcctgtcaccagcccttcctcagcatccacaggtgacaccacccctcttcctgtcaccgacgcttcctcagcatccacaggtgacaccacctctcttcctgtcaccatcccttcctcagcatcttcaggtcacaccacctctcttcctgtcaccgacgcttcctcagtgtccacaggtcacgccacctctcttcttgtcaccgacgcttcctcagtatccacaggtgacaccacccctcttcctgtcaccgacactaactcagcatccacaggtgacaccacccctcttcatgtcaccgacgcttcctcagtatccacaggtcacgccacctctcttcctgtcaccagcctttcctcagcatccacaggtgacaccacgcctcttcctgtcactagcccttcctcagcatcctcaggtcacaccacccctcttcctgtcaccgacgcttcctcagtacccacaggtcacgccacctctcttcctgtcaccgacgcttcctcagtgtccacaggtcacgccacccctcttcctgtcaccgacgcttcctcagtgtccacaggtcatgccacccctcttccggtcaccgacacttcctcagtatctacaggacaggccacccctcttcctgtcaccagcctttcctcagcatccactggtgacaccacgccgcttcctgtcaccgatacttcctcagcatccacaggtcaggacacccctcttcctgtcaccagcctttcctcagtatccacaggtgacaccacgcctcttcctgtcactaacccttcctcagcatccacaggtcacgccacccctcttcttgtcaccgacgcttcctcaatatccacaggtcacgccacctctcttcttgtcaccgacgcttcctcagtatccacaggtcacgccaccgctcttcatgacaccgatgcttcctcattatccacaggggacaccacccctcttcctgtcaccagcccttcctcaacatccacaggtgacaccacccctcttcctgtcaccgaaacttcctcagtatccacaggtcacgccacctctcttcctgtcaccgacacttcctcagcatccacaggtcacgccacctctcttcctgtcaccgacacttcctcagcatccacaggtcacgccacccctcttcctgtcaccgacacttcctcagcatccacaggtcaggccacccctcttcctgtcaccagcccttcctcagcatccacaggtcacgccatccctcttcttgtcaccgacacttcctcagcatccacaggacaggccacccctcttcctgtcaccagcctttcctcagcatccacaggtgacaccacccctcttcctgtcaccgacgcttcctcagtgtccacaggtcacgccacctctcttcctgtcaccagcctttcctcagtatccacaggtgacaccactcctcttcctgtcactagcccttcctcagcatccacaggtcacgccacccctcttcatgtcaccgacgcttcctcagcatccacaggtcacgccacccctcttcctgtcaccagcctttcctcagcatccacaggtgacaccacgcctcttcctgtcactagcccttcctcagcatccacaggtcacgccacccctcttcatgtcaccgacgcttcctcagtatccacaggtgacaccacccctcttcctgtcaccagctcttcctcagcatcctcaggtcacaccacccctcttcctgtcaccgacgcttcctcagcatccacaggtgacaccacccctcttcctgtcaccgacacttcctcagcatccacaggtcacgccacccatcttcctgtcaccggcctttcctcagcttccacaggtgacaccacccgtcttcctgtcaccaacgtttcctcggcatccacaggtcatgccacccctcttcctgtcaccagcacttcctcagcatccacaggtgacaccacccctcttcctggcaccgacacttcctcagtatccacaggtcacaccacccctcttcttgtcaccgacgcttcgtcagtatccacaggtgacaccacccgtcttcctgtcaccagcccttcctcagcatctacaggtcacaccacccctctacctgtcaccgacactccctcagcatccacaggtgacaccacccctcttcctgtcaccaatgcttcctcattatccacacgtcacgccacctctcttcatgtcaccagcccttcctcagcatccacaggtcacgccacctctcttcctgtcaccgacacttccgcagcatccacaggtcacgccacccctcttcctgtcaccagcacttcctcagcatccacaggtgacaccacccctcttcctgtcaccgacacttactcagcatccacaggtcaggccacccctcttcctgtcaccagcctttcctcagtatccacaggtgacaccacgcctcttcctgtcactagcccttcctcagcatccacaggtcacgccactcctcttcttgtcaccgacgcttcctcagcatccacaggtcaggccacccctcttcctgtcaccagcctttcctcagtatccacaggtgacaccacgcctcttcctgtcactagcccttcctcagcatccaccggtcatgccacctctcttcctgtcaccgacacttcctcagcatccacaggtgacaccacctctcttcctgtcaccgacacttcctcagcatacacaggtgacaccacctctcttcctgtcaccgacacttcctcatcatccacaggtgacaccacccctcttcttgtcaccgagacttcctcagtatccacaggtgacaccacccctcttcctgtcaccgacacttcctcagcatccacaggtcacgccacccctcttcctgtcaccaacacttcctcagtatccacaggtcacgccacccctcttcatgtcaccagcccttcctcagcatccacaggtcacaccacccctcttcctgtcaccgacgcttcgtcagtgtccacaggtcacgccacctctcttcctgtcaccgacgcttcctcagtgttcacaggtcatgccacctctcttcctgtcaccatcccttcctcagcatcctcaggtcacaccacccctcttcctgtcaccgacgcttcctcagtgtccacaggtcacgccacctctcttcctgtcaccgacgcttcctcagtgtccacaggtcatgccacccctcttcctgtcaccgacgcttcctcagtgtccacaggtcacgctacccctcttcctctcaccagcctttcctcagtatccacaggtgacaccacgcctcttcctgtcaccgacacttcctcagcatccacaggtcaggccacccctcttcctgtcaccagcctttcctcagtatccacaggtgacaccacccctcttcctgtcaccgacacttcctcagcatccacaggtcacgccacctctcttcctgtcaccgacacttcctcagcatccacaggtcacgccacccctcttcctgacaccgacacttcctcagcatccacaggtcacgccacccttcttcctgtcaccgacacttcctcagcatccataggtcacgccacctctcttcctgtcaccgacacttcctcaatatccacaggtcacgccacccctcttcatgtcaccagcccttcctcagcatccaccggtcacgccaccccgcttcctgtcaccgacacttcctcagcatccacaggtcacgccaaccctcttcatgtcaccagcccttcctcagcatccaccggtcacgccaccccgcttcctgtcaccgacacttcctcagcatccacaggtcacgccacccctcttcctgtcaccagcctttcctcagtatccacaggtgacaccacgcctcttcctgtcactagcccttcctcagcatccacaggtcacaccacccctcttcctgtcaccgacacttcctcagcatccacaggtcaggccaccgctcttcctgtcaccagcacttcctcagcatccacaggtgacaccacccctcttcctgtcaccgacacttcctcagcatccacaggtcaggccacccctcttcctgtcaccagcctttcctcagtatccacaggtgacaccacgcctcttcctgtcactagcccttcctcagcatccacaggtcacgccactcctcttcttgtcaccgacgcttcctcagcatccacaggtcaggccacccctcttcctgtcaccagcctttcctcagtatccacaggtgacaccacgcctcttcctgtcactagcccttcctcagcatccaccggtcatgccacctctcttcctgtcaccgacacttcctcagcatccacaggtgacaccacctctcttcctgtcaccgacacttcctcagcatacacaggtgacaccacctctcttcctgtcaccgacacttcctcatcatccacaggtgacaccacccctcttcttgtcaccgagacttcctcagtatccacaggtcacgccactcctcttcttgtcaccgacgcttcctcagcatccacaggtcacgccacccctcttcatgtcaccagcccttcctcagcatccacaggtgacaccacccctgtgcctgtcaccgacacttcctcagtatccacaggtcacgccacccctcttcctgtcaccggcctttcctcagcttccacaggtgacaccacccgtcttcctgtcaccgacatttcctcggcatccacaggtcaggccacccctcttcctgtcaccaacacttcctcagtatccacaggtgacaccatgcctcttcctgtcactagcccttcctcagcatccacaggtcacgccacccctcttcctgtcaccagcacttcctcagcatccaccggtcacgccacccctgttcctgtcaccagcacttcctcagcatctacaggtcacaccacccctcttcctgtcaccgacacttcctcagcatccacaggtgacaccacccctcttcctgtcaccagcccttcctcagcatctacaggtcacaccacccctcttcatgtcaccatcccttcctcagcatccacaggtgacaccagcactcttcctgtcaccggcgcttcctcagcatccaccggtcacgccacccctcttcctgtcaccgacacttcctcagtatccaccggtcacgccacgcctcttcctgtcaccagcctttcctcagtatccacaggtgacaccacccctcttcctgtcaccgacgcttcctcggcatccacaggtcaggccacccctcttcctgtcaccagcctttcctcagtatccacaggtgacaccacccctcttcttgtcaccgacgcttcctcagtatccacaggtcacgccacccctcttcctgtcaccgacacttcctcagcatccacaggtgacaccacccgtcttcctgtcacggacacttcctcagcatccacaggtcaggccacccctcttcctgtcaccagcctttcctcagtatccacaggtgacaccacccctcttcttgtcaccgacgcttcctcagtatccacaggtcacgccacccctcttcctgtcaccgacacttcctcagcatccacaggtgacaccacccgtcttcctgtcacggacacttcctcagcatccacaggtcaggccacccctcttcctgtcaccatcccttcctcatcatcctcaggtcacaccacccctcttcctgtcaccagcacttcctcagtatctacaggtcacgtcacccctcttcatgtcaccagcccttcctcagcatccacaggtcacgtcacccctcttcctgtcaccagcacttcctcagcatccacaggtcacgccacccctcttcttgtcaccgacgcttcctcagtgtccacaggtcacgccacgcctcttcctgtcaccgacgcttcctcagcatccacaggtgacaccacccctcttcctgtcaccgacacttcctcagcatccacaggtcaggccacccctcttcctgtcaccagcctttcctcagtatccacaggtgacaccacccctcttcctgtcaccgacgcttcctcagcatccacaggtcacgccacccctcttcctgtcaccatcccttcctcagtatccacaggtgacaccatgcctcttcctgtcactagcccttcctcagcatccacaggtcacgccacccctcttcctgttaccggcctttcctcagcttccacaggtgacaccacccctcttcctgtcaccgacacttcctcagcatccacacgtcacgccacccctcttcctgtcaccgacacttcctcagcttccacagatgacaccacccgtcttcctgtcaccgacgtttcctcggcatccacaggacatgccacccctcttcctgtcaccagcacttcctcagcatccacaggtgacaccacccctcttcctgtcaccgacacttcctcagtatccacaggtcacgccacctctcttcctgtcaccagccgttcctcagcatccacaggtcacgccaccccccttcctgtcaccgacacttcctcagtatccacaggtcacgccacccctcttcctgtcaccagcacttcctcagtatctacaggtcacgccacccctcttcctgtcaccagcccttcctcagcatccacaggtcacgccacccctgttcctgtcaccagcacttcctcagcatccacaggtgacaccacccctcttcctgtcaccaatgcttcctcattatccacaggtcacgccacccctcttcatgtcaccagcccttcctcagcatccagaggtgacaccagcactcttcctgtcaccgatgcttcctcagcatccaccggtcacgccacccctcttcctctcaccagcctttcctcagtatccacaggtgacaccacgcctcttcctgtcaccgacacttcctctgcatccacaggtcaggccacccctcttcctgtcaccagcctttcctcagtatccacaggtgacaccacgcctcttcctgtcaccatcccttcctcagcatcctcaggtcacaccacctctcttcctgtcaccgacgcttcctcagtgtccacaggtcacggcacccctcttcctgtcaccagcacttcctcagcatccacaggtgacaccacccctcttcctgtcaccgacacttcctcagcatccacaggtcacgccacccctcttcctgtcaccgacacttcctcagcatccacaggtcacgccacccctcttcctgtcaccagcctttcctcagtatccacaggtcacgccacccctcttgctgtcagcagtgctacctcagcttccacagtatcctcggactcccctctgaagatggaaacaccaggaatgacaacaccgtcactgaagacagacggtgggagacgcacagccacatcaccaccccccacaacctcccagaccatcatttccaccattcccagcactgccatgcacacccgctccacagctgcccccatccccatcctgcctgagagaggagtttccctcttcccctatggggcaggcgccggggacctggagttcgtcaggaggaccgtggacttcacctccccactcttcaagccggcgactggcttcccccttggctcctctctccgtgattccctctacttcacagacaatggccagatcatcttcccagagtcagactaccagattttctcctaccccaacccactcccaacaggcttcacaggccgggaccctgtggccctggtggctccgttctgggacgatgctgacttctccactggtcgggggaccacattttatcaggaatacgagacgttctatggtgaacacagcctgctagtccagcaggccgagtcttggattagaaagatgacaaacaacgggggctacaaggccaggtgggccctaaaggtcacgtgggtcaatgcccacgcctatcctgcccagtggaccctcgggagcaacacctaccaagccatcctctccacggacgggagcaggtcctatgccctgtttctctaccagagcggtgggatgcagtgggacgtggcccagcgctcagtggagatggctatttcgaaaacagcccactgatgtcccagccagtgtgggagaggtatcgccctgatagattcctgaattccaactcaggcctccaagggctgcagttctacaggctacaccgggaagaaaggcccaactaccgtctcgagtgcctgcagtggctgaagagccagcctcggtggcccagctggggctggaaccaggtctcctgcccttgttcctggcagcagggacgacgggacttacgattccaacccgtcagcataggtcgctggggcctcggcagtaggcagctgtgcagcttcacctcttggcgaggaggcgtgtgctgcagctacgggccctggggagagtttcgtgaaggctggcacgtgcagcgtccttggcagttggcccaggaactggagccacagagctggtgctgccgctggaatgacaagccctacctctgtgccctgtaccagcagaggcggccccacgtgggctgtgctacatacaggcccccacagcccgcctggatgttcggggacccccacatcaccaccttggatggtgtcagttacaccttcaatgggctgggggacttcctgctggtcggggcccaagacgggaactcctccttcctgcttcagggccgcaccgcccagactggctcagcccaggccaccaacttcatcgcctttgcggctcagtaccgctccagcagcctgggccccgtcacggtccaatggctccttgagcctcacgacgcaatccgtgtcctgctggataaccagactgtgacatttcagcctgaccatgaagacggcggaggccaggagacgttcaacgccaccggagtcctcctgagccgcaacggctctgaggtctcggccagcttcgacggctgggccaccgtctcggtgatcgcgctctccaacatcctccacgcctccgccagcctcccgcccgagtaccagaaccgcacggaggggctcctgggggtctggaataacaatccagaggacgacttcaggatgcccaatggctccaccattcccccagggagccctgaggagatgcttttccactttggaatgacctggcagatcaacgggacaggcctccttggcaagaggaatgaccagctgccttccaacttcacccctgttttctactcacaactgcaaaaaaacagctcctgggctgaacatttgatctccaactgtgacggagatagctcatgcatctatgacaccctggccctgcgcaacgcaagcatcggacttcacacgagggaagtcagtaaaaactacgagcaggcgaacgccaccctcaatcagtacccgccctccatcaatggtggtcgtgtgattgaagcctacaaggggcagaccacgctgattcagtacaccagcaatgctgaggatgccaacttcacgctcagagacagctgcaccgacttggagctctttgagaatgggacgttgctgtggacacccaagtcgctggagccattcactctggagattctagcaagaagtgccaagattggcttggcatctgcactccagcccaggactgtggtctgccattgcaatgcagagagccagtgtttgtacaatcagaccagcagggtgggcaactcctccctggaggtggctggctgcaagtgtgacgggggcaccttcggccgctactgcgagggctccgaggatgcctgtgaggagccgtgcttcccgagtgtccactgcgttcctgggaagggctgcgaggcctgccctccaaacctgactggggatgggcggcactgtgcggctctggggagctctttcctgtgtcagaaccagtcctgccctgtgaattactgctacaatcaaggccactgctacatctcccagactctgggctgtcagcccatgtgcacctgccccccagccttcactgacagccgctgcttcctggctgggaacaacttcagtccaactgtcaacctagaacttcccttaagagtcatccagctcttgctcagtgaagaggaaaatgcctccatggcagaagtcaacgcctcggtggcatacagactggggaccctggacatgcgggcctttctccgcaacagccaagtggaacgaatcgattctgcagcaccggcctcgggaagccccatccaacactggatggtcatctcggagttccagtaccgccctcggggcccggtcattgacttcctgaacaaccagctgctggccgcggtggtggaggcgttcttataccacgttccacggaggagtgaggagcccaggaacgacgtggtcttccagcccatctccggggaagacgtgcgcgatgtgacagccctgaacgtgagcacgctgaaggcttacttcagatgcgatggctacaagggctacgacctggtctacagcccccagagcggcttcacctgcgtgtccccgtgcagtaggggctactgtgaccatggaggccagtgccagcacctgcccagtgggccccgctgcagctgtgtgtccttctccatctacacggcctggggcgagcactgtgagcacctgagcatgaaactcgacgcgttcttcggcatcttctttggggccctgggcggcctcttgctgctgggggtcgggacgttcgtggtcctgcgcttctggggttgctccggggccaggttctcctatttcctgaactcagctgaggccttgccttgaaggggcagctgtggcctaggctacctcaagactcacctcatccttaccgcacatttaaggcgccattgcttttgggagactggaaaagggaaggtgactgaaggctgtcaggattctt

SEQ ID NO: 155733 - DNA, 22371 bp, Homo sapiens
  Payload ID: 10597
  Gene Symbol: MUC4
  Gene Name: mucin 4, cell surface associated
  ENST ID: ENST00000625840
  CDS Start-End: 73-19293
gtctgctcctcacactgcagctgctgggccgtggagcttccccagggagccagggggacttttgccgcagccatgaagggggcacgctggaggagggtcccctgggtgtccctgagctgcctgtgtctctgcctccttccgcatgtggtcccaggaaccacagaggacacattaataactggaagtaaaactcctgccccagtcacctcaacaggctcaacaacagcgacactagagggacaatcaactgcagcttcttcaaggacctctaatcaggacatatcagcttcatctcagaaccaccagactaagagcacggagaccaccagcaaagctcaaaccgacaccctcacgcagatgatgacatcaactcttttttcttccccaagtgtacacaatgtgatggagactgttacgcaggagacagctcctccagatgaaatgaccacatcatttccctccagtgtcaccaacacactcatgatgacatcaaagactataacaatgacaacctccacagactccactcttggaaacacagaagagacatcaacagcaggaactgaaagttctaccccagtgacctcagcagtctcaataacagctggacaggaaggacaatcacgaacaacttcctggaggacctctatccaagacacatcagcttcttctcagaaccactggactcggagcacgcagaccaccagggaatctcaaaccagcaccctaacacacagaaccacttcaactccttctttctctccaagtgtacacaatgtgacagggactgtttctcagaagacatctccttcaggtgaaacagctacctcatccctctgtagtgtcacaaacacatccatgatgacatcagagaagataacagtgacaacctccacaggctccactcttggaaacccaggggagacatcatcagtacctgttactggaagtcttatgccagtcacctcagcagccttagtaacagttgatccagaaggacaatcaccagtaactttctcaaggacttctactcaggacacaacagctttttctaagaaccaccagactcagagcgtggagaccaccagagtatctcaaatcaacaccctcaacaccctcacaccggttacaacatcaactgttttatcctcaccaagtggattcaacccaagtggaacagtttctcaggagacattcccttctggtgaaacaaccatctcatccccttccagtgtcagcaatacattcctggtaacatcaaaggtgttcagaatgccaatctccagagactctactcttggaaacacagaggagacatcactatctgtaagtggaaccatttctgcaatcacttccaaagtttcaaccatatggtggtcagacactctgtcaacagcactctcccccagttctctacctccaaaaatatccacagctttccacacccagcagagtgaaggtgcagagaccacaggacggcctcatgagaggagctcattctctccaggtgtgtctcaagaaatatttactctacatgaaacaacaacatggccttcctcattctccagcaaaggccacacaacttggtcacaaacagaactgccctcaacatcaacaggtgctgccactaggcttgtcacaggaaatccatctacaggggcagctggcactattccaagggtcccctctaaggtctcagcaataggggaaccaggagagcccaccacatactcctcccacagcacaactctcccaaaaacaacaggggcaggcgcccagacacaatggacacaagaaacggggaccactggagaggctcttctcagcagcccaagctacagtgtgactcagatgataaaaacggccacatccccatcttcttcacctatgctggatagacacacatcacaacaaattacaacggcaccatcaacaaatcattcaacaatacattccacaagcacctctcctcaggaatcaccagctgtttcccaaaggggtcacactcaagccccgcagaccacacaagaatcacaaaccacgaggtccgtctcccccatgactgacaccaagacagtcaccaccccaggttcttccttcacagccagtgggcactcgccctcagaaattgttcctcaggacgcacccaccataagtgcagcaacaacctttgccccagctcccaccggggatggtcacacaacccaggccccgaccacagcactgcaggcagcacccagcagccatgatgccaccctggggccctcaggaggcacgtcactttccaaaacaggtgcccttactctggccaactctgtagtgtcaacaccagggggcccagaaggacaatggacatcagcctctgccagcacctcacctgacacagcagcagccatgacccatacccaccaggctgagagcacagaggcctctggacaaacacagaccagcgaaccggcctcctcagggtcacgaaccacctcagcgggcacagctaccccttcctcatccggggcgagtggcacaacaccttcaggaagcgaaggaatatccacctcaggagagacgacaaggttttcatcaaacccctccagggacagtcacacaacccagtcaacaaccgaattgctgtccgcctcagccagtcatggtgccatcccagtaagcacaggaatggcgtcttcgatcgtccccggcacctttcatcccaccctctctgaggcctccactgcagggagaccgacaggacagtcaagcccaacttctcccagtgcctctcctcaggagacagccgccatttcccggatggcccagactcagaggacaagaaccagcagagggtctgacactatcagcctggcgtcccaggcaaccgacaccttctcaacagtcccacccacacctccatcgatcacatccagtgggcttacatctccacaaacccagacccacactctgtcaccttcagggtctggtaaaaccttcaccacggccctcatcagcaacgccacccctcttcctgtcacctacgcttcctcggcatccacaggtcacaccacccctcttcatgtcaccgatgcttcctcagtatccacaggtcacgccacccctcttcctgtcaccgacacttcctcagaatccacaggtcacgccacccctcttcctgtcaccagcccttcctcagtatccacaggtcacaccacccctcttcctgtcaccgacacttcctcagaatccacaggtcatgtcacccctcttcctgtcaccagcctttcctcagcatccacaggtgacagcacccctcttcctgtcactgacacttcctcagcatccacaggtcacgtcacccctcttcctgtcaccagcctttcctcagcatccacaggtgacaccacccctcttcctgtcactgacacttcctcagcatccacaggtcacgccacctctcttcctgtcaccgacacttcctcagtatccacaggtcacaccacccctcttcctgtcaccgacacttcctcagcatccacaggtcacgccacctctcttcctgtcaccgacacttcctcagtatccacagctcacgccaccccacttcctgtcaccggcctttcttcagcttccacagatgacaccacccgtcttcctgtcaccgacgtttcctcggcatccacaggtcaggccatccctcttcctgtcaccagcccttcctcagcatccacaggtgacaccacccctcttcctgtcaccgacgcttcctcagcatccacaggtgacaccacctctcttcctgtcaccatcccttcctcagcatcttcaggtcacaccacctctcttcctgtcaccgacgcttcctcagtgtccacaggtcacgccacctctcttcttgtcaccgacgcttcctcagtatccacaggtgacaccacccctcttcctgtcaccgacactaactcagcatccacaggtgacaccacccctcttcatgtcaccgacgcttcctcagtatccacaggtcacgccacctctcttcctgtcaccagcctttcctcagcatccacaggtgacaccacgcctcttcctgtcactagcccttcctcagcatcctcaggtcacaccacccctcttcctgtcaccgacgcttcctcagtacccacaggtcacgccacctctcttcctgtcaccgacgcttcctcagtgtccacaggtcacgccacccctcttcctgtcaccgacgcttcctcagtgtccacaggtcatgccacccctcttccggtcaccgacacttcctcagtatctacaggacaggccacccctcttcctgtcaccagcctttcctcagcatccactggtgacaccacgccgcttcctgtcaccgatacttcctcagcatccacaggtcaggacacccctcttcctgtcaccagcctttcctcagtatccacaggtgacaccacgcctcttcctgtcactagcccttcctcagcatccacaggtcacgccacccctcttcttgtcaccgacgcttcctcagtatccacaggtcacgccacctctcttcttgtcaccgacgcttcctcagtatccacaggtcacgccaccgctcttcatgtcaccgatgcttcctcattatccacaggggacaccacccctcttcctgtcaccagcccttcctcagcatccacaggtgacaccacccctcttcctgtcaccgacacttcctcagcatccacaggtcacgccacctctcttcctgtcaccgacacttcctcagcatccacaggtcacgccacccctcttcctgtcaccgacacttcctcagcatccacaggtcaggccacccctcttcctgtcaccggcccttcctcagcatccacaggtcacgccatccctcttcttgtcaccgacacttcctcagcatccacaggacaggccacccctcttcctgtcaccagcctttcctcagcatccacaggtgacaccacccctcttcctgtcaccgacgcttcctcagtgtccacaggtcacgccacctctcttcctgtcaccagcctttcctcagtatccacaggtgacaccacccctcttcctgtcaccagcccttcctcagcatcctcaggtcacaccacccctcttcctgtcaccgacgcttcctcagtatccacaggtgacaccacccctcttcctgtcaccagcccttcctcagcatcctcaggtcacaccacccctcttcctgtcaccagcccttcctcagcatcctcaggtcacaccacccctcttcctgtcaccgacgcttcctcagcatccacaggtgacaccacccctcttcctgtcaccgacacttcctcagcatccacaggtcacgccacccatcttcctgtcaccggcctttcctcagcttccacaggtgacaccacccgtcttcctgtcaccaacgtttcctcggcatccacaggtcatgccacccctcttcctgtcaccagcacttcctcagcatccacaggtgacaccacccctcttcctggcaccgacacttcctcagtatccacaggtcacaccacccctcttcttgtcaccgacgcttcgtcagtatccacaggtgacaccacccgtcttcctgtcaccagcccttcctcagcatctacaggtcacaccacccctctacctgtcaccgacactccctcagcatccacaggtgacaccacccctcttcctgtcaccaatgcttcctcattatccacacgtcacaccacctctcttcatgtcaccagcccttcctcagcatccacaggtcacgccacctctcttcctgtcaccgacacttcctcagtatccacaggtcatgccacccctcttcatgtcaccagcccttcctcagcatccacaggtgacaccacccctcttcctgtcaccgacacttactcagcatccacaggtcaggccacccctcttcctgtcaccgacacttcctcagcatccacaggtgacaccacccctcttcctgtcaccgacacttcctcagcatccacaggtcacgccacccctcttcctgtcaccaacacttcctcagtatccacaggtcacgccacccctcttcatgtcaccagcccttcctcagcatccacaggtcacaccacccctcttcctgtcaccgacgcttcgtcagtgtccacaggtcacgccacctctcttcctgtcaccgacgcttcctcagtgttcacaggtcacgccacctcgcttcctgtcaccatcccttcctcagcatcctcaggtcacaccacccctcttcctgtcaccgacgcttcctcagtgtccacaggtcacgccacctctcttcctgtcaccgacgcttcctcagtgtccacaggtcacgccacccctcttcctgtcaccgacgcttcctcagtgtccacaggtcacgctacccctcttcctgtcaccgacacttcctcagtatccacaggtcacgccacccctcttcctctcaccagcctttcctcagtatccacaggtgacaccacgcctcttcctgtcaccgacacttcctcagcatccacaggtcaggccacccctcttcctgtcaccagcctttcctcagtatccacaggtgacaccacccctcttcctgtcaccgacacttcctcagcatccacaggtcacgccacctctcttcctgtcaccgacacttcctcagcatccacaggtcacgccacccctcttcctgacaccgacacttcctcagcatccacaggtcacgccacccctcttcctgtcaccgacacttcctcagcatccacaggtcacgccacccttcttcctgtcaccgacacttcctcagcatccataggtcacgccacccctcttcctgtcaccgacacttcctcaatatccacaggtcacgccacccctcttcatgtcaccagcccttcctcagcatccaccggtcacgccaccccgcttcctgtcaccgacacttcctcagcatccacaggtcacgccaaccctcttcatgtcaccagcccttcctcagcatccaccggtcacgccaccccgcttcctgtcaccgacacttcctcagcatccacaggtcacgccacccctcttcctgtcaccagcctttcctcagtatccacaggtgacaccacgcctcttcctgtcactagcccttcctcagcatccacaggtcacaccacccctcttcctgtcaccgacacttcctcagcatccacaggtcaggccaccgctcttcctgtcaccagcacttcctcagcatccacaggtgacaccacccctcttcctgttaccgacacttcctcagcatccacaggtcaggccacccctcttcctgtcaccagcctttcctcagtatccacaggtgacaccacgcctcttcctgtcactagcccttcctcagcatccacaggtcacgccactcctcttcttgtcaccgacgcttcctcagcatccacaggtcaggccacccctcttcctgtcaccgacacttcctcagcatacacaggtgacaccacctctcttcctgtcaccgacacttcctcatcatccacaggtgacaccacccctcttcttgtcaccgagacttcctcagcatccacaggtcacgccacccctcttcatgtcaccagcccttcctcagcatccacaggtgacaccacccctgtgcctgtcaccgacacttcctcagtatccacaggtcacgccacccctcttcctgtcaccggcctttcctcagcttccacaggtgacaccacccgtcttcctgtcaccgacatttcctcggcatccacaggtcaggccacccctcttcctgtcaccaacacttcctcagcatccacaggtcacgccacccctcttcctgtcaccggcctttcctcagcttccacaggtgacaccacccgtcttcctgtcaccgacatttcctcggcatccacaggtcaggccacccctcttcctgtcaccaacacttcctcagtatccacaggtgacaccatgcctcttcctgtcactagcccttcctcagcatccacaggtcacgccacccctcttcctgtcaccagcacttcctcagcatccaccggtcacgccacccctgttcctgtcaccagcacttcctcagcatctacaggtcacaccacccctcttcctgtcaccgacacttcctcagcatccacaggtgacaccacccctcttcctgtcaccagcccttcctcagcatctacaggtcacaccacccctcttcatgtcaccatcccttcctcagcatccacaggtgacaccagcactcttcctgtcaccggcgcttcctcagcatccaccggtcacgccacccctcttcctgtcaccgacacttcctcagtatccacaggtcacgccacccctcttcctgtcaccagcttttcctcagtatccacaggtgacaccacgcctcttcctgtcaccgacacttcctcagtatccacaggtcacgccacccctcttcctgtcaccagcttttcctcagtatccacaggtgacaccacccctcttcctgtcaccgacgcttcctcggcatccaccggtcacgccacccctcttcctgtcaccgacacttcctcagtatccacaggtcacgccacccctcttcctctcaccagcctttcctcagtatccacaggtgacaccacgactcttcctgtcaccgacacttcctcagtatccacaggtcacgccacccctcttcctgtcaccagcttttcctcagtatccacaggtgacaccacccctcttcctgtcaccgacgcttcctcggcatccaccggtcacgccacccctcttcctgtcaccgacacttcctcagtatccaccggtcacgccacgcctcttcctgtcaccagcctttcctcagtatccacaggtgacaccacccctcttcctgtcaccgacgcttcctcggcatccacaggtcaggccacccctcttcctgtcaccagcctttcctcagtatcaacaggtgacaccacgcctcttcctgtcaccatcccttcctcagcatcctcaggtcacaccacctctcttcctgtcaccgacacttcctcagcatccacaggtcaggccacccctcttcctgtcaccagcctttcctcagtatccacaggtgacaccacccctcttcttgtcaccgacgcttcctcagtatccacaggtcacgccacccctcttcctgtcaccgacacttcctcagcatccacaggtgacaccacccgtcttcctgtcacagacacttcctcagcatccacaggtcaggccacccctcttcctgtcaccagcctttcctcagtatccacaggtgacaccacccctcttcttgtcaccaacacttcctcagtatccagaggtcacgccacctctcttcctgtcaccatcccttcctcatcatcctcaggtcacaccacccctcttcctgtcaccagcacttcctcagtatctacaggtcacgtcacccctcttcctgtcaccagcacttcctcagcatccacaggtcacgccacctctcttcctgtcaccgacacttcctcagtatccacaggtcacgccacctctcttcctgtcaccgacacttcctcagtatccacaggtcacgccacccctcttcctgtcaccgacgcttcctcagtgtccacaggtcacgccacgcctcttcctgtcaccgacgcttcctcagcatccacaggtgacaccacccctcttcctgtcaccaacacttcctcagcatccacaggtcaggccacccctcttcctgtcaccagcctttcctcagtatccacaggtgacaccatgcctcttcctgtcactagcccttcctcagcatccacaggtcacgccacccctcttcctgttaccggcctttcctcagcttccacaggtgacaccacccctcttcctgtcactgacacttcctcagcatccacaggtcacgtcacccctcttcctgtcaccagcctttcctcagcatccacaggtgacagcacccctcttcctgtcactgacacttcctcagcatccacaggtcacgtcacccctcttcctgtcaccagcctttcctcagcatccacaggtgacaccacccctcttcctgtcactgacacttcctcagcatccacaggtcacgccacccctcttcatgtcactgatgcttcctcagcatccacaggtcaggccacccttcttcctgtcaccagcctttcctcagtatccacaggtgacaccacgcctcttcctgtcactagcccttcctcagcatccacaggtcacgccacccctcttcttgtcaccgacacttcctcagcatccacaggacacgccacccctcttcctgtcacggacgcttcctcagtgtccacaggtcacgccacctctcttcctgtaaccatccgttcctcaggttccacaggtcacaccacccctcttcctgtcaccgacacttcctcagcatccacaggtcaggccacctctcttcttgtcaccgacacttcctcagtatccacaggtgacaccacgcctcttcctgtcactagcacttcctcagcatccacaggtcacgtcactcctcttcatgtcaccagcccttcctcagcatccacaggtcacgccacccctcttcctgtcaccagcctttcctcagcatccacaggtgacaccatgcctcttcctgtcactagcccttcctcagcatccacaggtgacaccacccctcttcctgtcaccgacgcttcctcagtatccacaggtcacaccacccctcttcctgtcaccagcccttcctcagcatctacaggtcacaccacccctcttcctgtcaccgacactacctcagcatccaaaggtgacaccacccctcttcctgtcaccagcccttcctcagcatctacaggtcacaccacccctcttcctgtcaccgacacttcctcagcatccacaggtgacaccacccctcttcctgtcaccagcccttcctcagcatccacaggtcacgccacccctcttcctgtcaccaatgcttcctcattatccacaggtcacgccacccctcttcatgtcaccagcccttcctcagcatccacaggtcacgccacccctcttcctgtcaccagcacttcctcagcatccaccggtcacgccacctctcttcctgtcaccagcacttcctcagcatccaccggtcacgccacccctcttcctgtcaccgacaattcctcagtatccacaggtcacgccacccctcttcctgtcaccggcctttcctcagctaccacagatgacaccacccgtcttcctgtcaccgacgtttcctcggcatccacaggtcaggccacccctcttcctgtcaccagcctttcctcagtatccacaggtgacaccacgcctcttcctgtcactagcccttcctcagcatccacaggtcacgccagccctcttcttgtcactgacgcttcctcagcatccacaggtcaggccacccctcttcctgtcaccgacacttcctcagtatccacagctcacgccaccccacttcctgtcaccggcctttcttcagcttccacagatgacaccacccgtcttcctgtcaccgacgtttcctcggcatccacaggtcaggccatccctcttcctgtcaccagcccttcctcagcatccacaggtgacaccacccctcttcctgtcaccgacgcttcctcagcatccacaggtgacaccacctctcttcctgtcaccatcccttcctcagcatcttcaggtcacaccacctctcttcctgtcaccgacgcttcctcagtgtccacaggtcacgccacctctcttcttgtcaccgacgcttcctcagtatccacaggtgacaccacccctcttcctgtcaccgacactaactcagcatccacaggtgacaccacccctcttcatgtcaccgacgcttcctcagtatccacaggtcacgccacctctcttcctgtcaccagcctttcctcagcatccacaggtgacaccacgcctcttcctgtcactagcccttcctcagcatcctcaggtgacaccacccctcttcctgtcaccgacacttcctcagcatccacaggtcacgccacccatcttcctgtcaccggcctttcctcagcttccacaggtgacaccacccgtcttcctgtcaccaacgtttcctcggcatccacaggtcatgccacccctcttcctgtcaccagcacttcctcagcatccacaggtgacaccacccctcttcctggcaccgacacttcctcagtatccacaggtcacaccacccctcttcttgtcaccgacgcttcgtcagtatccacaggtgacaccacccgtcttcctgtcaccagcccttcctcagcatctacaggtcacaccacccctcttcatgtcaccgatgcttcctcagtatccacaggtcacaccacccctcttcctgtcaccgacacttcctcagcatccacaggtcaggccacctctcttcttgtcaccgacacttcctcagtatccacaggtgacaccacgcctcttcctgtcactagcacttcctcagcatccacaggtcacgtcactcctcttcatgtcaccagcccttcctcagcatccacaggtcacgccacccctcttcctgtcaccagcctttcctcagcatccacaggtgacaccacccctcttcctgtcaccgacacttcctcagtatccacaggtcacaccacccctcttcctgtcaccagcccttcctcagcatctacaggtcacaccacccctcttcctgtcaccgacacttcctcagcatccaaaggtgacaccacccctcttcctgtcaccagcccttcctcagcatctacaggtcacaccacccctcttcctgtcaccgacacttcctcagcatccacaggtgacaccacccctcttcctgtcaccaatgcttcctcattatccacaggtcacgccacccctcttcatgtcaccagcccttcctcagcatccacaggtcacgccacccctcttcctgtcaccagcacttcctcagcatccaccggtcacgccacccctcttcctgtcaccagcacttcctcagcatccaccggtcacgccacccctcttcctgtcaccgacaattcctcagtatccacaggtcatgccacccctcttcctgtcaccggcctttcctcagctaccacagatgacaccacccgtcttcctgtcaccgacgtgtcctcggcatccacaggtcaggccacccctcttcctgtcaccagcctttcctcagtatccacaggtgacaccacgcctcttcctgtcactagcccttcctcagcatccacaggtcacgccagccctcttcttgtcactgacgcttcctcagcatccacaggtcaggccacccctcttcctgtcaccgacacttcctcagtatccacagctcacgccaccccacttcctgtcaccggcctttcctcagcttccacagatgacaccacccgtcttcctgtcaccgacgtttcctcggcatccacaggtcaggccatccctcttcctgtcaccagcccttcctcagcatccacaggtgacaccacccctcttcctgtcaccgacgcttcctcagcatccacaggtgacaccacctctcttcctgtcaccatcccttcctcagcatcttcaggtcacaccacctctcttcctgtcaccgacgcttcctcagtgtccacaggtcacgccacctctcttcttgtcaccgacgcttcctcagtatccacaggtgacaccacccctcttcctgtcaccgacactaactcagcatccacaggtgacaccacccctcttcatgtcaccgacgcttcctcagtatccacaggtcacgccacctctcttcctgtcaccagcctttcctcagcatccacaggtgacaccacgcctcttcctgtcactagcccttcctcagcatcctcaggtcacaccacctctcttcctgtcaccgacgcttcctcagtgtccacaggtcacgccacctctcttcctgtcaccatcccttcctcagcatcctcaggtcacaccacccctcttcctgtcaccgacgcttcctcagtacccacaggtcacgccacctctcttcctgtcaccgacgcttcctcagtgtccacaggtcacgccacccctcttcctgtcaccgacgcttcctcagtgtccacaggtcatgccacccctcttccggtcaccgacacttcctcagtatctacaggacaggccacccctcttcctgtcaccagcctttcctcagcatcatccactggtgacaccacgccgcttcctgtcactgatacttcctcagcatccacaggtcaggacacccctcttcctgtcaccagccttttctcagtatccacaggtgacaccacgcctcttcctgtcactagcccttcctcagcatccacaggtcacgccacccatcttcttgtcaccgacgcttcctcagtatccacaggtcacgccacctctcttcttgtcaccgacgcttcctcagtatccacaggtcacgccaccgctcttcatgtcaccgatgcttcctcattatccacaggggacaccacccctcttcctgtcaccagcccttcctcagcatccacaggtgacaccacccctcttcctgtcaccgacacttcctcagtatccacaggtcacgccacctctcttcctgtcactgacacttcctcagcatccacaggtcacgccacctctcttcctgtcaccgacacttcctcagcatccacaggtcaggccacccctcttcctgtcaccagcccttcctcagcatccacaggtcacgccatccctcttcttgtcaccgacacttcctcagcatccacaggacaggccacccctcttcctgtcaccagcctttcctcagcatccacaggtgacaccacccctcttcctgtcaccgatgcttcctcagtgtccacaggtcacgccacctctcttcctgtcaccagcctttcctcagtatccacaggtgacaccacccctcttcctgtcactagcccttcctcagcatccacaggtcacgccacccctcttcatgtcaccagcccttcctcagcatccacaggtcacgccacccctcttcctgtcaccagcctttcctcagcatccacaggtgacaccacgcctcttcctgtcactagcccttcctcagcatccacaggtcacgccacccctcttcatgtcaccgacgcttcctcagtatccacaggtgacaccacccctcttcctgtcaccagcccttcctcagcatcctcaggtcacaccacccctcttcctgtcaccgacgcttcctcagcatccacaggtgacaccacccctcttcctgtcaccgacacttcctcagcatccacaggtcacgccacccatcttcctgtcaccggcctttcctcagcttccacaggtgacaccacccgtcttcctgtcaccgacgtttcctcggcatccacaggtcatgccacccctcttcctgtcaccagcacttcctcagcatccacaggtgacaccacccctcttcctggcaccgacacttcctcagtatccacaggtcacaccacccctcttcttgtcaccgacgcttcgtcagtatccacaggtgacaccacccgtcttcctgtcaccagcccttcctcagcatctacaggtcacaccacccctctacctgtcaccgacactccctcagcatccacaggtgacaccacccctcttcctgtcaccaatgcttcctcattatccacacgtcacgccacctctcttcatgtcaccagcccttcctcagcatccaccggtcacgccacccctcttcctgttaccgacacttccgcagcatccacaggtcacgccacccctcttcctgtcaccagcacttcctcagcatccacaggtgacaccacccctcttcctgtcaccgacacttcctcagcatccacaggtcacgccacccctcttcctgtcaccaacacttcctcagtatccacaggtcacgccacccctcttcatgtcaccagcccttcctcagcatccacaggtcacaccacccctcttcctgtcaccgacgcttcgtcagtgtccacaggtcacgccacctctcttcctgtcaccgacgcttcctcagtgtccacaggtcacgccacccctcttcctgtcaccgacgcttcctcagtgtccacaggtcacgctacccctcttcctctcaccagcctttcctcagtatccacaggtgacaccacgcctcttcctgtcaccgacacttcctcagcatccacaggtcaggccacccctcttcctgtcaccagcctttcctcagtatccacaggtgacaccacccctcttcctgtcaccgacacttcctcagcatccacaggtcacgccacctctcttcctgtcaccgacacttcctcagcatccacaggtcacgccacccctcttcctgtcaccgacacttcctcaatatccacaggtcacgccacccctcttcatgtcaccagcccttcctcagcatccaccggtcacgccaccccgcttcctgtcaccgacacttcctcagcatccacaggtcacgccacccctcttcctgtcaccagcctttcctcagtatccacaggtgacaccacgcctcttcctgtcactagcccttcctcagcatccacaggtcacgccactcctcttcttgtcaccgacgcttcctcagcatccacaggtcaggccacccctcttcctgtcaccagcctttcctcagtatccacaggtgacaccacgcctcttcctgtcactagcccttcctcagcatccaccggtcatgccacctctcttcctgtcaccgacacttcctcagcatccacaggtgacaccacctctcttcctgtcaccgacacttcctcagcatacacaggtgacaccacctctcttcctgtcaccgacacttcctcatcatccacaggtgacaccacccctcttcttgtcaccgagacttcctcagcatccacaggtgacaccacccctgtgcctgtcaccgacacttcctcagtatccacaggtcacgccacccctcttcctgtcaccggcctttcctcagcttccacaggtgacaccacccgtcttcctgtcaccgacatttcctcggcatccacaggtcaggccacccctcttcctgtcaccaacacttcctcagtatccacaggtgacaccatgcctcttcctgtcactagcccttcctcagcatccacaggtcacgccacccctcttcctgtcaccagcacttcctcagcatccaccggtcacgccacccctgttcctgtcaccagcacttccttagcatccacaggtcacaccacccctcttcctgtcaccagcccttcctcagcatctacaggtcacaccacccctcttcctgtcaccgacacttcctcagcatccacaggtgacaccacccctcttcctgtcaccaatgcttcctcattatccacaggacacaccacccctcttcatgtcaccatcccttcctcagcatccacaggtgacaccagcactcttcctgtcaccggcgcttcctcagcatccaccggtcacgccacccctcttcctgtcaccgacacttcctcagtatccacaggtcacgccacccctcttcctgtcaccagcttttcctcagtatccacaggtgacaccacccctcttcctgtcaccgacgcttcctcggcatccaccggtcacgccacccctcttcctgtcaccgacacttcctcagcatccacaggtgacaccacccctcttcctgtcaccgacgcttcctcggcatccacaggtcaggccacccctcttcctgtcaccagcctttcctcagtatcaacaggtgacaccacgcctcttcctgtcaccatcccttcctcagcatcctcaggtcacaccacctctcttcctgtcagcgacacttcctcagcatccacaggtcaggccacccctcttcctgtcaccagcctttcctcagtatccacaggtgacaccacccctcttcttgtcaccgacgcttcctcagtatccacaggtcacgccacccctcttcctgtcaccgacacttcctcagcatccacaggtgacaccacccgtcttcctgtcacggacacttcctcagcatccacaggtcaggccacccctcttcctgtcaccagcctttcctcagtatccacaggtgacaccacccctcttcttgtcaccaacacttcctcagtatccacaggtcacgccacctctcttcctgtcaccatcccttcctcatcatcctcaggtcacaccacccctcttcctgtcaccagcacttcctcagtatctacaggtcacgtcacccctcttcatgtcaccagcccttcctcatcatccacaggtcaggccacccctcttcctgtcaccagcacttcctcagtatctacaggtcacgtcacccctcttcatgtcaccagcccttcctcagcatccacaggtcacgccacccctcttcctgtcaccagcacttcctcagcatccacaggtcacgccacccctcttcctgtcaccgacgcttcctcagtgtccacaggtcacgccacgcctcttcctgtcaccgacacttcctcagcatccacaggtgacaccacccctcttcctgtcaccgacacttcctcagcatccacaggtcaggccacccctcttcctgtcaccagcctttcctcagtatccacaggtcacgccacccctcttgctgtcagcagtgctacctcagcttccacagtatcctcggactcccctctgaagatggaaacatcaggaatgacaacaccgtcactgaagacagacggtgggagacgcacagccacatcaccaccccccacaacctcccagaccatcatttccaccattcccagcactgccatgcacacccgctccacagctgcccccatccccatcctgcctgagagaggagtttccctcttcccctatggggcagacgccggggacctggagttcgtcaggaggaccgtggacttcacctccccactcttcaagccggcgactggcttcccccttggctcctctctccgtgattccctctacgcttcacaggccgggaccctgtggccctggtggctccgttctgggacgatgctgacttctccactggtcgggggaccacattttatcaggaatacgagacgttctatggtgaacacagcctgctagtccagcaggccgagtcttggattagaaagatgacaaacaacgggggctacaaggccaggtgggccctaaaggtcacgtgggtcaatgcccacgcctatcctgcccagtggaccctcgggagcaacacctaccaagccatcctctccacggacgggagcaggtcctatgccctgtttctctaccagagcggtgggatgcagtgggacgtggcccagcgctcaggcaacccggtgctcatgggcttctctagtggagatggctatttcgaaaacagcccactgatgtcccagccagtgtgggagaggtatcgccctgatagattcctgaattccaactcaggcctccaagggctgcagttctacaggctacaccgggaagaaaggcccaactaccgtctcgagtgcctgcagtggctgaagagccagcctcggtggcccagctggggctggaaccaggtctcctgcccttgttcctggcagcagggacgacgggacttacgattccaacccgtcagcataggtcgctggggcctcggcagtaggcagctgtgcagcttcacctcttggcgaggaggcgtgtgctgcagctacgggccctggggagagtttcgtgaaggctggcacgtgcagcgtccttggcagttggcccaggaactggagccacagagctggtgctgccgctggaatgacaagccctacctctgtgccctgtaccagcagaggcggccccacgtgggctgtgctacatacaggcccccacagcccgcctggatgttcggggacccccacatcaccaccttggatggtgtcagttacaccttcaatgggctgggggacttcctgctggtcggggcccaagacgggaactcctccttcctgcttcagggccgcaccgcccagactggctcagcccaggccaccaacttcatcgcctttgcggctcagtaccgctccagcagcctgggccccgtcacggtccaatggctccttgagcctcacgacgcaatccgtgtcctgctggataaccagactgtgacatttcagcctgaccatgaagacggcggaggccaggagacgttcaacgccaccggagtcctcctgagccgcaacggctctgaggtctcggccagcttcgacggctgggccaccgtctcggtgatcgcgctctccaacatcctccacgcctccgccagcctcccgcccgagtaccagaaccgcacggaggggctcctgggggtctggaataacaatccagaggacgacttcaggatgcccaatggctccaccattcccccagggagccctgaggagatgcttttccactttggaatgacctggcagatcaacgggacaggcctccttggcaagaggaatgaccagctgccttccaacttcacccctgttttctactcacaactgcaaaaaaacagctcctgggctgaacatttgatctccaactgtgacggagatagctcatgcatctatgacaccctggccctgcgcaacgcaagcatcggacttcacacgagggaagtcagtaaaaactacgagcaggcgaacgccaccctcaatcagtacccgccctccatcaatggtggtcgtgtgattgaagcctacaaggggcagaccacgctgattcagtacaccagcaatgctgaggatgccaacttcacgctcagagacagctgcaccgacttggagctctttgagaatgggacgttgctgtggacacccaagtcgctggagccattcactctggagattctagcaagaagtgccaagattggcttggcatctgcactccagcccaggactgtggtctgccattgcaatgcagagagccagtgtttgtacaatcagaccagcagggtgggcaactcctccctggaggtggctggctgcaagtgtgacgggggcaccttcggccgctactgcgagggctccgaggatgcctgtgaggagccgtgcttcccgagtgtccactgcgttcctgggaagggctgcgaggcctgccctccaaacctgactggggatgggcggcactgtgcggctctggggagctctttcctgtgtcagaaccagtcctgccctgtgaattactgctacaatcaaggccactgctacatctcccagactctgggctgtcagcccatgtgcacctgccccccagccttcactgacagccgctgcttcctggctgggaacaacttcagtccaactgtcaacctagaacttcccttaagagtcatccagctcttgctcagtgaagaggaaaatgcctccatggcagaagtcaacgcctcggtggcatacagactggggaccctggacatgcgggcctttctccgcaacagccaagtggaacgaatcgattctgcagcaccggcctcgggaagccccatccaacactggatggtcatctcggagttccagtaccgccctcggggcccggtcattgacttcctgaacaaccagctgctggccgcggtggtggaggcgttcttataccacgttccacggaggagtgaggagcccaggaacgacgtggtcttccagcccatctccggggaagacgtgcgcgatgtgacagccctgaacgtgagcacgctgaaggcttacttcagatgcgatggctacaagggctacgacctggtctacagcccccagagcggcttcacctgcgtgtccccgtgcagtaggggctactgtgaccatggaggccagtgccagcacctgcccagtgggccccgctgcagctgtgtgtccttctccatctacacggcctggggcgagcactgtgagcacctgagcatgaaactcgacgcgttcttcggcatcttctttggggccctgggcggcctcttgctgctgggggtcgggacgttcgtggtcctgcgcttctggggttgctccggggccaggttctcctatttcctgaactcagctgaggccttgccttgaaggggcagctgtggcctaggctacctcaagactcacctcatccttaccgcacatttaaggcgccattgcttttgggagactggaaaagggaaggtgactgaaggctgtcaggattctt

SEQ ID NO: 155734 - DNA, 16406 bp, Homo sapiens; identical to SEQ ID NO: 155700
  Payload ID: 10597
  Gene Symbol: MUC4
  Gene Name: mucin 4, cell surface associated
  ENST ID: ENST00000628045
  CDS Start-End: 1-15131

SEQ ID NO: 155735 - DNA, 3942 bp, Homo sapiens; identical to SEQ ID NO: 155696
  Payload ID: 10597
  Gene Symbol: MUC4
  Gene Name: mucin 4, cell surface associated
  ENST ID: ENST00000629790
  CDS Start-End: 1-494

SEQ ID NO: 155736 - DNA, 16199 bp, Homo sapiens
  Payload ID: 10597
  Gene Symbol: MUC4
  Gene Name: mucin 4, cell surface associated
  ENST ID: ENST00000627391
  CDS Start-End: 1-13121
gaaccacagaggacacattaataactggaagtaaaactgctgccccagtcacctcaacaggctcaacaacagcgacactagagggacaatcaactgcagcttcttcaaggacctctaatcaggacatatcagcttcatctcagaaccaccagactaagagcacggagaccaccagcaaagctcaaaccgacaccctcacgcagatgatgacatcaactcttttttcttccccaagtgtacacaatgtgatggagacagctcctccagatgaaatgaccacatcatttccctccagtgtcaccaacacactcatgatgacatcaaagactataacaatgacaacctccacagactccactcttggaaacacagaagagacatcaacagcaggaactgaaagttctaccccagtgacctcagcagtctcaataacagctggacaggaaggacaatcacgaacaacttcctggaggacctctatccaagacacatcagcttcttctcagaaccactggactcggagcacgcagaccaccagggaatctcaaaccagcaccctaacacacagaaccacttcaactccttctttctctccaagtgtacacaatgtgacagggactgtttctcagaagacatctccttcaggtgaaacagctacctcatccctctgtagtgtcacaaacacatccatgatgacatcagagaagataacagtgacaacctccacaggctccactcttggaaacccaggggagacatcatcagtacctgttactggaagtcttatgccagtcacctcagcagccttagtaacatttgatccagaaggacaatcaccagcaactttctcaaggacttctactcaggacacaacagctttttctaagaaccaccagactcagagcgtggagaccaccagagtatctcaaatcaacaccctcaacaccctcacaccggttacaacatcaactgttttatcctcaccaagtggattcaacccaagtggaacagtttctcaggagacattcccttctggtgaaacaaccacctcatccccttccagtgtcagcaatacattcctggtaacatcaaaggtgttcagaatgccaacctccagagactctactcttggaaacacagaggagacatcactatctgtaagtggaaccatttctgcaatcacttccaaagtttcaaccatatggtggtcagacactctgtcaacagcactctcccccagttctctacctccaaaaatatccacagctttccacacccagcagagtgaaggtgcagagaccacaggacggcctcatgagaggagctcattctctccaggtgtgtctcaagaaatatttactctacatgaaacaacaacatggccttcctcattctccagcaaaggccacacaacttggtcacaaacagaactgccctcaacatcaacaggtgctgccactaggcttgtcacaggaaatccatctacagggacagctggcactattccaagggtcccctctaaggtctcagcaataggggaaccaggagagcccaccacatactcctcccacagcacaactctcccaaaaacaacaggggcaggcgcccagacacaatggacacaagaaacggggaccactggagaggctcttctcagcagcccaagctacagtgtgactcagatgataaaaacggccacatccccatcttcttcacctatgctggatagacacacatcccaacaaattacaacggcaccatcaacaaatcattcaacaatacattccacaagcacctctcctcaggaatcaccagctgtttcccaaaggggtcacactcaagccccgcagaccacacaagaatcacaaaccacgaggtccgtctcccccatgactgacaccaagacagtcaccaccccaggttcttccttcacagccagtgggcactcgccctcagaaattgttcctcaggacgcacccaccataagtgcagcaacaacctttgccccagctcccaccggggatggtcacacaacccaggccccgaccacagcactgcaggcagcacccagcagccatgatgccaccctggggccctcaggaggcacgtcactttccaaaacaggtgcccttactctggccaactctgtagtgtcaacaccagggggcccagaaggacaatggacatcagcctctgccagcacctcacctgacacagcagcagccatgacccatacccaccaggctgagagcacagaggcctctggacaaacacagaccagcgaaccggcctcctcagggtcacgaaccacctcagcgggcacagctaccccttcctcatccggggcgagtggcacaacaccttcaggaagcgaaggaatatccacctcaggagagacgacaaggttttcatcaaacccctccagggacagtcacacaacccagtcaacaaccgaattgctgtccgcctcagccagtcatggtgccatcccagtaagcacaggaatggcgtcttcgatcgtccccggcacctttcatcccaccctctctgaggcctccactgcagggagaccgacaggacagtcaagcccaacttctcccagtgcctctcctcaggagacagccgccatttcccggatggcccagactcagaggacaagaaccagcagagggtctgacactatcagcctggcgtcccaggcaaccgacaccttctcaacagtcccacccacacctccatcgatcacatccactgggcttacatctccacaaaccgagacccacactctgtcaccttcagggtctggtaaaaccttcaccacggccctcatcagcaacgccacccctcttcctgtcacctacgcttcctcggcatccacaggtcacaccacccctcttcatgtcaccgatgcttcctcagtatccacaggtcacgccacccctcttcctgtcaccagcccttcctcagtatccacaggtcacaccacccctcttcctgtcaccgacacttcctcagaatccacaggtcacgtcacccctcttcctgtcaccagcttttcctcagcatccacaggtgacagcacccctcttcctgtcactgacacttcctcagcatccacaggtcacgtcacccctcttcctgtcaccagcctttcctcagcatccacaggtgacaccacccctcttcctgtcactgacacttcctcagcatccacaggtcacgccacctctcttcctgtcaccgacacttcctcagtatccacaggtcacaccacccctcttcctgtcaccgacacttcctcagcatccacaggtcacgccacctctcttcctgtcaccgacacttcctcagtatccacaggtcacaccacccctcttcatgtcactgatgcttcctcagcatccacaggtcaggccacccctcttcctgtcaccagcctttcctcagtatccacaggtgacaccacgcctcttcctgtcactagcccttcctcagcatccacaggtcacgccacccctcttcttgtcaccgacacttcctcagcatccacaggacacgccacccctcttcctgtcaccgacgcttcctcagtgtccacagatcacgccacctctcttcctgtaaccatcccttccgcagcatccacaggtcacaccacccctcttcctgtcaccgacacttcctcagcatccacaggtcaggccacctctcttcttgtcaccgacacttcctcagtatccacaggtgacaccacgcctcttcctgtcactagcacttcctcagcatccacaggtcacgtcactcctcttcatgtcaccagcccttcctcagcatccacaggtcacgccacccctcttcctgtcaccagcctttcctcagcatccacaggtgacaccatgcctcttcctgtcactagcccttcctcagcatccacaggtgacaccacccctcttcctgtcaccgacgcttcctcagtatccacaggtcacaccacccctcttcatgtcactgatgcttcctcagcatccacaggtcaggccacccctcttcctgtcaccagcctttcctcagtatccacaggtgacaccacgcctcttcctgtcactagcccttcctcagcatccacaggtcacgccacccctcttcttgtcaccgacacttcctcagcatccacaggacacgccacccctcttcctgtcaccgacgcttcctcagtgtccacagatcacgccacctctcttcctgtaaccatcccttccgcagcatccacaggtcacaccacccctcttcctgtcaccgacacttcctcagcatccacaggtcaggccacctctcttcttgtcaccgacacttcctcagtatccacaggtgacaccacgcctcttcctgtcactagcacttcctcagcatccacaggtcacgtcactcctcttcatgtcaccagcccttcctcagcatccacaggtcacgccacccctcttcctgtcaccagcctttcctcagcatccacaggtgacaccatgcctcttcctgtcactagcccttcctcagcatccacaggtgacaccacccctcttcctgtcaccgacgcttcctcagtatccacaggtcacaccacccctcttcctgtcaccagcccttcctcagcatctacaggtcacaccacccctcttcctgtcaccgacacttcctcagcatccaaaggtgacaccacccctcttcctgtcaccagcccttcctcagcatctacaggtcacaccacccctcttcctgtcaccgacacttcctcagcatccacaggtgacaccacccctcttcctgtcaccaatgcttcctcattatccacaggtcacgccacccctcttcatgtcaccagcccttcctcagcatccacaggtcacgccacccctcttcctgtcaccagcacttcctcagcatccaccggtcacgccacccctcttcctgtcaccggcctttcctcagctaccacagatgacaccacccgtcttcctgtcaccgacgtttcctcggcatccacaggtcaggccacccctcttcctgtcaccagcctttcctcagtatccacaggtgacaccacgcctcttcctgtcactagcccttcctcagcatccacaggtcacgccagccctcttcttgtcactgacgcttcctcagcatccacaggtcaggccacccctcttcctgtcaccgacacttcctcagtatccacagctcacgccaccccacttcctgtcaccggcctttcttcagcttccacagatgacaccacccgtcttcctgtcaccgacgtttcctcggcatccacaggtcaggccatccctcttcctgtcaccagcccttcctcagcatccacaggtgacaccacccctcttcctgtcaccgacgcttcctcagcatccacaggtgacaccacctctcttcctgtcaccatcccttcctcagcatcttcaggtcacaccacctctcttcctgtcaccgacgcttcctcagtgtccacaggtcacgccacctctcttcttgtcaccgacgcttcctcagtatccacaggtgacaccacccctcttcctgtcaccgacactaactcagcatccacaggtgacaccacccctcttcatgtcaccgacgcttcctcagtatccacaggtcacgccacctctcttcctgtcaccagcctttcctcagcatccacaggtgacaccacgcctcttcctgtcactagcccttcctcagcatcctcaggtcacaccacccctcttcctgtcaccgacgcttcctcagtacccacaggtcacgccacctctcttcctgtcaccgacgcttcctcagtgtccacaggtcacgccacccctcttcctgtcaccgacgcttcctcagtgtccacaggtcatgccacccctcttccggtcaccgacacttcctcagtatctacaggacaggccacccctcttcctgtcaccagcctttcctcagcatccactggtgacaccacgccgcttcctgtcaccgatacttcctcagcatccacaggtcaggacacccctcttcctgtcaccagcctttcctcagtatccacaggtgacaccacgcctcttcctgtcactaacccttcctcagcatccacaggtcacgccacccctcttcttgtcaccgacgcttcctcaatatccacaggtcacgccacctctcttcttgtcaccgacgcttcctcagtatccacaggtcacgccaccgctcttcatgacaccgatgcttcctcattatccacaggggacaccacccctcttcctgtcaccagcccttcctcaacatccacaggtgacaccacccctcttcctgtcaccgaaacttcctcagtatccacaggtcacgccacctctcttcctgtcaccgacacttcctcagcatccacaggtcacgccacctctcttcctgtcaccgacacttcctcagcatccacaggtcacgccacccctcttcctgtcaccgacacttcctcagcatccacaggtcaggccacccctcttcctgtcaccagcccttcctcagcatccacaggtcacgccatccctcttcttgtcaccgacacttcctcagcatccacaggacaggccacccctcttcctgtcaccagcctttcctcagcatccacaggtgacaccacccctcttcctgtcaccgacgcttcctcagtgtccacaggtcacgccacctctcttcctgtcaccagcctttcctcagtatccacaggtgacaccactcctcttcctgtcactagcccttcctcagcatccacaggtcacgccacccctcttcatgtcaccgacgcttcctcagcatccacaggtcacgccacccctcttcctgtcaccagcctttcctcagcatccacaggtgacaccacgcctcttcctgtcactagcccttcctcagcatccacaggtcacgccacccctcttcatgtcaccgacgcttcctcagtatccacaggtgacaccacccctcttcctgtcaccagctcttcctcagcatcctcaggtcacaccacccctcttcctgtcaccgacgcttcctcagcatccacaggtgacaccacccctcttcctgtcaccgacacttcctcagcatccacaggtcacgccacccatcttcctgtcaccggcctttcctcagcttccacaggtgacaccacccgtcttcctgtcaccaacgtttcctcggcatccacaggtcatgccacccctcttcctgtcaccagcacttcctcagcatccacaggtgacaccacccctcttcctggcaccgacacttcctcagtatccacaggtcacaccacccctcttcttgtcaccgacgcttcgtcagtatccacaggtgacaccacccgtcttcctgtcaccagcccttcctcagcatctacaggtcacaccacccctctacctgtcaccgacactccctcagcatccacaggtgacaccacccctcttcctgtcaccaatgcttcctcattatccacacgtcacgccacctctcttcatgtcaccagcccttcctcagcatccacaggtcacgccacctctcttcctgtcaccgacacttccgcagcatccacaggtcacgccacccctcttcctgtcaccagcacttcctcagcatccacaggtgacaccacccctcttcctgtcaccgacacttactcagcatccacaggtcaggccacccctcttcctgtcaccagcctttcctcagtatccacaggtgacaccacgcctcttcctgtcactagcccttcctcagcatccacaggtcacgccactcctcttcttgtcaccgacgcttcctcagcatccacaggtcaggccacccctcttcctgtcaccagcctttcctcagtatccacaggtgacaccacgcctcttcctgtcactagcccttcctcagcatccaccggtcatgccacctctcttcctgtcaccgacacttcctcagcatccacaggtgacaccacctctcttcctgtcaccgacacttcctcagcatacacaggtgacaccacctctcttcctgtcaccgacacttcctcatcatccacaggtgacaccacccctcttcttgtcaccgagacttcctcagtatccacaggtgacaccacccctcttcctgtcaccgacacttcctcagcatccacaggtcacgccacccctcttcctgtcaccaacacttcctcagtatccacaggtcacgccacccctcttcatgtcaccagcccttcctcagcatccacaggtcacaccacccctcttcctgtcaccgacgcttcgtcagtgtccacaggtcacgccacctctcttcctgtcaccgacgcttcctcagtgttcacaggtcatgccacctctcttcctgtcaccatcccttcctcagcatcctcaggtcacaccacccctcttcctgtcaccgacgcttcctcagtgtccacaggtcacgccacctctcttcctgtcaccgacgcttcctcagtgtccacaggtcatgccacccctcttcctgtcaccgacgcttcctcagtgtccacaggtcacgctacccctcttcctctcaccagcctttcctcagtatccacaggtgacaccacgcctcttcctgtcaccgacacttcctcagcatccacaggtcaggccacccctcttcctgtcaccagcctttcctcagtatccacaggtgacaccacccctcttcctgtcaccgacacttcctcagcatccacaggtcacgccacctctcttcctgtcaccgacacttcctcagcatccacaggtcacgccacccctcttcctgacaccgacacttcctcagcatccacaggtcacgccacccttcttcctgtcaccgacacttcctcagcatccataggtcacgccacctctcttcctgtcaccgacacttcctcaatatccacaggtcacgccacccctcttcatgtcaccagcccttcctcagcatccaccggtcacgccaccccgcttcctgtcaccgacacttcctcagcatccacaggtcacgccaaccctcttcatgtcaccagcccttcctcagcatccaccggtcacgccaccccgcttcctgtcaccgacacttcctcagcatccacaggtcacgccacccctcttcctgtcaccagcctttcctcagtatccacaggtgacaccacgcctcttcctgtcactagcccttcctcagcatccacaggtcacaccacccctcttcctgtcaccgacacttcctcagcatccacaggtcaggccaccgctcttcctgtcaccagcacttcctcagcatccacaggtgacaccacccctcttcctgtcaccgacacttcctcagcatccacaggtcaggccacccctcttcctgtcaccagcctttcctcagtatccacaggtgacaccacgcctcttcctgtcactagcccttcctcagcatccacaggtcacgccactcctcttcttgtcaccgacgcttcctcagcatccacaggtcaggccacccctcttcctgtcaccagcctttcctcagtatccacaggtgacaccacgcctcttcctgtcactagcccttcctcagcatccaccggtcatgccacctctcttcctgtcaccgacacttcctcagcatccacaggtgacaccacctctcttcctgtcaccgacacttcctcagcatacacaggtgacaccacctctcttcctgtcaccgacacttcctcatcatccacaggtgacaccacccctcttcttgtcaccgagacttcctcagtatccacaggtcacgccactcctcttcttgtcaccgacgcttcctcagcatccacaggtcacgccacccctcttcatgtcaccagcccttcctcagcatccacaggtgacaccacccctgtgcctgtcaccgacacttcctcagtatccacaggtcacgccacccctcttcctgtcaccggcctttcctcagcttccacaggtgacaccacccgtcttcctgtcaccgacatttcctcggcatccacaggtcaggccacccctcttcctgtcaccaacacttcctcagtatccacaggtgacaccatgcctcttcctgtcactagcccttcctcagcatccacaggtcacgccacccctcttcctgtcaccagcacttcctcagcatccaccggtcacgccacccctgttcctgtcaccagcacttcctcagcatctacaggtcacaccacccctcttcctgtcaccgacacttcctcagcatccacaggtgacaccacccctcttcctgtcaccagcccttcctcagcatctacaggtcacaccacccctcttcatgtcaccatcccttcctcagcatccacaggtgacaccagcactcttcctgtcaccggcgcttcctcagcatccaccggtcacgccacccctcttcctgtcaccgacacttcctcagtatccaccggtcacgccacgcctcttcctgtcaccagcctttcctcagtatccacaggtgacaccacccctcttcctgtcaccgacgcttcctcggcatccacaggtcaggccacccctcttcctgtcaccagcctttcctcagtatccacaggtgacaccacccctcttcttgtcaccgacgcttcctcagtatccacaggtcacgccacccctcttcctgtcaccgacacttcctcagcatccacaggtgacaccacccgtcttcctgtcacggacacttcctcagcatccacaggtcaggccacccctcttcctgtcaccagcctttcctcagtatccacaggtgacaccacccctcttcttgtcaccgacgcttcctcagtatccacaggtcacgccacccctcttcctgtcaccgacacttcctcagcatccacaggtgacaccacccgtcttcctgtcacggacacttcctcagcatccacaggtcaggccacccctcttcctgtcaccatcccttcctcatcatcctcaggtcacaccacccctcttcctgtcaccagcacttcctcagtatctacaggtcacgtcacccctcttcatgtcaccagcccttcctcagcatccacaggtcacgtcacccctcttcctgtcaccagcacttcctcagcatccacaggtcacgccacccctcttcttgtcaccgacgcttcctcagtgtccacaggtcacgccacgcctcttcctgtcaccgacgcttcctcagcatccacaggtgacaccacccctcttcctgtcaccgacacttcctcagcatccacaggtcaggccacccctcttcctgtcaccagcctttcctcagtatccacaggtgacaccacccctcttcctgtcaccgacgcttcctcagcatccacaggtcacgccacccctcttcctgtcaccatcccttcctcagtatccacaggtgacaccatgcctcttcctgtcactagcccttcctcagcatccacaggtcacgccacccctcttcctgttaccggcctttcctcagcttccacaggtgacaccacccctcttcctgtcaccgacacttcctcagcatccacacgtcacgccacccctcttcctgtcaccgacacttcctcagcttccacagatgacaccacccgtcttcctgtcaccgacgtttcctcggcatccacaggacatgccacccctcttcctgtcaccagcacttcctcagcatccacaggtgacaccacccctcttcctgtcaccgacacttcctcagtatccacaggtcacgccacctctcttcctgtcaccagccgttcctcagcatccacaggtcacgccaccccccttcctgtcaccgacacttcctcagtatccacaggtcacgccacccctcttcctgtcaccagcacttcctcagtatctacaggtcacgccacccctcttcctgtcaccagcccttcctcagcatccacaggtcacgccacccctgttcctgtcaccagcacttcctcagcatccacaggtgacaccacccctcttcctgtcaccaatgcttcctcattatccacaggtcacgccacccctcttcatgtcaccagcccttcctcagcatccagaggtgacaccagcactcttcctgtcaccgatgcttcctcagcatccaccggtcacgccacccctcttcctctcaccagcctttcctcagtatccacaggtgacaccacgcctcttcctgtcaccgacacttcctctgcatccacaggtcaggccacccctcttcctgtcaccagcctttcctcagtatccacaggtgacaccacgcctcttcctgtcaccatcccttcctcagcatcctcaggtcacaccacctctcttcctgtcaccgacgcttcctcagtgtccacaggtcacggcacccctcttcctgtcaccagcacttcctcagcatccacaggtgacaccacccctcttcctgtcaccgacacttcctcagcatccacaggtcacgccacccctcttcctgtcaccgacacttcctcagcatccacaggtcacgccacccctcttcctgtcaccagcctttcctcagtatccacaggtcacgccacccctcttgctgtcagcagtgctacctcagcttccacagtatcctcggactcccctctgaagatggaaacaccaggaatgacaacaccgtcactgaagacagacggtgggagacgcacagccacatcaccaccccccacaacctcccagaccatcatttccaccattcccagcactgccatgcacacccgctccacagctgcccccatccccatcctgcctgagagaggagtttccctcttcccctatggggcaggcgccggggacctggagttcgtcaggaggaccgtggacttcacctccccactcttcaagccggcgactggcttcccccttggctcctctctccgtgattccctctacgcttcacaggccgggaccctgtggccctggtggctccgttctgggacgatgctgacttctccactggtcgggggaccacattttatcaggaatacgagacgttctatggtgaacacagcctgctagtccagcaggccgagtcttggattagaaagatgacaaacaacgggggctacaaggccaggtgggccctaaaggtcacgtgggtcaatgcccacgcctatcctgcccagtggaccctcgggagcaacacctaccaagccatcctctccacggacgggagcaggtcctatgccctgtttctctaccagagcggtgggatgcagtgggacgtggcccagcgctcaggcaacccggtgctcatgggcttctctagtggagatggctatttcgaaaacagcccactgatgtcccagccagtgtgggagaggtatcgccctgatagattcctgaattccaactcaggcctccaagggctgcagttctacaggctacaccgggaagaaaggcccaactaccgtctcgagtgcctgcagtggctgaagagccagcctcggtggcccagctggggctggaaccaggtctcctgcccttgttcctggcagcagggacgacgggacttacgattccaacccgtcagcataggtcgctggggcctcggcagtaggcagctgtgcagcttcacctcttggcgaggaggcgtgtgctgcagctacgggccctggggagagtttcgtgaaggctggcacgtgcagcgtccttggcagttggcccaggaactggagccacagagctggtgctgccgctggaatgacaagccctacctctgtgccctgtaccagcagaggcggccccacgtgggctgtgctacatacaggcccccacagcccgcctggatgttcggggacccccacatcaccaccttggatggtgtcagttacaccttcaatgggctgggggacttcctgctggtcggggcccaagacgggaactcctccttcctgcttcagggccgcaccgcccagactggctcagcccaggccaccaacttcatcgcctttgcggctcagtaccgctccagcagcctgggccccgtcacggtccaatggctccttgagcctcacgacgcaatccgtgtcctgctggataaccagactgtgacatttcagcctgaccatgaagacggcggaggccaggagacgttcaacgccaccggagtcctcctgagccgcaacggctctgaggtctcggccagcttcgacggctgggccaccgtctcggtgatcgcgctctccaacatcctccacgcctccgccagcctcccgcccgagtaccagaaccgcacggaggggctcctgggggtctggaataacaatccagaggacgacttcaggatgcccaatggctccaccattcccccagggagccctgaggagatgcttttccactttggaatgacctggcagatcaacgggacaggcctccttggcaagaggaatgaccagctgccttccaacttcacccctgttttctactcacaactgcaaaaaaacagctcctgggctgaacatttgatctccaactgtgacggagatagctcatgcatctatgacaccctggccctgcgcaacgcaagcatcggacttcacacgagggaagtcagtaaaaactacgagcaggcgaacgccaccctcaatcagtacccgccctccatcaatggtggtcgtgtgattgaagcctacaaggggcagaccacgctgattcagtacaccagcaatgctgaggatgccaacttcacgctcagagacagctgcaccgacttggagctctttgagaatgggacgttgctgtggacacccaagtcgctggagccattcactctggagattctagcaagaagtgccaagattggcttggcatctgcactccagcccaggactgtggtctgccattgcaatgcagagagccagtgtttgtacaatcagaccagcagggtgggcaactcctccctggaggtggctggctgcaagtgtgacgggggcaccttcggccgctactgcgagggctccgaggatgcctgtgaggagccgtgcttcccgagtgtccactgcgttcctgggaagggctgcgaggcctgccctccaaacctgactggggatgggcggcactgtgcggctctggggagctctttcctgtgtcagaaccagtcctgccctgtgaattactgctacaatcaaggccactgctacatctcccagactctgggctgtcagcccatgtgcacctgccccccagccttcactgacagccgctgcttcctggctgggaacaacttcagtccaactgtcaacctagaacttcccttaagagtcatccagctcttgctcagtgaagaggaaaatgcctccatggcagaagtcaacgcctcggtggcatacagactggggaccctggacatgcgggcctttctccgcaacagccaagtggaacgaatcgattctgcagcaccggcctcgggaagccccatccaacactggatggtcatctcggagttccagtaccgccctcggggcccggtcattgacttcctgaacaaccagctgctggccgcggtggtggaggcgttcttataccacgttccacggaggagtgaggagcccaggaacgacgtggtcttccagcccatctccggggaagacgtgcgcgatgtgacagccctgaacgtgagcacgctgaaggcttacttcagatgcgatggctacaagggctacgacctggtctacagcccccagagcggcttcacctgcgtgtccccgtgcagtaggggctactgtgaccatggaggccagtgccagcacctgcccagtgggccccgctgcagctgtgtgtccttctccatctacacggcctggggcgagcactgtgagcacctgagcatgaaactcgacgcgttcttcggcatcttctttggggccctgggcggcctcttgctgctgggggtcgggacgttcgtggtcctgcgcttctggggttgctccggggccaggttctcctatttcctgaactcagctgaggccttgccttgaaggggcagctgtggcctaggctacctcaagactcacctcatccttaccgcacatttaaggcgccattgcttttgggagactggaaaagggaaggtgactgaaggctgtcaggattctt

SEQ ID NO: 155737 - DNA, 3624 bp, Homo sapiens
  Payload ID: 10597
  Gene Symbol: MUC4
  Gene Name: mucin 4, cell surface associated
  ENST ID: ENST00000627218
  CDS Start-End: 1-413
gaatgacaacaccgtcactgaagacagacggtgggagacgcacagccacatcaccaccccccacaacctcccagaccatcatttccaccattcccagcactgccatgcacacccgctccacagctgcccccatccccatcctgcctgagagaggagtttccctcttcccctatggggcagacgccggggacctggagttcgtcaggaggaccgtggacttcacctccccactcttcaagccggcgactggcttcccccttggctcctctctccgtgattccctctacgcttcacaggccgggaccctgtggccctggtggctccgttctgggacgatgctgacttctccactggtcgggggaccacattttatcaggaatacgagacgttctatggtgaacacagcctgctagtccagcaggccgagtcttggattagaaagatgacaaacaacgggggctacaaggccaggtgggccctaaaggtcacgtgggtcaatgcccacgcctatcctgcccagtggaccctcgggagcaacacctaccaagccatcctctccacggacgggagcaggtcctatgccctgtttctctaccagagcggtgggatgcagtgggacgtggcccagcgctcaggcaacccggtgctcatgggcttctctagtggagatggctatttcgaaaacagcccactgatgtcccagccagtgtgggagaggtatcgccctgatagattcctgaattccaactcaggcctccaagggctgcagttctacaggctacaccgggaagaaaggcccaactaccgtctcgagtgcctgcagtggctgaagagccagcctcggtggcccagctggggctggaaccaggtctcctgcccttgttcctggcagcagggacgacgggacttacgattccaacccgtcagcataggtcgctggggcctcggcagtaggcagctgtgcagcttcacctcttggcgaggaggcgtgtgctgcagctacgggccctggggagagtttcgtgaaggctggcacgtgcagcgtccttggcagttggcccaggaactggagccacagagctggtgctgccgctggaatgacaagccctacctctgtgccctgtaccagcagaggcggccccacgtgggctgtgctacatacaggcccccacagcccgcctggatgttcggggacccccacatcaccaccttggatggtgtcagttacaccttcaatgggctgggggacttcctgctggtcggggcccaagacgggaactcctccttcctgcttcagggccgcaccgcccagactggctcagcccaggccaccaacttcatcgcctttgcggctcagtaccgctccagcagcctgggccccgtcacggtccaatggctccttgagcctcacgacgcaatccgtgtcctgctggataaccagactgtgacatttcagcctgaccatgaagacggcggaggccaggagacgttcaacgccaccggagtcctcctgagccgcaacggctctgaggtctcggccagcttcgacggctgggccaccgtctcggtgatcgcgctctccaacatcctccacgcctccgccagcctcccgcccgagtaccagaaccgcacggaggggctcctgggggtctggaataacaatccagaggacgacttcaggatgcccaatggctccaccattcccccagggagccctgaggagatgcttttccactttggaatgacctggcagatcaacgggacaggcctccttggcaagaggaatgaccagctgccttccaacttcacccctgttttctactcacaactgcaaaaaaacagctcctgggctgaacatttgatctccaactgtgacggagatagctcatgcatctatgacaccctggccctgcgcaacgcaagcatcggacttcacacgagggaagtcagtaaaaactacgagcaggcgaacgccaccctcaatcagtacccgccctccatcaatggtggtcgtgtgattgaagcctacaaggggcagaccacgctgattcagtacaccagcaatgctgaggatgccaacttcacgctcagagacagctgcaccgacttggagctctttgagaatgggacgttgctgtggacacccaagtcgctggagccattcactctggagattctagcaagaagtgccaagattggcttggcatctgcactccagcccaggactgtggtctgccattgcaatgcagagagccagtgtttgtacaatcagaccagcagggtgggcaactcctccctggagctctggggagctctttcctgtgtcagaaccagtcctgccctgtgaattactgctacaatcaaggccactgctacatctcccagactctgggctgtcagcccatgtgcacctgccccccagccttcactgacagccgctgcttcctggctgggaacaacttcagtccaactgtcaacctagaacttcccttaagagtcatccagctcttgctcagtgaagaggaaaatgcctccatggcagaagtcaacgcctcggtggcatacagactggggaccctggacatgcgggcctttctccgcaacagccaagtggaacgaatcgattctgcagcaccggcctcgggaagccccatccaacactggatggtcatctcggagttccagtaccgccctcggggcccggtcattgacttcctgaacaaccagctgctggccgcggtggtggaggcgttcttataccacgttccacggaggagtgaggagcccaggaacgacgtggtcttccagcccatctccggggaagacgtgcgcgatgtgacagccctgaacgtgagcacgctgaaggcttacttcagatgcgatggctacaagggctacgacctggtctacagcccccagagcggcttcacctgcgtgtccccgtgcagtaggggctactgtgaccatggaggccagtgccagcacctgcccagtgggccccgctgcagctgtgtgtccttctccatctacacggcctggggcgagcactgtgagcacctgagcatgaaactcgacgcgttcttcggcatcttctttggggccctgggcggcctcttgctgctgggggtcgggacgttcgtggtcctgcgcttctggggttgctccggggccaggttctcctatttcctgaactcagctgaggccttgccttgaaggggcagctgtggcctaggctacctcaagactcacctcatccttaccgcacatttaaggcgccattgcttttgggagactggaaaagggaaggtgactgaaggctgtcaggattcttcaaggagaatgaatactgggaatcaagacaagactataccttatccataggcgcaggtgcacagggggaggccataaagatcaaacatgcatggatgggtcctcacgcagacacacccacagaaggacactagcctgtgcacgcgcgcgtgcacacacacacacacacacacgagttcataatgtggtgatggccctaagttaagcaaaatgcttctgcacacaaaactctctggtttacttcaaattaactctatttaaataaagtctctctgactttttgtgtctccaaaa

SEQ ID NO: 155738 - DNA, 3829 bp, Homo sapiens
  Payload ID: 10597
  Gene Symbol: MUC4
  Gene Name: mucin 4, cell surface associated
  ENST ID: ENST00000626364
  CDS Start-End: 41-3418
ggagcttccccagggagccagggggacttttgccgcagccatgaagggggcacgctggaggagggtcccctgggtgtccctgagctgcctgtgtctctgcctccttccgcatgtggtcccaggagtttccctcttcccctatggggcagacgccggggacctggagttcgtcaggaggaccgtggacttcacctccccactcttcaagccggcgactggcttcccccttggctcctctctccgtgattccctctacttcacagacaatggccagatcatcttcccagagtcagactaccagattttctcctaccccaacccactcccaacaggcttcacaggccgggaccctgtggccctggtggctccgttctgggacgatgctgacttctccactggtcgggggaccacattttatcaggaatacgagacgttctatggtgaacacagcctgctagtccagcaggccgagtcttggattagaaagatgacaaacaacgggggctacaaggccaggtgggccctaaaggtcacgtgggtcaatgcccacgcctatcctgcccagtggaccctcgggagcaacacctaccaagccatcctctccacggacgggagcaggtcctatgccctgtttctctaccagagcggtgggatgcagtgggacgtggcccagcgctcaggcaacccggtgctcatgggcttctctagtggagatggctatttcgaaaacagcccactgatgtcccagccagtgtgggagaggtatcgccctgatagattcctgaattccaactcaggcctccaagggctgcagttctacaggctacaccgggaagaaaggcccaactaccgtctcgagtgcctgcagtggctgaagagccagcctcggtggcccagctggggctggaaccaggtctcctgcccttgttcctggcagcagggacgacgggacttacgattccaacccgtcagcataggtcgctggggcctcggcagtaggcagctgtgcagcttcacctcttggcgaggaggcgtgtgctgcagctacgggccctggggagagtttcgtgaaggctggcacgtgcagcgtccttggcagttggcccaggaactggagccacagagctggtgctgccgctggaatgacaagccctacctctgtgccctgtaccagcagaggcggccccacgtgggctgtgctacatacaggcccccacagcccgcctggatgttcggggacccccacatcaccaccttggatggtgtcagttacaccttcaatgggctgggggacttcctgctggtcggggcccaagacgggaactcctccttcctgcttcagggccgcaccgcccagactggctcagcccaggccaccaacttcatcgcctttgcggctcagtaccgctccagcagcctgggccccgtcacggtccaatggctccttgagcctcacgacgcaatccgtgtcctgctggataaccagactgtgacatttcagcctgaccatgaagacggcggaggccaggagacgttcaacgccaccggagtcctcctgagccgcaacggctctgaggtctcggccagcttcgacggctgggccaccgtctcggtgatcgcgctctccaacatcctccacgcctccgccagcctcccgcccgagtaccagaaccgcacggaggggctcctgggggtctggaataacaatccagaggacgacttcaggatgcccaatggctccaccattcccccagggagccctgaggagatgcttttccactttggaatgacctggcagatcaacgggacaggcctccttggcaagaggaatgaccagctgccttccaacttcacccctgttttctactcacaactgcaaaaaaacagctcctgggctgaacatttgatctccaactgtgacggagatagctcatgcatctatgacaccctggccctgcgcaacgcaagcatcggacttcacacgagggaagtcagtaaaaactacgagcaggcgaacgccaccctcaatcagtacccgccctccatcaatggtggtcgtgtgattgaagcctacaaggggcagaccacgctgattcagtacaccagcaatgctgaggatgccaacttcacgctcagagacagctgcaccgacttggagctctttgagaatgggacgttgctgtggacacccaagtcgctggagccattcactctggagattctagcaagaagtgccaagattggcttggcatctgcactccagcccaggactgtggtctgccattgcaatgcagagagccagtgtttgtacaatcagaccagcagggtgggcaactcctccctggaggtggctggctgcaagtgtgacgggggcaccttcggccgctactgcgagggctccgaggatgcctgtgaggagccgtgcttcccgagtgtccactgcgttcctgggaagggctgcgaggcctgccctccaaacctgactggggatgggcggcactgtgcggctctggggagctctttcctgtgtcagaaccagtcctgccctgtgaattactgctacaatcaaggccactgctacatctcccagactctgggctgtcagcccatgtgcacctgccccccagccttcactgacagccgctgcttcctggctgggaacaacttcagtccaactgtcaacctagaacttcccttaagagtcatccagctcttgctcagtgaagaggaaaatgcctccatggcagaagtcaacgcctcggtggcatacagactggggaccctggacatgcgggcctttctccgcaacagccaagtggaacgaatcgattctgcagcaccggcctcgggaagccccatccaacactggatggtcatctcggagttccagtaccgccctcggggcccggtcattgacttcctgaacaaccagctgctggccgcggtggtggaggcgttcttataccacgttccacggaggagtgaggagcccaggaacgacgtggtcttccagcccatctccggggaagacgtgcgcgatgtgacagccctgaacgtgagcacgctgaaggcttacttcagatgcgatggctacaagggctacgacctggtctacagcccccagagcggcttcacctgcgtgtccccgtgcagtaggggctactgtgaccatggaggccagtgccagcacctgcccagtgggccccgctgcagctgtgtgtccttctccatctacacggcctggggcgagcactgtgagcacctgagcatgaaactcgacgcgttcttcggcatcttctttggggccctgggcggcctcttgctgctgggggtcgggacgttcgtggtcctgcgcttctggggttgctccggggccaggttctcctatttcctgaactcagctgaggccttgccttgaaggggcagctgtggcctaggctacctcaagactcacctcatccttaccgcacatttaaggcgccattgcttttgggagactggaaaagggaaggtgactgaaggctgtcaggattcttcaaggagaatgaatactgggaatcaagacaagactataccttatccataggcgcaggtgcacagggggaggccataaagatcaaacatgcatggatgggtcctcacgcagacacacccacagaaggacactagcctgtgcacgcgcgcgtgcacacacacacacacacacacgagttcataatgtggtgatggccctaagttaagcaaaatgcttctgcacacaaaactctctggtttacttcaaattaactctatttaaataaagtctctctgactttttgtgtctccaaaa

SEQ ID NO: 155739 - DNA, 3806 bp, Homo sapiens
  Payload ID: 10597
  Gene Symbol: MUC4
  Gene Name: mucin 4, cell surface associated
  ENST ID: ENST00000630616
  CDS Start-End: 1-524
ctctgaagatggaaacaccaggaatgacaacaccgtcactgaagacagacggtgggagacgcacagccacatcaccaccccccacaacctcccagaccatcatttccaccattcccagcactgccatgcacacccgctccacagctgcccccatccccatcctgcctgagagaggtgaggccatacaggagtttccctcttcccctatggggcaggcgccggggacctggagttcgtcaggaggaccgtggacttcacctccccactcttcaagccggcgactggcttcccccttggctcctctctccgtgattccctctacttcacagacaatggccagatcatcttcccagagtcagactaccagattttctcctaccccaacccactcccaacaggcttcacaggccgggaccctgtggccctggtggctccgttctgggacgatgctgacttctccactggtcgggggaccacattttatcaggaatacgagacgttctatggtgaacacagcctgctagtccagcaggccgagtcttggattagaaagatgacaaacaacgggggctacaaggccaggtgggccctaaaggtcacgtgggtcaatgcccacgcctatcctgcccagtggaccctcgggagcaacacctaccaagccatcctctccacggacgggagcaggtcctatgccctgtttctctaccagagcggtgggatgcagtgggacgtggcccagcgctcaggcaacccggtgctcatgggcttctctaggcctccaagggctgcagttctacaggctacaccgggaagaaaggcccaactaccgtctcgagtgcctgcagtggctgaagagccagcctcggtggcccagctggggctggaaccaggtctcctgcccttgttcctggcagcagggacgacgggacttacgattccaacccgtcagcataggtcgctggggcctcggcagtaggcagctgtgcagcttcacctcttggcgaggaggcgtgtgctgcagctacgggccctggggagagtttcgtgaaggctggcacgtgcagcgtccttggcagttggcccaggaactggagccacagagctggtgctgccgctggaatgacaagccctacctctgtgccctgtaccagcagaggcggccccacgtgggctgtgctacatacaggcccccacagcccgcctggatgttcggggacccccacatcaccaccttggatggtgtcagttacaccttcaatgggctgggggacttcctgctggtcggggcccaagacgggaactcctccttcctgcttcagggccgcaccgcccagactggctcagcccaggccaccaacttcatcgcctttgcggctcagtaccgctccagcagcctgggccccgtcacggtccaatggctccttgagcctcacgacgcaatccgtgtcctgctggataaccagactgtgacatttcagcctgaccatgaagacggcggaggccaggagacgttcaacgccaccggagtcctcctgagccgcaacggctctgaggtctcggccagcttcgacggctgggccaccgtctcggtgatcgcgctctccaacatcctccacgcctccgccagcctcccgcccgagtaccagaaccgcacggaggggctcctgggggtctggaataacaatccagaggacgacttcaggatgcccaatggctccaccattcccccagggagccctgaggagatgcttttccactttggaatgacctggcagatcaacgggacaggcctccttggcaagaggaatgaccagctgccttccaacttcacccctgttttctactcacaactgcaaaaaaacagctcctgggctgaacatttgatctccaactgtgacggagatagctcatgcatctatgacaccctggccctgcgcaacgcaagcatcggacttcacacgagggaagtcagtaaaaactacgagcaggcgaacgccaccctcaatcagtacccgccctccatcaatggtggtcgtgtgattgaagcctacaaggggcagaccacgctgattcagtacaccagcaatgctgaggatgccaacttcacgctcagagacagctgcaccgacttggagctctttgagaatgggacgttgctgtggacacccaagtcgctggagccattcactctggagattctagcaagaagtgccaagattggcttggcatctgcactccagcccaggactgtggtctgccattgcaatgcagagagccagtgtttgtacaatcagaccagcagggtgggcaactcctccctggaggtggctggctgcaagtgtgacgggggcaccttcggccgctactgcgagggctccgaggatgcctgtgaggagccgtgcttcccgagtgtccactgcgttcctgggaagggctgcgaggcctgccctccaaacctgactggggatgggcggcactgtgcggctctggggagctctttcctgtgtcagaaccagtcctgccctgtgaattactgctacaatcaaggccactgctacatctcccagactctgggctgtcagcccatgtgcacctgccccccagccttcactgacagccgctgcttcctggctgggaacaacttcagtccaactgtcaacctagaacttcccttaagagtcatccagctcttgctcagtgaagaggaaaatgcctccatggcagaagtcaacgcctcggtggcatacagactggggaccctggacatgcgggcctttctccgcaacagccaagtggaacgaatcgattctgcagcaccggcctcgggaagccccatccaacactggatggtcatctcggagttccagtaccgccctcggggcccggtcattgacttcctgaacaaccagctgctggccgcggtggtggaggcgttcttataccacgttccacggaggagtgaggagcccaggaacgacgtggtcttccagcccatctccggggaagacgtgcgcgatgtgacagccctgaacgtgagcacgctgaaggcttacttcagatgcgatggctacaagggctacgacctggtctacagcccccagagcggcttcacctgcgtgtccccgtgcagtaggggctactgtgaccatggaggccagtgccaacacctgcccagtgggccccgctgcagctgtgtgtccttctccatctacacggcctggggcgagcactgtgagcacctgagcatgaaactcgacgcgttcttcggcatcttctttggggccctgggcggcctcttgctgctgggggtcgggacgttcgtggtcctgcgcttctggggttgctccggggccaggttctcctatttcctgaactcagctgaggccttgccttgaaggggcagctgtggcctaggctacctcaagactcacctcatccttaccgcacatttaaggcgccattgcttttgggagactggaaaagggaaggtgactgaaggctgtcaggattcttcaaggagaatgaatactgggaatcaagacaagactataccttatccataggcgcaggtgcacagggggaggccataaagatcaaacatgcatggatgggtcctcacgcagacacacccacagaaggacactagcctgtgcacgcgcgcgtgcacacacacacacacacacacgagttcataatgtggtgatggccctaagttaagcaaaatgcttctgcacacaaaactctctggtttacttcaaattaactctatttaaataaagtctctctgactttttgtgtcttcaaaa

SEQ ID NO: 155740 - DNA, 16015 bp, Homo sapiens; identical to SEQ ID NO: 155694
  Payload ID: 10597
  Gene Symbol: MUC4
  Gene Name: mucin 4, cell surface associated
  ENST ID: ENST00000626878
  CDS Start-End: 1-13253

SEQ ID NO: 155741 - DNA, 16199 bp, Homo sapiens
  Payload ID: 10597
  Gene Symbol: MUC4
  Gene Name: mucin 4, cell surface associated
  ENST ID: ENST00000629793
  CDS Start-End: 1-13121
gaaccacagaggacacattaataactggaagtaaaactgctgccccagtcacctcaacaggctcaacaacagcgacactagagggacaatcaactgcagcttcttcaaggacctctaatcaggacatatcagcttcatctcagaaccaccagactaagagcacggagaccaccagcaaagctcaaaccgacaccctcacgcagatgatgacatcaactcttttttcttccccaagtgtacacaatgtgatggagacagctcctccagatgaaatgaccacatcatttccctccagtgtcaccaacacactcatgatgacatcaaagactataacaatgacaacctccacagactccactcttggaaacacagaagagacatcaacagcaggaactgaaagttctaccccagtgacctcagcagtctcaataacagctggacaggaaggacaatcacgaacaacttcctggaggacctctatccaagacacatcagcttcttctcagaaccactggactcggagcacgcagaccaccagggaatctcaaaccagcaccctaacacacagaaccacttcaactccttctttctctccaagtgtacacaatgtgacagggactgtttctcagaagacatctccttcaggtgaaacagctacctcatccctctgtagtgtcacaaacacatccatgatgacatcagagaagataacagtgacaacctccacaggctccactcttggaaacccaggggagacatcatcagtacctgttactggaagtcttatgccagtcacctcagcagccttagtaacatttgatccagaaggacaatcaccagcaactttctcaaggacttctactcaggacacaacagctttttctaagaaccaccagactcagagcgtggagaccaccagagtatctcaaatcaacaccctcaacaccctcacaccggttacaacatcaactgttttatcctcaccaagtggattcaacccaagtggaacagtttctcaggagacattcccttctggtgaaacaaccacctcatccccttccagtgtcagcaatacattcctggtaacatcaaaggtgttcagaatgccaacctccagagactctactcttggaaacacagaggagacatcactatctgtaagtggaaccatttctgcaatcacttccaaagtttcaaccatatggtggtcagacactctgtcaacagcactctcccccagttctctacctccaaaaatatccacagctttccacacccagcagagtgaaggtgcagagaccacaggacggcctcatgagaggagctcattctctccaggtgtgtctcaagaaatatttactctacatgaaacaacaacatggccttcctcattctccagcaaaggccacacaacttggtcacaaacagaactgccctcaacatcaacaggtgctgccactaggcttgtcacaggaaatccatctacagggacagctggcactattccaagggtcccctctaaggtctcagcaataggggaaccaggagagcccaccacatactcctcccacagcacaactctcccaaaaacaacaggggcaggcgcccagacacaatggacacaagaaacggggaccactggagaggctcttctcagcagcccaagctacagtgtgactcagatgataaaaacggccacatccccatcttcttcacctatgctggatagacacacatcccaacaaattacaacggcaccatcaacaaatcattcaacaatacattccacaagcacctctcctcaggaatcaccagctgtttcccaaaggggtcacactcaagccccgcagaccacacaagaatcacaaaccacgaggtccgtctcccccatgactgacaccaagacagtcaccaccccaggttcttccttcacagccagtgggcactcgccctcagaaattgttcctcaggacgcacccaccataagtgcagcaacaacctttgccccagctcccaccggggatggtcacacaacccaggccccgaccacagcactgcaggcagcacccagcagccatgatgccaccctggggccctcaggaggcacgtcactttccaaaacaggtgcccttactctggccaactctgtagtgtcaacaccagggggcccagaaggacaatggacatcagcctctgccagcacctcacctgacacagcagcagccatgacccatacccaccaggctgagagcacagaggcctctggacaaacacagaccagcgaaccggcctcctcagggtcacgaaccacctcagcgggcacagctaccccttcctcatccggggcgagtggcacaacaccttcaggaagcgaaggaatatccacctcaggagagacgacaaggttttcatcaaacccctccagggacagtcacacaacccagtcaacaaccgaattgctgtccgcctcagccagtcatggtgccatcccagtaagcacaggaatggcgtcttcgatcgtccccggcacctttcatcccaccctctctgaggcctccactgcagggagaccgacaggacagtcaagcccaacttctcccagtgcctctcctcaggagacagccgccatttcccggatggcccagactcagaggacaagaaccagcagagggtctgacactatcagcctggcgtcccaggcaaccgacaccttctcaacagtcccacccacacctccatcgatcacatccactgggcttacatctccacaaaccgagacccacactctgtcaccttcagggtctggtaaaaccttcaccacggccctcatcagcaacgccacccctcttcctgtcacctacgcttcctcggcatccacaggtcacaccacccctcttcatgtcaccgatgcttcctcagtatccacaggtcacgccacccctcttcctgtcaccagcccttcctcagtatccacaggtcacaccacccctcttcctgtcaccgacacttcctcagaatccacaggtcacgtcacccctcttcctgtcaccagcttttcctcagcatccacaggtgacagcacccctcttcctgtcactgacacttcctcagcatccacaggtcacgtcacccctcttcctgtcaccagcctttcctcagcatccacaggtgacaccacccctcttcctgtcactgacacttcctcagcatccacaggtcacgccacctctcttcctgtcaccgacacttcctcagtatccacaggtcacaccacccctcttcctgtcaccgacacttcctcagcatccacaggtcacgccacctctcttcctgtcaccgacacttcctcagtatccacaggtcacaccacccctcttcatgtcactgatgcttcctcagcatccacaggtcaggccacccctcttcctgtcaccagcctttcctcagtatccacaggtgacaccacgcctcttcctgtcactagcccttcctcagcatccacaggtcacgccacccctcttcttgtcaccgacacttcctcagcatccacaggacacgccacccctcttcctgtcaccgacgcttcctcagtgtccacagatcacgccacctctcttcctgtaaccatcccttccgcagcatccacaggtcacaccacccctcttcctgtcaccgacacttcctcagcatccacaggtcaggccacctctcttcttgtcaccgacacttcctcagtatccacaggtgacaccacgcctcttcctgtcactagcacttcctcagcatccacaggtcacgtcactcctcttcatgtcaccagcccttcctcagcatccacaggtcacgccacccctcttcctgtcaccagcctttcctcagcatccacaggtgacaccatgcctcttcctgtcactagcccttcctcagcatccacaggtgacaccacccctcttcctgtcaccgacgcttcctcagtatccacaggtcacaccacccctcttcatgtcactgatgcttcctcagcatccacaggtcaggccacccctcttcctgtcaccagcctttcctcagtatccacaggtgacaccacgcctcttcctgtcactagcccttcctcagcatccacaggtcacgccacccctcttcttgtcaccgacacttcctcagcatccacaggacacgccacccctcttcctgtcaccgacgcttcctcagtgtccacagatcacgccacctctcttcctgtaaccatcccttccgcagcatccacaggtcacaccacccctcttcctgtcaccgacacttcctcagcatccacaggtcaggccacctctcttcttgtcaccgacacttcctcagtatccacaggtgacaccacgcctcttcctgtcactagcacttcctcagcatccacaggtcacgtcactcctcttcatgtcaccagcccttcctcagcatccacaggtcacgccacccctcttcctgtcaccagcctttcctcagcatccacaggtgacaccatgcctcttcctgtcactagcccttcctcagcatccacaggtgacaccacccctcttcctgtcaccgacgcttcctcagtatccacaggtcacaccacccctcttcctgtcaccagcccttcctcagcatctacaggtcacaccacccctcttcctgtcaccgacacttcctcagcatccaaaggtgacaccacccctcttcctgtcaccagcccttcctcagcatctacaggtcacaccacccctcttcctgtcaccgacacttcctcagcatccacaggtgacaccacccctcttcctgtcaccaatgcttcctcattatccacaggtcacgccacccctcttcatgtcaccagcccttcctcagcatccacaggtcacgccacccctcttcctgtcaccagcacttcctcagcatccaccggtcacgccacccctcttcctgtcaccggcctttcctcagctaccacagatgacaccacccgtcttcctgtcaccgacgtttcctcggcatccacaggtcaggccacccctcttcctgtcaccagcctttcctcagtatccacaggtgacaccacgcctcttcctgtcactagcccttcctcagcatccacaggtcacgccagccctcttcttgtcactgacgcttcctcagcatccacaggtcaggccacccctcttcctgtcaccgacacttcctcagtatccacagctcacgccaccccacttcctgtcaccggcctttcttcagcttccacagatgacaccacccgtcttcctgtcaccgacgtttcctcggcatccacaggtcaggccatccctcttcctgtcaccagcccttcctcagcatccacaggtgacaccacccctcttcctgtcaccgacgcttcctcagcatccacaggtgacaccacctctcttcctgtcaccatcccttcctcagcatcttcaggtcacaccacctctcttcctgtcaccgacgcttcctcagtgtccacaggtcacgccacctctcttcttgtcaccgacgcttcctcagtatccacaggtgacaccacccctcttcctgtcaccgacactaactcagcatccacaggtgacaccacccctcttcatgtcaccgacgcttcctcagtatccacaggtcacgccacctctcttcctgtcaccagcctttcctcagcatccacaggtgacaccacgcctcttcctgtcactagcccttcctcagcatcctcaggtcacaccacccctcttcctgtcaccgacgcttcctcagtacccacaggtcacgccacctctcttcctgtcaccgacgcttcctcagtgtccacaggtcacgccacccctcttcctgtcaccgacgcttcctcagtgtccacaggtcatgccacccctcttccggtcaccgacacttcctcagtatctacaggacaggccacccctcttcctgtcaccagcctttcctcagcatccactggtgacaccacgccgcttcctgtcaccgatacttcctcagcatccacaggtcaggacacccctcttcctgtcaccagcctttcctcagtatccacaggtgacaccacgcctcttcctgtcactaacccttcctcagcatccacaggtcacgccacccctcttcttgtcaccgacgcttcctcaatatccacaggtcacgccacctctcttcttgtcaccgacgcttcctcagtatccacaggtcacgccaccgctcttcatgacaccgatgcttcctcattatccacaggggacaccacccctcttcctgtcaccagcccttcctcaacatccacaggtgacaccacccctcttcctgtcaccgaaacttcctcagtatccacaggtcacgccacctctcttcctgtcaccgacacttcctcagcatccacaggtcacgccacctctcttcctgtcaccgacacttcctcagcatccacaggtcacgccacccctcttcctgtcaccgacacttcctcagcatccacaggtcaggccacccctcttcctgtcaccagcccttcctcagcatccacaggtcacgccatccctcttcttgtcaccgacacttcctcagcatccacaggacaggccacccctcttcctgtcaccagcctttcctcagcatccacaggtgacaccacccctcttcctgtcaccgacgcttcctcagtgtccacaggtcacgccacctctcttcctgtcaccagcctttcctcagtatccacaggtgacaccactcctcttcctgtcactagcccttcctcagcatccacaggtcacgccacccctcttcatgtcaccgacgcttcctcagcatccacaggtcacgccacccctcttcctgtcaccagcctttcctcagcatccacaggtgacaccacgcctcttcctgtcactagcccttcctcagcatccacaggtcacgccacccctcttcatgtcaccgacgcttcctcagtatccacaggtgacaccacccctcttcctgtcaccagctcttcctcagcatcctcaggtcacaccacccctcttcctgtcaccgacgcttcctcagcatccacaggtgacaccacccctcttcctgtcaccgacacttcctcagcatccacaggtcacgccacccatcttcctgtcaccggcctttcctcagcttccacaggtgacaccacccgtcttcctgtcaccaacgtttcctcggcatccacaggtcatgccacccctcttcctgtcaccagcacttcctcagcatccacaggtgacaccacccctcttcctggcaccgacacttcctcagtatccacaggtcacaccacccctcttcttgtcaccgacgcttcgtcagtatccacaggtgacaccacccgtcttcctgtcaccagcccttcctcagcatctacaggtcacaccacccctctacctgtcaccgacactccctcagcatccacaggtgacaccacccctcttcctgtcaccaatgcttcctcattatccacacgtcacgccacctctcttcatgtcaccagcccttcctcagcatccacaggtcacgccacctctcttcctgtcaccgacacttccgcagcatccacaggtcacgccacccctcttcctgtcaccagcacttcctcagcatccacaggtgacaccacccctcttcctgtcaccgacacttactcagcatccacaggtcaggccacccctcttcctgtcaccagcctttcctcagtatccacaggtgacaccacgcctcttcctgtcactagcccttcctcagcatccacaggtcacgccactcctcttcttgtcaccgacgcttcctcagcatccacaggtcaggccacccctcttcctgtcaccagcctttcctcagtatccacaggtgacaccacgcctcttcctgtcactagcccttcctcagcatccaccggtcatgccacctctcttcctgtcaccgacacttcctcagcatccacaggtgacaccacctctcttcctgtcaccgacacttcctcagcatacacaggtgacaccacctctcttcctgtcaccgacacttcctcatcatccacaggtgacaccacccctcttcttgtcaccgagacttcctcagtatccacaggtgacaccacccctcttcctgtcaccgacacttcctcagcatccacaggtcacgccacccctcttcctgtcaccaacacttcctcagtatccacaggtcacgccacccctcttcatgtcaccagcccttcctcagcatccacaggtcacaccacccctcttcctgtcaccgacgcttcgtcagtgtccacaggtcacgccacctctcttcctgtcaccgacgcttcctcagtgttcacaggtcatgccacctctcttcctgtcaccatcccttcctcagcatcctcaggtcacaccacccctcttcctgtcaccgacgcttcctcagtgtccacaggtcacgccacctctcttcctgtcaccgacgcttcctcagtgtccacaggtcatgccacccctcttcctgtcaccgacgcttcctcagtgtccacaggtcacgctacccctcttcctctcaccagcctttcctcagtatccacaggtgacaccacgcctcttcctgtcaccgacacttcctcagcatccacaggtcaggccacccctcttcctgtcaccagcctttcctcagtatccacaggtgacaccacccctcttcctgtcaccgacacttcctcagcatccacaggtcacgccacctctcttcctgtcaccgacacttcctcagcatccacaggtcacgccacccctcttcctgacaccgacacttcctcagcatccacaggtcacgccacccttcttcctgtcaccgacacttcctcagcatccataggtcacgccacctctcttcctgtcaccgacacttcctcaatatccacaggtcacgccacccctcttcatgtcaccagcccttcctcagcatccaccggtcacgccaccccgcttcctgtcaccgacacttcctcagcatccacaggtcacgccaaccctcttcatgtcaccagcccttcctcagcatccaccggtcacgccaccccgcttcctgtcaccgacacttcctcagcatccacaggtcacgccacccctcttcctgtcaccagcctttcctcagtatccacaggtgacaccacgcctcttcctgtcactagcccttcctcagcatccacaggtcacaccacccctcttcctgtcaccgacacttcctcagcatccacaggtcaggccaccgctcttcctgtcaccagcacttcctcagcatccacaggtgacaccacccctcttcctgtcaccgacacttcctcagcatccacaggtcaggccacccctcttcctgtcaccagcctttcctcagtatccacaggtgacaccacgcctcttcctgtcactagcccttcctcagcatccacaggtcacgccactcctcttcttgtcaccgacgcttcctcagcatccacaggtcaggccacccctcttcctgtcaccagcctttcctcagtatccacaggtgacaccacgcctcttcctgtcactagcccttcctcagcatccaccggtcatgccacctctcttcctgtcaccgacacttcctcagcatccacaggtgacaccacctctcttcctgtcaccgacacttcctcagcatacacaggtgacaccacctctcttcctgtcaccgacacttcctcatcatccacaggtgacaccacccctcttcttgtcaccgagacttcctcagtatccacaggtcacgccactcctcttcttgtcaccgacgcttcctcagcatccacaggtcacgccacccctcttcatgtcaccagcccttcctcagcatccacaggtgacaccacccctgtgcctgtcaccgacacttcctcagtatccacaggtcacgccacccctcttcctgtcaccggcctttcctcagcttccacaggtgacaccacccgtcttcctgtcaccgacatttcctcggcatccacaggtcaggccacccctcttcctgtcaccaacacttcctcagtatccacaggtgacaccatgcctcttcctgtcactagcccttcctcagcatccacaggtcacgccacccctcttcctgtcaccagcacttcctcagcatccaccggtcacgccacccctgttcctgtcaccagcacttcctcagcatctacaggtcacaccacccctcttcctgtcaccgacacttcctcagcatccacaggtgacaccacccctcttcctgtcaccagcccttcctcagcatctacaggtcacaccacccctcttcatgtcaccatcccttcctcagcatccacaggtgacaccagcactcttcctgtcaccggcgcttcctcagcatccaccggtcacgccacccctcttcctgtcaccgacacttcctcagtatccaccggtcacgccacgcctcttcctgtcaccagcctttcctcagtatccacaggtgacaccacccctcttcctgtcaccgacgcttcctcggcatccacaggtcaggccacccctcttcctgtcaccagcctttcctcagtatccacaggtgacaccacccctcttcttgtcaccgacgcttcctcagtatccacaggtcacgccacccctcttcctgtcaccgacacttcctcagcatccacaggtgacaccacccgtcttcctgtcacggacacttcctcagcatccacaggtcaggccacccctcttcctgtcaccagcctttcctcagtatccacaggtgacaccacccctcttcttgtcaccgacgcttcctcagtatccacaggtcacgccacccctcttcctgtcaccgacacttcctcagcatccacaggtgacaccacccgtcttcctgtcacggacacttcctcagcatccacaggtcaggccacccctcttcctgtcaccatcccttcctcatcatcctcaggtcacaccacccctcttcctgtcaccagcacttcctcagtatctacaggtcacgtcacccctcttcatgtcaccagcccttcctcagcatccacaggtcacgtcacccctcttcctgtcaccagcacttcctcagcatccacaggtcacgccacccctcttcttgtcaccgacgcttcctcagtgtccacaggtcacgccacgcctcttcctgtcaccgacgcttcctcagcatccacaggtgacaccacccctcttcctgtcaccgacacttcctcagcatccacaggtcaggccacccctcttcctgtcaccagcctttcctcagtatccacaggtgacaccacccctcttcctgtcaccgacgcttcctcagcatccacaggtcacgccacccctcttcctgtcaccatcccttcctcagtatccacaggtgacaccatgcctcttcctgtcactagcccttcctcagcatccacaggtcacgccacccctcttcctgttaccggcctttcctcagcttccacaggtgacaccacccctcttcctgtcaccgacacttcctcagcatccacacgtcacgccacccctcttcctgtcaccgacacttcctcagcttccacagatgacaccacccgtcttcctgtcaccgacgtttcctcggcatccacaggacatgccacccctcttcctgtcaccagcacttcctcagcatccacaggtgacaccacccctcttcctgtcaccgacacttcctcagtatccacaggtcacgccacctctcttcctgtcaccagccgttcctcagcatccacaggtcacgccaccccccttcctgtcaccgacacttcctcagtatccacaggtcacgccacccctcttcctgtcaccagcacttcctcagtatctacaggtcacgccacccctcttcctgtcaccagcccttcctcagcatccacaggtcacgccacccctgttcctgtcaccagcacttcctcagcatccacaggtgacaccacccctcttcctgtcaccaatgcttcctcattatccacaggtcacgccacccctcttcatgtcaccagcccttcctcagcatccagaggtgacaccagcactcttcctgtcaccgatgcttcctcagcatccaccggtcacgccacccctcttcctctcaccagcctttcctcagtatccacaggtgacaccacgcctcttcctgtcaccgacacttcctctgcatccacaggtcaggccacccctcttcctgtcaccagcctttcctcagtatccacaggtgacaccacgcctcttcctgtcaccatcccttcctcagcatcctcaggtcacaccacctctcttcctgtcaccgacgcttcctcagtgtccacaggtcacggcacccctcttcctgtcaccagcacttcctcagcatccacaggtgacaccacccctcttcctgtcaccgacacttcctcagcatccacaggtcacgccacccctcttcctgtcaccgacacttcctcagcatccacaggtcacgccacccctcttcctgtcaccagcctttcctcagtatccacaggtcacgccacccctcttgctgtcagcagtgctacctcagcttccacagtatcctcggactcccctctgaagatggaaacaccaggaatgacaacaccgtcactgaagacagacggtgggagacgcacagccacatcaccaccccccacaacctcccagaccatcatttccaccattcccagcactgccatgcacacccgctccacagctgcccccatccccatcctgcctgagagaggagtttccctcttcccctatggggcaggcgccggggacctggagttcgtcaggaggaccgtggacttcacctccccactcttcaagccggcgactggcttcccccttggctcctctctccgtgattccctctacgcttcacaggccgggaccctgtggccctggtggctccgttctgggacgatgctgacttctccactggtcgggggaccacattttatcaggaatacgagacgttctatggtgaacacagcctgctagtccagcaggccgagtcttggattagaaagatgacaaacaacgggggctacaaggccaggtgggccctaaaggtcacgtgggtcaatgcccacgcctatcctgcccagtggaccctcgggagcaacacctaccaagccatcctctccacggacgggagcaggtcctatgccctgtttctctaccagagcggtgggatgcagtgggacgtggcccagcgctcaggcaacccggtgctcatgggcttctctagtggagatggctatttcgaaaacagcccactgatgtcccagccagtgtgggagaggtatcgccctgatagattcctgaattccaactcaggcctccaagggctgcagttctacaggctacaccgggaagaaaggcccaactaccgtctcgagtgcctgcagtggctgaagagccagcctcggtggcccagctggggctggaaccaggtctcctgcccttgttcctggcagcagggacgacgggacttacgattccaacccgtcagcataggtcgctggggcctcggcagtaggcagctgtgcagcttcacctcttggcgaggaggcgtgtgctgcagctacgggccctggggagagtttcgtgaaggctggcacgtgcagcgtccttggcagttggcccaggaactggagccacagagctggtgctgccgctggaatgacaagccctacctctgtgccctgtaccagcagaggcggccccacgtgggctgtgctacatacaggcccccacagcccgcctggatgttcggggacccccacatcaccaccttggatggtgtcagttacaccttcaatgggctgggggacttcctgctggtcggggcccaagacgggaactcctccttcctgcttcagggccgcaccgcccagactggctcagcccaggccaccaacttcatcgcctttgcggctcagtaccgctccagcagcctgggccccgtcacggtccaatggctccttgagcctcacgacgcaatccgtgtcctgctggataaccagactgtgacatttcagcctgaccatgaagacggcggaggccaggagacgttcaacgccaccggagtcctcctgagccgcaacggctctgaggtctcggccagcttcgacggctgggccaccgtctcggtgatcgcgctctccaacatcctccacgcctccgccagcctcccgcccgagtaccagaaccgcacggaggggctcctgggggtctggaataacaatccagaggacgacttcaggatgcccaatggctccaccattcccccagggagccctgaggagatgcttttccactttggaatgacctggcagatcaacgggacaggcctccttggcaagaggaatgaccagctgccttccaacttcacccctgttttctactcacaactgcaaaaaaacagctcctgggctgaacatttgatctccaactgtgacggagatagctcatgcatctatgacaccctggccctgcgcaacgcaagcatcggacttcacacgagggaagtcagtaaaaactacgagcaggcgaacgccaccctcaatcagtacccgccctccatcaatggtggtcgtgtgattgaagcctacaaggggcagaccacgctgattcagtacaccagcaatgctgaggatgccaacttcacgctcagagacagctgcaccgacttggagctctttgagaatgggacgttgctgtggacacccaagtcgctggagccattcactctggagattctagcaagaagtgccaagattggcttggcatctgcactccagcccaggactgtggtctgccattgcaatgcagagagccagtgtttgtacaatcagaccagcagggtgggcaactcctccctggaggtggctggctgcaagtgtgacgggggcaccttcggccgctactgcgagggctccgaggatgcctgtgaggagccgtgcttcccgagtgtccactgcgttcctgggaagggctgcgaggcctgccctccaaacctgactggggatgggcggcactgtgcggctctggggagctctttcctgtgtcagaaccagtcctgccctgtgaattactgctacaatcaaggccactgctacatctcccagactctgggctgtcagcccatgtgcacctgccccccagccttcactgacagccgctgcttcctggctgggaacaacttcagtccaactgtcaacctagaacttcccttaagagtcatccagctcttgctcagtgaagaggaaaatgcctccatggcagaagtcaacgcctcggtggcatacagactggggaccctggacatgcgggcctttctccgcaacagccaagtggaacgaatcgattctgcagcaccggcctcgggaagccccatccaacactggatggtcatctcggagttccagtaccgccctcggggcccggtcattgacttcctgaacaaccagctgctggccgcggtggtggaggcgttcttataccacgttccacggaggagtgaggagcccaggaacgacgtggtcttccagcccatctccggggaagacgtgcgcgatgtgacagccctgaacgtgagcacgctgaaggcttacttcagatgcgatggctacaagggctacgacctggtctacagcccccagagcggcttcacctgcgtgtccccgtgcagtaggggctactgtgaccatggaggccagtgccaacacctgcccagtgggccccgctgcagctgtgtgtccttctccatctacacggcctggggcgagcactgtgagcacctgagcatgaaactcgacgcgttcttcggcatcttctttggggccctgggcggcctcttgctgctgggggtcgggacgttcgtggtcctgcgcttctggggttgctccggggccaggttctcctatttcctgaactcagctgaggccttgccttgaaggggcagctgtggcctaggctacctcaagactcacctcatccttaccgcacatttaaggcgccattgcttttgggagactggaaaagggaaggtgactgaaggctgtcaggattctt

SEQ ID NO: 155742 - DNA, 3714 bp, Homo sapiens; identical to SEQ ID NO: 155679
  Payload ID: 10597
  Gene Symbol: MUC4
  Gene Name: mucin 4, cell surface associated
  ENST ID: ENST00000629031
  CDS Start-End: 1-434

SEQ ID NO: 155743 - DNA, 16043 bp, Homo sapiens; identical to SEQ ID NO: 155693
  Payload ID: 10597
  Gene Symbol: MUC4
  Gene Name: mucin 4, cell surface associated
  ENST ID: ENST00000625421
  CDS Start-End: 1-13247

SEQ ID NO: 155744 - DNA, 22187 bp, Homo sapiens
  Payload ID: 10597
  Gene Symbol: MUC4
  Gene Name: mucin 4, cell surface associated
  ENST ID: ENST00000627603
  CDS Start-End: 73-19425
gtctgctcctcacactgcagctgctgggccgtggagcttccccagggagccagggggacttttgccgcagccatgaagggggcacgctggaggagggtcccctgggtgtccctgagctgcctgtgtctctgcctccttccgcatgtggtcccaggaaccacagaggacacattaataactggaagtaaaactcctgccccagtcacctcaacaggctcaacaacagcgacactagagggacaatcaactgcagcttcttcaaggacctctaatcaggacatatcagcttcatctcagaaccaccagactaagagcacggagaccaccagcaaagctcaaaccgacaccctcacgcagatgatgacatcaactcttttttcttccccaagtgtacacaatgtgatggagactgttacgcaggagacagctcctccagatgaaatgaccacatcatttccctccagtgtcaccaacacactcatgatgacatcaaagactataacaatgacaacctccacagactccactcttggaaacacagaagagacatcaacagcaggaactgaaagttctaccccagtgacctcagcagtctcaataacagctggacaggaaggacaatcacgaacaacttcctggaggacctctatccaagacacatcagcttcttctcagaaccactggactcggagcacgcagaccaccagggaatctcaaaccagcaccctaacacacagaaccacttcaactccttctttctctccaagtgtacacaatgtgacagggactgtttctcagaagacatctccttcaggtgaaacagctacctcatccctctgtagtgtcacaaacacatccatgatgacatcagagaagataacagtgacaacctccacaggctccactcttggaaacccaggggagacatcatcagtacctgttactggaagtcttatgccagtcacctcagcagccttagtaacagttgatccagaaggacaatcaccagtaactttctcaaggacttctactcaggacacaacagctttttctaagaaccaccagactcagagcgtggagaccaccagagtatctcaaatcaacaccctcaacaccctcacaccggttacaacatcaactgttttatcctcaccaagtggattcaacccaagtggaacagtttctcaggagacattcccttctggtgaaacaaccatctcatccccttccagtgtcagcaatacattcctggtaacatcaaaggtgttcagaatgccaatctccagagactctactcttggaaacacagaggagacatcactatctgtaagtggaaccatttctgcaatcacttccaaagtttcaaccatatggtggtcagacactctgtcaacagcactctcccccagttctctacctccaaaaatatccacagctttccacacccagcagagtgaaggtgcagagaccacaggacggcctcatgagaggagctcattctctccaggtgtgtctcaagaaatatttactctacatgaaacaacaacatggccttcctcattctccagcaaaggccacacaacttggtcacaaacagaactgccctcaacatcaacaggtgctgccactaggcttgtcacaggaaatccatctacaggggcagctggcactattccaagggtcccctctaaggtctcagcaataggggaaccaggagagcccaccacatactcctcccacagcacaactctcccaaaaacaacaggggcaggcgcccagacacaatggacacaagaaacggggaccactggagaggctcttctcagcagcccaagctacagtgtgactcagatgataaaaacggccacatccccatcttcttcacctatgctggatagacacacatcacaacaaattacaacggcaccatcaacaaatcattcaacaatacattccacaagcacctctcctcaggaatcaccagctgtttcccaaaggggtcacactcaagccccgcagaccacacaagaatcacaaaccacgaggtccgtctcccccatgactgacaccaagacagtcaccaccccaggttcttccttcacagccagtgggcactcgccctcagaaattgttcctcaggacgcacccaccataagtgcagcaacaacctttgccccagctcccaccggggatggtcacacaacccaggccccgaccacagcactgcaggcagcacccagcagccatgatgccaccctggggccctcaggaggcacgtcactttccaaaacaggtgcccttactctggccaactctgtagtgtcaacaccagggggcccagaaggacaatggacatcagcctctgccagcacctcacctgacacagcagcagccatgacccatacccaccaggctgagagcacagaggcctctggacaaacacagaccagcgaaccggcctcctcagggtcacgaaccacctcagcgggcacagctaccccttcctcatccggggcgagtggcacaacaccttcaggaagcgaaggaatatccacctcaggagagacgacaaggttttcatcaaacccctccagggacagtcacacaacccagtcaacaaccgaattgctgtccgcctcagccagtcatggtgccatcccagtaagcacaggaatggcgtcttcgatcgtccccggcacctttcatcccaccctctctgaggcctccactgcagggagaccgacaggacagtcaagcccaacttctcccagtgcctctcctcaggagacagccgccatttcccggatggcccagactcagaggacaagaaccagcagagggtctgacactatcagcctggcgtcccaggcaaccgacaccttctcaacagtcccacccacacctccatcgatcacatccagtgggcttacatctccacaaacccagacccacactctgtcaccttcagggtctggtaaaaccttcaccacggccctcatcagcaacgccacccctcttcctgtcacctacgcttcctcggcatccacaggtcacaccacccctcttcatgtcaccgatgcttcctcagtatccacaggtcacgccacccctcttcctgtcaccgacacttcctcagaatccacaggtcacgccacccctcttcctgtcaccagcccttcctcagtatccacaggtcacaccacccctcttcctgtcaccgacacttcctcagaatccacaggtcatgtcacccctcttcctgtcaccagcctttcctcagcatccacaggtgacagcacccctcttcctgtcactgacacttcctcagcatccacaggtcacgtcacccctcttcctgtcaccagcctttcctcagcatccacaggtgacaccacccctcttcctgtcactgacacttcctcagcatccacaggtcacgccacctctcttcctgtcaccgacacttcctcagtatccacaggtcacaccacccctcttcctgtcaccgacacttcctcagcatccacaggtcacgccacctctcttcctgtcaccgacacttcctcagtatccacagctcacgccaccccacttcctgtcaccggcctttcttcagcttccacagatgacaccacccgtcttcctgtcaccgacgtttcctcggcatccacaggtcaggccatccctcttcctgtcaccagcccttcctcagcatccacaggtgacaccacccctcttcctgtcaccgacgcttcctcagcatccacaggtgacaccacctctcttcctgtcaccatcccttcctcagcatcttcaggtcacaccacctctcttcctgtcaccgacgcttcctcagtgtccacaggtcacgccacctctcttcttgtcaccgacgcttcctcagtatccacaggtgacaccacccctcttcctgtcaccgacactaactcagcatccacaggtgacaccacccctcttcatgtcaccgacgcttcctcagtatccacaggtcacgccacctctcttcctgtcaccagcctttcctcagcatccacaggtgacaccacgcctcttcctgtcactagcccttcctcagcatcctcaggtcacaccacccctcttcctgtcaccgacgcttcctcagtacccacaggtcacgccacctctcttcctgtcaccgacgcttcctcagtgtccacaggtcacgccacccctcttcctgtcaccgacgcttcctcagtgtccacaggtcatgccacccctcttccggtcaccgacacttcctcagtatctacaggacaggccacccctcttcctgtcaccagcctttcctcagcatccactggtgacaccacgccgcttcctgtcaccgatacttcctcagcatccacaggtcaggacacccctcttcctgtcaccagcctttcctcagtatccacaggtgacaccacgcctcttcctgtcactagcccttcctcagcatccacaggtcacgccacccctcttcttgtcaccgacgcttcctcagtatccacaggtcacgccacctctcttcttgtcaccgacgcttcctcagtatccacaggtcacgccaccgctcttcatgtcaccgatgcttcctcattatccacaggggacaccacccctcttcctgtcaccagcccttcctcagcatccacaggtgacaccacccctcttcctgtcaccgacacttcctcagcatccacaggtcacgccacctctcttcctgtcaccgacacttcctcagcatccacaggtcacgccacccctcttcctgtcaccgacacttcctcagcatccacaggtcaggccacccctcttcctgtcaccggcccttcctcagcatccacaggtcacgccatccctcttcttgtcaccgacacttcctcagcatccacaggacaggccacccctcttcctgtcaccagcctttcctcagcatccacaggtgacaccacccctcttcctgtcaccgacgcttcctcagtgtccacaggtcacgccacctctcttcctgtcaccagcctttcctcagtatccacaggtgacaccacccctcttcctgtcaccagcccttcctcagcatcctcaggtcacaccacccctcttcctgtcaccgacgcttcctcagtatccacaggtgacaccacccctcttcctgtcaccagcccttcctcagcatcctcaggtcacaccacccctcttcctgtcaccagcccttcctcagcatcctcaggtcacaccacccctcttcctgtcaccgacgcttcctcagcatccacaggtgacaccacccctcttcctgtcaccgacacttcctcagcatccacaggtcacgccacccatcttcctgtcaccggcctttcctcagcttccacaggtgacaccacccgtcttcctgtcaccaacgtttcctcggcatccacaggtcatgccacccctcttcctgtcaccagcacttcctcagcatccacaggtgacaccacccctcttcctggcaccgacacttcctcagtatccacaggtcacaccacccctcttcttgtcaccgacgcttcgtcagtatccacaggtgacaccacccgtcttcctgtcaccagcccttcctcagcatctacaggtcacaccacccctctacctgtcaccgacactccctcagcatccacaggtgacaccacccctcttcctgtcaccaatgcttcctcattatccacacgtcacaccacctctcttcatgtcaccagcccttcctcagcatccacaggtcacgccacctctcttcctgtcaccgacacttcctcagtatccacaggtcatgccacccctcttcatgtcaccagcccttcctcagcatccacaggtgacaccacccctcttcctgtcaccgacacttactcagcatccacaggtcaggccacccctcttcctgtcaccgacacttcctcagcatccacaggtgacaccacccctcttcctgtcaccgacacttcctcagcatccacaggtcacgccacccctcttcctgtcaccaacacttcctcagtatccacaggtcacgccacccctcttcatgtcaccagcccttcctcagcatccacaggtcacaccacccctcttcctgtcaccgacgcttcgtcagtgtccacaggtcacgccacctctcttcctgtcaccgacgcttcctcagtgttcacaggtcacgccacctcgcttcctgtcaccatcccttcctcagcatcctcaggtcacaccacccctcttcctgtcaccgacgcttcctcagtgtccacaggtcacgccacctctcttcctgtcaccgacgcttcctcagtgtccacaggtcacgccacccctcttcctgtcaccgacgcttcctcagtgtccacaggtcacgctacccctcttcctgtcaccgacacttcctcagtatccacaggtcacgccacccctcttcctctcaccagcctttcctcagtatccacaggtgacaccacgcctcttcctgtcaccgacacttcctcagcatccacaggtcaggccacccctcttcctgtcaccagcctttcctcagtatccacaggtgacaccacccctcttcctgtcaccgacacttcctcagcatccacaggtcacgccacctctcttcctgtcaccgacacttcctcagcatccacaggtcacgccacccctcttcctgacaccgacacttcctcagcatccacaggtcacgccacccctcttcctgtcaccgacacttcctcagcatccacaggtcacgccacccttcttcctgtcaccgacacttcctcagcatccataggtcacgccacccctcttcctgtcaccgacacttcctcaatatccacaggtcacgccacccctcttcatgtcaccagcccttcctcagcatccaccggtcacgccaccccgcttcctgtcaccgacacttcctcagcatccacaggtcacgccaaccctcttcatgtcaccagcccttcctcagcatccaccggtcacgccaccccgcttcctgtcaccgacacttcctcagcatccacaggtcacgccacccctcttcctgtcaccagcctttcctcagtatccacaggtgacaccacgcctcttcctgtcactagcccttcctcagcatccacaggtcacaccacccctcttcctgtcaccgacacttcctcagcatccacaggtcaggccaccgctcttcctgtcaccagcacttcctcagcatccacaggtgacaccacccctcttcctgttaccgacacttcctcagcatccacaggtcaggccacccctcttcctgtcaccagcctttcctcagtatccacaggtgacaccacgcctcttcctgtcactagcccttcctcagcatccacaggtcacgccactcctcttcttgtcaccgacgcttcctcagcatccacaggtcaggccacccctcttcctgtcaccgacacttcctcagcatacacaggtgacaccacctctcttcctgtcaccgacacttcctcatcatccacaggtgacaccacccctcttcttgtcaccgagacttcctcagcatccacaggtcacgccacccctcttcatgtcaccagcccttcctcagcatccacaggtgacaccacccctgtgcctgtcaccgacacttcctcagtatccacaggtcacgccacccctcttcctgtcaccggcctttcctcagcttccacaggtgacaccacccgtcttcctgtcaccgacatttcctcggcatccacaggtcaggccacccctcttcctgtcaccaacacttcctcagcatccacaggtcacgccacccctcttcctgtcaccggcctttcctcagcttccacaggtgacaccacccgtcttcctgtcaccgacatttcctcggcatccacaggtcaggccacccctcttcctgtcaccaacacttcctcagtatccacaggtgacaccatgcctcttcctgtcactagcccttcctcagcatccacaggtcacgccacccctcttcctgtcaccagcacttcctcagcatccaccggtcacgccacccctgttcctgtcaccagcacttcctcagcatctacaggtcacaccacccctcttcctgtcaccgacacttcctcagcatccacaggtgacaccacccctcttcctgtcaccagcccttcctcagcatctacaggtcacaccacccctcttcatgtcaccatcccttcctcagcatccacaggtgacaccagcactcttcctgtcaccggcgcttcctcagcatccaccggtcacgccacccctcttcctgtcaccgacacttcctcagtatccacaggtcacgccacccctcttcctgtcaccagcttttcctcagtatccacaggtgacaccacgcctcttcctgtcaccgacacttcctcagtatccacaggtcacgccacccctcttcctgtcaccagcttttcctcagtatccacaggtgacaccacccctcttcctgtcaccgacgcttcctcggcatccaccggtcacgccacccctcttcctgtcaccgacacttcctcagtatccacaggtcacgccacccctcttcctctcaccagcctttcctcagtatccacaggtgacaccacgactcttcctgtcaccgacacttcctcagtatccacaggtcacgccacccctcttcctgtcaccagcttttcctcagtatccacaggtgacaccacccctcttcctgtcaccgacgcttcctcggcatccaccggtcacgccacccctcttcctgtcaccgacacttcctcagtatccaccggtcacgccacgcctcttcctgtcaccagcctttcctcagtatccacaggtgacaccacccctcttcctgtcaccgacgcttcctcggcatccacaggtcaggccacccctcttcctgtcaccagcctttcctcagtatcaacaggtgacaccacgcctcttcctgtcaccatcccttcctcagcatcctcaggtcacaccacctctcttcctgtcaccgacacttcctcagcatccacaggtcaggccacccctcttcctgtcaccagcctttcctcagtatccacaggtgacaccacccctcttcttgtcaccgacgcttcctcagtatccacaggtcacgccacccctcttcctgtcaccgacacttcctcagcatccacaggtgacaccacccgtcttcctgtcacagacacttcctcagcatccacaggtcaggccacccctcttcctgtcaccagcctttcctcagtatccacaggtgacaccacccctcttcttgtcaccaacacttcctcagtatccagaggtcacgccacctctcttcctgtcaccatcccttcctcatcatcctcaggtcacaccacccctcttcctgtcaccagcacttcctcagtatctacaggtcacgtcacccctcttcctgtcaccagcacttcctcagcatccacaggtcacgccacctctcttcctgtcaccgacacttcctcagtatccacaggtcacgccacctctcttcctgtcaccgacacttcctcagtatccacaggtcacgccacccctcttcctgtcaccgacgcttcctcagtgtccacaggtcacgccacgcctcttcctgtcaccgacgcttcctcagcatccacaggtgacaccacccctcttcctgtcaccaacacttcctcagcatccacaggtcaggccacccctcttcctgtcaccagcctttcctcagtatccacaggtgacaccatgcctcttcctgtcactagcccttcctcagcatccacaggtcacgccacccctcttcctgttaccggcctttcctcagcttccacaggtgacaccacccctcttcctgtcactgacacttcctcagcatccacaggtcacgtcacccctcttcctgtcaccagcctttcctcagcatccacaggtgacagcacccctcttcctgtcactgacacttcctcagcatccacaggtcacgtcacccctcttcctgtcaccagcctttcctcagcatccacaggtgacaccacccctcttcctgtcactgacacttcctcagcatccacaggtcacgccacccctcttcatgtcactgatgcttcctcagcatccacaggtcaggccacccttcttcctgtcaccagcctttcctcagtatccacaggtgacaccacgcctcttcctgtcactagcccttcctcagcatccacaggtcacgccacccctcttcttgtcaccgacacttcctcagcatccacaggacacgccacccctcttcctgtcacggacgcttcctcagtgtccacaggtcacgccacctctcttcctgtaaccatccgttcctcaggttccacaggtcacaccacccctcttcctgtcaccgacacttcctcagcatccacaggtcaggccacctctcttcttgtcaccgacacttcctcagtatccacaggtgacaccacgcctcttcctgtcactagcacttcctcagcatccacaggtcacgtcactcctcttcatgtcaccagcccttcctcagcatccacaggtcacgccacccctcttcctgtcaccagcctttcctcagcatccacaggtgacaccatgcctcttcctgtcactagcccttcctcagcatccacaggtgacaccacccctcttcctgtcaccgacgcttcctcagtatccacaggtcacaccacccctcttcctgtcaccagcccttcctcagcatctacaggtcacaccacccctcttcctgtcaccgacactacctcagcatccaaaggtgacaccacccctcttcctgtcaccagcccttcctcagcatctacaggtcacaccacccctcttcctgtcaccgacacttcctcagcatccacaggtgacaccacccctcttcctgtcaccagcccttcctcagcatccacaggtcacgccacccctcttcctgtcaccaatgcttcctcattatccacaggtcacgccacccctcttcatgtcaccagcccttcctcagcatccacaggtcacgccacccctcttcctgtcaccagcacttcctcagcatccaccggtcacgccacctctcttcctgtcaccagcacttcctcagcatccaccggtcacgccacccctcttcctgtcaccgacaattcctcagtatccacaggtcacgccacccctcttcctgtcaccggcctttcctcagctaccacagatgacaccacccgtcttcctgtcaccgacgtttcctcggcatccacaggtcaggccacccctcttcctgtcaccagcctttcctcagtatccacaggtgacaccacgcctcttcctgtcactagcccttcctcagcatccacaggtcacgccagccctcttcttgtcactgacgcttcctcagcatccacaggtcaggccacccctcttcctgtcaccgacacttcctcagtatccacagctcacgccaccccacttcctgtcaccggcctttcttcagcttccacagatgacaccacccgtcttcctgtcaccgacgtttcctcggcatccacaggtcaggccatccctcttcctgtcaccagcccttcctcagcatccacaggtgacaccacccctcttcctgtcaccgacgcttcctcagcatccacaggtgacaccacctctcttcctgtcaccatcccttcctcagcatcttcaggtcacaccacctctcttcctgtcaccgacgcttcctcagtgtccacaggtcacgccacctctcttcttgtcaccgacgcttcctcagtatccacaggtgacaccacccctcttcctgtcaccgacactaactcagcatccacaggtgacaccacccctcttcatgtcaccgacgcttcctcagtatccacaggtcacgccacctctcttcctgtcaccagcctttcctcagcatccacaggtgacaccacgcctcttcctgtcactagcccttcctcagcatcctcaggtgacaccacccctcttcctgtcaccgacacttcctcagcatccacaggtcacgccacccatcttcctgtcaccggcctttcctcagcttccacaggtgacaccacccgtcttcctgtcaccaacgtttcctcggcatccacaggtcatgccacccctcttcctgtcaccagcacttcctcagcatccacaggtgacaccacccctcttcctggcaccgacacttcctcagtatccacaggtcacaccacccctcttcttgtcaccgacgcttcgtcagtatccacaggtgacaccacccgtcttcctgtcaccagcccttcctcagcatctacaggtcacaccacccctcttcatgtcaccgatgcttcctcagtatccacaggtcacaccacccctcttcctgtcaccgacacttcctcagcatccacaggtcaggccacctctcttcttgtcaccgacacttcctcagtatccacaggtgacaccacgcctcttcctgtcactagcacttcctcagcatccacaggtcacgtcactcctcttcatgtcaccagcccttcctcagcatccacaggtcacgccacccctcttcctgtcaccagcctttcctcagcatccacaggtgacaccacccctcttcctgtcaccgacacttcctcagtatccacaggtcacaccacccctcttcctgtcaccagcccttcctcagcatctacaggtcacaccacccctcttcctgtcaccgacacttcctcagcatccaaaggtgacaccacccctcttcctgtcaccagcccttcctcagcatctacaggtcacaccacccctcttcctgtcaccgacacttcctcagcatccacaggtgacaccacccctcttcctgtcaccaatgcttcctcattatccacaggtcacgccacccctcttcatgtcaccagcccttcctcagcatccacaggtcacgccacccctcttcctgtcaccagcacttcctcagcatccaccggtcacgccacccctcttcctgtcaccagcacttcctcagcatccaccggtcacgccacccctcttcctgtcaccgacaattcctcagtatccacaggtcatgccacccctcttcctgtcaccggcctttcctcagctaccacagatgacaccacccgtcttcctgtcaccgacgtgtcctcggcatccacaggtcaggccacccctcttcctgtcaccagcctttcctcagtatccacaggtgacaccacgcctcttcctgtcactagcccttcctcagcatccacaggtcacgccagccctcttcttgtcactgacgcttcctcagcatccacaggtcaggccacccctcttcctgtcaccgacacttcctcagtatccacagctcacgccaccccacttcctgtcaccggcctttcctcagcttccacagatgacaccacccgtcttcctgtcaccgacgtttcctcggcatccacaggtcaggccatccctcttcctgtcaccagcccttcctcagcatccacaggtgacaccacccctcttcctgtcaccgacgcttcctcagcatccacaggtgacaccacctctcttcctgtcaccatcccttcctcagcatcttcaggtcacaccacctctcttcctgtcaccgacgcttcctcagtgtccacaggtcacgccacctctcttcttgtcaccgacgcttcctcagtatccacaggtgacaccacccctcttcctgtcaccgacactaactcagcatccacaggtgacaccacccctcttcatgtcaccgacgcttcctcagtatccacaggtcacgccacctctcttcctgtcaccagcctttcctcagcatccacaggtgacaccacgcctcttcctgtcactagcccttcctcagcatcctcaggtcacaccacctctcttcctgtcaccgacgcttcctcagtgtccacaggtcacgccacctctcttcctgtcaccatcccttcctcagcatcctcaggtcacaccacccctcttcctgtcaccgacgcttcctcagtacccacaggtcacgccacctctcttcctgtcaccgacgcttcctcagtgtccacaggtcacgccacccctcttcctgtcaccgacgcttcctcagtgtccacaggtcatgccacccctcttccggtcaccgacacttcctcagtatctacaggacaggccacccctcttcctgtcaccagcctttcctcagcatcatccactggtgacaccacgccgcttcctgtcactgatacttcctcagcatccacaggtcaggacacccctcttcctgtcaccagccttttctcagtatccacaggtgacaccacgcctcttcctgtcactagcccttcctcagcatccacaggtcacgccacccatcttcttgtcaccgacgcttcctcagtatccacaggtcacgccacctctcttcttgtcaccgacgcttcctcagtatccacaggtcacgccaccgctcttcatgtcaccgatgcttcctcattatccacaggggacaccacccctcttcctgtcaccagcccttcctcagcatccacaggtgacaccacccctcttcctgtcaccgacacttcctcagtatccacaggtcacgccacctctcttcctgtcactgacacttcctcagcatccacaggtcacgccacctctcttcctgtcaccgacacttcctcagcatccacaggtcaggccacccctcttcctgtcaccagcccttcctcagcatccacaggtcacgccatccctcttcttgtcaccgacacttcctcagcatccacaggacaggccacccctcttcctgtcaccagcctttcctcagcatccacaggtgacaccacccctcttcctgtcaccgatgcttcctcagtgtccacaggtcacgccacctctcttcctgtcaccagcctttcctcagtatccacaggtgacaccacccctcttcctgtcactagcccttcctcagcatccacaggtcacgccacccctcttcatgtcaccagcccttcctcagcatccacaggtcacgccacccctcttcctgtcaccagcctttcctcagcatccacaggtgacaccacgcctcttcctgtcactagcccttcctcagcatccacaggtcacgccacccctcttcatgtcaccgacgcttcctcagtatccacaggtgacaccacccctcttcctgtcaccagcccttcctcagcatcctcaggtcacaccacccctcttcctgtcaccgacgcttcctcagcatccacaggtgacaccacccctcttcctgtcaccgacacttcctcagcatccacaggtcacgccacccatcttcctgtcaccggcctttcctcagcttccacaggtgacaccacccgtcttcctgtcaccgacgtttcctcggcatccacaggtcatgccacccctcttcctgtcaccagcacttcctcagcatccacaggtgacaccacccctcttcctggcaccgacacttcctcagtatccacaggtcacaccacccctcttcttgtcaccgacgcttcgtcagtatccacaggtgacaccacccgtcttcctgtcaccagcccttcctcagcatctacaggtcacaccacccctctacctgtcaccgacactccctcagcatccacaggtgacaccacccctcttcctgtcaccaatgcttcctcattatccacacgtcacgccacctctcttcatgtcaccagcccttcctcagcatccaccggtcacgccacccctcttcctgttaccgacacttccgcagcatccacaggtcacgccacccctcttcctgtcaccagcacttcctcagcatccacaggtgacaccacccctcttcctgtcaccgacacttcctcagcatccacaggtcacgccacccctcttcctgtcaccaacacttcctcagtatccacaggtcacgccacccctcttcatgtcaccagcccttcctcagcatccacaggtcacaccacccctcttcctgtcaccgacgcttcgtcagtgtccacaggtcacgccacctctcttcctgtcaccgacgcttcctcagtgtccacaggtcacgccacccctcttcctgtcaccgacgcttcctcagtgtccacaggtcacgctacccctcttcctctcaccagcctttcctcagtatccacaggtgacaccacgcctcttcctgtcaccgacacttcctcagcatccacaggtcaggccacccctcttcctgtcaccagcctttcctcagtatccacaggtgacaccacccctcttcctgtcaccgacacttcctcagcatccacaggtcacgccacctctcttcctgtcaccgacacttcctcagcatccacaggtcacgccacccctcttcctgtcaccgacacttcctcaatatccacaggtcacgccacccctcttcatgtcaccagcccttcctcagcatccaccggtcacgccaccccgcttcctgtcaccgacacttcctcagcatccacaggtcacgccacccctcttcctgtcaccagcctttcctcagtatccacaggtgacaccacgcctcttcctgtcactagcccttcctcagcatccacaggtcacgccactcctcttcttgtcaccgacgcttcctcagcatccacaggtcaggccacccctcttcctgtcaccagcctttcctcagtatccacaggtgacaccacgcctcttcctgtcactagcccttcctcagcatccaccggtcatgccacctctcttcctgtcaccgacacttcctcagcatccacaggtgacaccacctctcttcctgtcaccgacacttcctcagcatacacaggtgacaccacctctcttcctgtcaccgacacttcctcatcatccacaggtgacaccacccctcttcttgtcaccgagacttcctcagcatccacaggtgacaccacccctgtgcctgtcaccgacacttcctcagtatccacaggtcacgccacccctcttcctgtcaccggcctttcctcagcttccacaggtgacaccacccgtcttcctgtcaccgacatttcctcggcatccacaggtcaggccacccctcttcctgtcaccaacacttcctcagtatccacaggtgacaccatgcctcttcctgtcactagcccttcctcagcatccacaggtcacgccacccctcttcctgtcaccagcacttcctcagcatccaccggtcacgccacccctgttcctgtcaccagcacttccttagcatccacaggtcacaccacccctcttcctgtcaccagcccttcctcagcatctacaggtcacaccacccctcttcctgtcaccgacacttcctcagcatccacaggtgacaccacccctcttcctgtcaccaatgcttcctcattatccacaggacacaccacccctcttcatgtcaccatcccttcctcagcatccacaggtgacaccagcactcttcctgtcaccggcgcttcctcagcatccaccggtcacgccacccctcttcctgtcaccgacacttcctcagtatccacaggtcacgccacccctcttcctgtcaccagcttttcctcagtatccacaggtgacaccacccctcttcctgtcaccgacgcttcctcggcatccaccggtcacgccacccctcttcctgtcaccgacacttcctcagcatccacaggtgacaccacccctcttcctgtcaccgacgcttcctcggcatccacaggtcaggccacccctcttcctgtcaccagcctttcctcagtatcaacaggtgacaccacgcctcttcctgtcaccatcccttcctcagcatcctcaggtcacaccacctctcttcctgtcagcgacacttcctcagcatccacaggtcaggccacccctcttcctgtcaccagcctttcctcagtatccacaggtgacaccacccctcttcttgtcaccgacgcttcctcagtatccacaggtcacgccacccctcttcctgtcaccgacacttcctcagcatccacaggtgacaccacccgtcttcctgtcacggacacttcctcagcatccacaggtcaggccacccctcttcctgtcaccagcctttcctcagtatccacaggtgacaccacccctcttcttgtcaccaacacttcctcagtatccacaggtcacgccacctctcttcctgtcaccatcccttcctcatcatcctcaggtcacaccacccctcttcctgtcaccagcacttcctcagtatctacaggtcacgtcacccctcttcatgtcaccagcccttcctcatcatccacaggtcaggccacccctcttcctgtcaccagcacttcctcagtatctacaggtcacgtcacccctcttcatgtcaccagcccttcctcagcatccacaggtcacgccacccctcttcctgtcaccagcacttcctcagcatccacaggtcacgccacccctcttcctgtcaccgacgcttcctcagtgtccacaggtcacgccacgcctcttcctgtcaccgacacttcctcagcatccacaggtgacaccacccctcttcctgtcaccgacacttcctcagcatccacaggtcaggccacccctcttcctgtcaccagcctttcctcagtatccacaggtcacgccacccctcttgctgtcagcagtgctacctcagcttccacagtatcctcggactcccctctgaagatggaaacatcaggaatgacaacaccgtcactgaagacagacggtgggagacgcacagccacatcaccaccccccacaacctcccagaccatcatttccaccattcccagcactgccatgcacacccgctccacagctgcccccatccccatcctgcctgagagaggagtttccctcttcccctatggggcagacgccggggacctggagttcgtcaggaggaccgtggacttcacctccccactcttcaagccggcgactggcttcccccttggctcctctctccgtgattccctctacgcttcacaggccgggaccctgtggccctggtggctccgttctgggacgatgctgacttctccactggtcgggggaccacattttatcagagcaacacctaccaagccatcctctccacggacgggagcaggtcctatgccctgtttctctaccagagcggtgggatgcagtgggacgtggcccagcgctcagtggagatggctatttcgaaaacagcccactgatgtcccagccagtgtgggagaggtatcgccctgatagattcctgaattccaactcaggcctccaagggctgcagttctacaggctacaccgggaagaaaggcccaactaccgtctcgagtgcctgcagtggctgaagagccagcctcggtggcccagctggggctggaaccaggtctcctgcccttgttcctggcagcagggacgacgggacttacgattccaacccgtcagcataggtcgctggggcctcggcagtaggcagctgtgcagcttcacctcttggcgaggaggcgtgtgctgcagctacgggccctggggagagtttcgtgaaggctggcacgtgcagcgtccttggcagttggcccaggaactggagccacagagctggtgctgccgctggaatgacaagccctacctctgtgccctgtaccagcagaggcggccccacgtgggctgtgctacatacaggcccccacagcccgcctggatgttcggggacccccacatcaccaccttggatggtgtcagttacaccttcaatgggctgggggacttcctgctggtcggggcccaagacgggaactcctccttcctgcttcagggccgcaccgcccagactggctcagcccaggccaccaacttcatcgcctttgcggctcagtaccgctccagcagcctgggccccgtcacggtccaatggctccttgagcctcacgacgcaatccgtgtcctgctggataaccagactgtgacatttcagcctgaccatgaagacggcggaggccaggagacgttcaacgccaccggagtcctcctgagccgcaacggctctgaggtctcggccagcttcgacggctgggccaccgtctcggtgatcgcgctctccaacatcctccacgcctccgccagcctcccgcccgagtaccagaaccgcacggaggggctcctgggggtctggaataacaatccagaggacgacttcaggatgcccaatggctccaccattcccccagggagccctgaggagatgcttttccactttggaatgacctggcagatcaacgggacaggcctccttggcaagaggaatgaccagctgccttccaacttcacccctgttttctactcacaactgcaaaaaaacagctcctgggctgaacatttgatctccaactgtgacggagatagctcatgcatctatgacaccctggccctgcgcaacgcaagcatcggacttcacacgagggaagtcagtaaaaactacgagcaggcgaacgccaccctcaatcagtacccgccctccatcaatggtggtcgtgtgattgaagcctacaaggggcagaccacgctgattcagtacaccagcaatgctgaggatgccaacttcacgctcagagacagctgcaccgacttggagctctttgagaatgggacgttgctgtggacacccaagtcgctggagccattcactctggagattctagcaagaagtgccaagattggcttggcatctgcactccagcccaggactgtggtctgccattgcaatgcagagagccagtgtttgtacaatcagaccagcagggtgggcaactcctccctggaggtggctggctgcaagtgtgacgggggcaccttcggccgctactgcgagggctccgaggatgcctgtgaggagccgtgcttcccgagtgtccactgcgttcctgggaagggctgcgaggcctgccctccaaacctgactggggatgggcggcactgtgcggctctggggagctctttcctgtgtcagaaccagtcctgccctgtgaattactgctacaatcaaggccactgctacatctcccagactctgggctgtcagcccatgtgcacctgccccccagccttcactgacagccgctgcttcctggctgggaacaacttcagtccaactgtcaacctagaacttcccttaagagtcatccagctcttgctcagtgaagaggaaaatgcctccatggcagaagtcaacgcctcggtggcatacagactggggaccctggacatgcgggcctttctccgcaacagccaagtggaacgaatcgattctgcagcaccggcctcgggaagccccatccaacactggatggtcatctcggagttccagtaccgccctcggggcccggtcattgacttcctgaacaaccagctgctggccgcggtggtggaggcgttcttataccacgttccacggaggagtgaggagcccaggaacgacgtggtcttccagcccatctccggggaagacgtgcgcgatgtgacagccctgaacgtgagcacgctgaaggcttacttcagatgcgatggctacaagggctacgacctggtctacagcccccagagcggcttcacctgcgtgtccccgtgcagtaggggctactgtgaccatggaggccagtgccagcacctgcccagtgggccccgctgcagctgtgtgtccttctccatctacacggcctggggcgagcactgtgagcacctgagcatgaaactcgacgcgttcttcggcatcttctttggggccctgggcggcctcttgctgctgggggtcgggacgttcgtggtcctgcgcttctggggttgctccggggccaggttctcctatttcctgaactcagctgaggccttgccttgaaggggcagctgtggcctaggctacctcaagactcacctcatccttaccgcacatttaaggcgccattgcttttgggagactggaaaagggaaggtgactgaaggctgtcaggattctt

SEQ ID NO: 155745 - DNA, 16091 bp, Homo sapiens; identical to SEQ ID NO: 155691
  Payload ID: 10597
  Gene Symbol: MUC4
  Gene Name: mucin 4, cell surface associated
  ENST ID: ENST00000631279
  CDS Start-End: 1-13295

SEQ ID NO: 155746 - DNA, 16247 bp, Homo sapiens; identical to SEQ ID NO: 155732
  Payload ID: 10597
  Gene Symbol: MUC4
  Gene Name: mucin 4, cell surface associated
  ENST ID: ENST00000626727
  CDS Start-End: 1-13451

SEQ ID NO: 155747 - DNA, 3705 bp, Homo sapiens
  Payload ID: 10597
  Gene Symbol: MUC4
  Gene Name: mucin 4, cell surface associated
  ENST ID: ENST00000630643
  CDS Start-End: 1-3296
gagtttccctcttcccctatggggcaggcgccggggacctggagttcgtcaggaggaccgtggacttcacctccccactcttcaagccggcgactggcttcccccttggctcctctctccgtgattccctctacttcacagacaatggccagatcatcttcccagagtcagactaccagattttctcctaccccaacccactcccaacaggcttcacaggccgggaccctgtggccctggtggctccgttctgggacgatgctgacttctccactggtcgggggaccacattttatcaggaatacgagacgttctatggtgaacacagcctgctagtccagcaggccgagtcttggattagaaagatgacaaacaacgggggctacaaggccaggtgggccctaaaggtcacgtgggtcaatgcccacgcctatcctgcccagtggaccctcgggagcaacacctaccaagccatcctctccacggacgggagcaggtcctatgccctgtttctctaccagagcggtgggatgcagtgggacgtggcccagcgctcaggcaacccggtgctcatgggcttctctagtggagatggctatttcgaaaacagcccactgatgtcccagccagtgtgggagaggtatcgccctgatagattcctgaattccaactcaggcctccaagggctgcagttctacaggctacaccgggaagaaaggcccaactaccgtctcgagtgcctgcagtggctgaagagccagcctcggtggcccagctggggctggaaccaggtctcctgcccttgttcctggcagcagggacgacgggacttacgattccaacccgtcagcataggtcgctggggcctcggcagtaggcagctgtgcagcttcacctcttggcgaggaggcgtgtgctgcagctacgggccctggggagagtttcgtgaaggctggcacgtgcagcgtccttggcagttggcccaggaactggagccacagagctggtgctgccgctggaatgacaagccctacctctgtgccctgtaccagcagaggcggccccacgtgggctgtgctacatacaggcccccacagcccgcctggatgttcggggacccccacatcaccaccttggatggtgtcagttacaccttcaatgggctgggggacttcctgctggtcggggcccaagacgggaactcctccttcctgcttcagggccgcaccgcccagactggctcagcccaggccaccaacttcatcgcctttgcggctcagtaccgctccagcagcctgggccccgtcacggtccaatggctccttgagcctcacgacgcaatccgtgtcctgctggataaccagactgtgacatttcagcctgaccatgaagacggcggaggccaggagacgttcaacgccaccggagtcctcctgagccgcaacggctctgaggtctcggccagcttcgacggctgggccaccgtctcggtgatcgcgctctccaacatcctccacgcctccgccagcctcccgcccgagtaccagaaccgcacggaggggctcctgggggtctggaataacaatccagaggacgacttcaggatgcccaatggctccaccattcccccagggagccctgaggagatgcttttccactttggaatgacctggcagatcaacgggacaggcctccttggcaagaggaatgaccagctgccttccaacttcacccctgttttctactcacaactgcaaaaaaacagctcctgggctgaacatttgatctccaactgtgacggagatagctcatgcatctatgacaccctggccctgcgcaacgcaagcatcggacttcacacgagggaagtcagtaaaaactacgagcaggcgaacgccaccctcaatcagtacccgccctccatcaatggtggtcgtgtgattgaagcctacaaggggcagaccacgctgattcagtacaccagcaatgctgaggatgccaacttcacgctcagagacagctgcaccgacttggagctctttgagaatgggacgttgctgtggacacccaagtcgctggagccattcactctggagattctagcaagaagtgccaagattggcttggcatctgcactccagcccaggactgtggtctgccattgcaatgcagagagccagtgtttgtacaatcagaccagcagggtgggcaactcctccctggaggtggctggctgcaagtgtgacgggggcaccttcggccgctactgcgagggctccgaggatgcctgtgaggagccgtgcttcccgagtgtccactgcgttcctgggaagggctgcgaggcctgccctccaaacctgactggggatgggcggcactgtgcggctctggggagctctttcctgtgtcagaaccagtcctgccctgtgaattactgctacaatcaaggccactgctacatctcccagactctgggctgtcagcccatgtgcacctgccccccagccttcactgacagccgctgcttcctggctgggaacaacttcagtccaactgtcaacctagaacttcccttaagagtcatccagctcttgctcagtgaagaggaaaatgcctccatggcagaagtcaacgcctcggtggcatacagactggggaccctggacatgcgggcctttctccgcaacagccaagtggaacgaatcgattctgcagcaccggcctcgggaagccccatccaacactggatggtcatctcggagttccagtaccgccctcggggcccggtcattgacttcctgaacaaccagctgctggccgcggtggtggaggcgttcttataccacgttccacggaggagtgaggagcccaggaacgacgtggtcttccagcccatctccggggaagacgtgcgcgatgtgacagccctgaacgtgagcacgctgaaggcttacttcagatgcgatggctacaagggctacgacctggtctacagcccccagagcggcttcacctgcgtgtccccgtgcagtaggggctactgtgaccatggaggccagtgccagcacctgcccagtgggccccgctgcagctgtgtgtccttctccatctacacggcctggggcgagcactgtgagcacctgagcatgaaactcgacgcgttcttcggcatcttctttggggccctgggcggcctcttgctgctgggggtcgggacgttcgtggtcctgcgcttctggggttgctccggggccaggttctcctatttcctgaactcagctgaggccttgccttgaaggggcagctgtggcctaggctacctcaagactcacctcatccttaccgcacatttaaggcgccattgcttttgggagactggaaaagggaaggtgactgaaggctgtcaggattcttcaaggagaatgaatactgggaatcaagacaagactataccttatccataggcgcaggtgcacagggggaggccataaagatcaaacatgcatggatgggtcctcacgcagacacacccacagaaggacactagcctgtgcacgcgcgcgtgcacacacacacacacacaagagttcataatgtggtgatggccctaagttaagcaaaatgcttctgcacacaaaactctctggtttacttcaaattaactctatttaaataaagtctctctgactttttgtgtcttcaaaa

SEQ ID NO: 155748 - DNA, 16199 bp, Homo sapiens; identical to SEQ ID NO: 155736
  Payload ID: 10597
  Gene Symbol: MUC4
  Gene Name: mucin 4, cell surface associated
  ENST ID: ENST00000631097
  CDS Start-End: 1-13121

SEQ ID NO: 155749 - DNA, 3775 bp, Homo sapiens
  Payload ID: 10597
  Gene Symbol: MUC4
  Gene Name: mucin 4, cell surface associated
  ENST ID: ENST00000631081
  CDS Start-End: 1-434
ctctgaagatggaaacaccaggaatgacaacaccgtcactgaagacagacggtgggagacgcacagccacatcaccaccccccacaacctcccagaccatcatttccaccattcccagcactgccatgcacacccgctccacagctgcccccatccccatcctgcctgagagaggagtttccctcttcccctatggggcaggcgccggggacctggagttcgtcaggaggaccgtggacttcacctccccactcttcaagccggcgactggcttcccccttggctcctctctccgtgattccctctacgcttcacaggccgggaccctgtggccctggtggctccgttctgggacgatgctgacttctccactggtcgggggaccacattttatcaggaatacgagacgttctatggtgaacacagcctgctagtccagcaggccgagtcttggattagaaagatgacaaacaacgggggctacaaggccaggtgggccctaaaggtcacgtgggtcaatgcccacgcctatcctgcccagtggaccctcgggagcaacacctaccaagccatcctctccacggacgggagcaggtcctatgccctgtttctctaccagagcggtgggatgcagtgggacgtggcccagcgctcagtggagatggctatttcgaaaacagcccactgatgtcccagccagtgtgggagaggtatcgccctgatagattcctgaattccaactcaggcctccaagggctgcagttctacaggctacaccgggaagaaaggcccaactaccgtctcgagtgcctgcagtggctgaagagccagcctcggtggcccagctggggctggaaccaggtctcctgcccttgttcctggcagcagggacgacgggacttacgattccaacccgtcagcataggtcgctggggcctcggcagtaggcagctgtgcagcttcacctcttggcgaggaggcgtgtgctgcagctacgggccctggggagagtttcgtgaaggctggcacgtgcagcgtccttggcagttggcccaggaactggagccacagagctggtgctgccgctggaatgacaagccctacctctgtgccctgtaccagcagaggcggccccacgtgggctgtgctacatacaggcccccacagcccgcctggatgttcggggacccccacatcaccaccttggatggtgtcagttacaccttcaatgggctgggggacttcctgctggtcggggcccaagacgggaactcctccttcctgcttcagggccgcaccgcccagactggctcagcccaggccaccaacttcatcgcctttgcggctcagtaccgctccagcagcctgggccccgtcacggtccaatggctccttgagcctcacgacgcaatccgtgtcctgctggataaccagactgtgacatttcagcctgaccatgaagacggcggaggccaggagacgttcaacgccaccggagtcctcctgagccgcaacggctctgaggtctcggccagcttcgacggctgggccaccgtctcggtgatcgcgctctccaacatcctccacgcctccgccagcctcccgcccgagtaccagaaccgcacggaggggctcctgggggtctggaataacaatccagaggacgacttcaggatgcccaatggctccaccattcccccagggagccctgaggagatgcttttccactttggaatgacctggcagatcaacgggacaggcctccttggcaagaggaatgaccagctgccttccaacttcacccctgttttctactcacaactgcaaaaaaacagctcctgggctgaacatttgatctccaactgtgacggagatagctcatgcatctatgacaccctggccctgcgcaacgcaagcatcggacttcacacgagggaagtcagtaaaaactacgagcaggcgaacgccaccctcaatcagtacccgccctccatcaatggtggtcgtgtgattgaagcctacaaggggcagaccacgctgattcagtacaccagcaatgctgaggatgccaacttcacgctcagagacagctgcaccgacttggagctctttgagaatgggacgttgctgtggacacccaagtcgctggagccattcactctggagattctagcaagaagtgccaagattggcttggcatctgcactccagcccaggactgtggtctgccattgcaatgcagagagccagtgtttgtacaatcagaccagcagggtgggcaactcctccctggaggtggctggctgcaagtgtgacgggggcaccttcggccgctactgcgagggctccgaggatgcctgtgaggagccgtgcttcccgagtgtccactgcgttcctgggaagggctgcgaggcctgccctccaaacctgactggggatgggcggcactgtgcggctctggggagctctttcctgtgtcagaaccagtcctgccctgtgaattactgctacaatcaaggccactgctacatctcccagactctgggctgtcagcccatgtgcacctgccccccagccttcactgacagccgctgcttcctggctgggaacaacttcagtccaactgtcaacctagaacttcccttaagagtcatccagctcttgctcagtgaagaggaaaatgcctccatggcagaagtcaacgcctcggtggcatacagactggggaccctggacatgcgggcctttctccgcaacagccaagtggaacgaatcgattctgcagcaccggcctcgggaagccccatccaacactggatggtcatctcggagttccagtaccgccctcggggcccggtcattgacttcctgaacaaccagctgctggccgcggtggtggaggcgttcttataccacgttccacggaggagtgaggagcccaggaacgacgtggtcttccagcccatctccggggaagacgtgcgcgatgtgacagccctgaacgtgagcacgctgaaggcttacttcagatgcgatggctacaagggctacgacctggtctacagcccccagagcggcttcacctgcgtgtccccgtgcagtaggggctactgtgaccatggaggccagtgccagcacctgcccagtgggccccgctgcagctgtgtgtccttctccatctacacggcctggggcgagcactgtgagcacctgagcatgaaactcgacgcgttcttcggcatcttctttggggccctgggcggcctcttgctgctgggggtcgggacgttcgtggtcctgcgcttctggggttgctccggggccaggttctcctatttcctgaactcagctgaggccttgccttgaaggggcagctgtggcctaggctacctcaagactcacctcatccttaccgcacatttaaggcgccattgcttttgggagactggaaaagggaaggtgactgaaggctgtcaggattcttcaaggagaatgaatactgggaatcaagacaagactataccttatccataggcgcaggtgcacagggggaggccataaagatcaaacatgcatggatgggtcctcacgcagacacacccacagaaggacactagcctgtgcacgcgcgcgtgcacacacacacacacacaagagttcataatgtggtgatggccctaagttaagcaaaatgcttctgcacacaaaactctctggtttacttcaaattaactctatttaaataaagtctctctgactttttgtgtcttcaaaa

SEQ ID NO: 155750 - DNA, 16094 bp, Homo sapiens
  Payload ID: 10597
  Gene Symbol: MUC4
  Gene Name: mucin 4, cell surface associated
  ENST ID: ENST00000630579
  CDS Start-End: 1-13298
gaaccacagaggacacattaataactggaagtaaaactgctgccccagtcacctcaacaggctcaacaacagcgacactagagggacaatcaactgcagcttcttcaaggacctctaatcaggacatatcagcttcatctcagaaccaccagactaagagcacggagaccaccagcaaagctcaaaccgacaccctcacgcagatgatgacatcaactcttttttcttccccaagtgtacacaatgtgatggagacagctcctccagatgaaatgaccacatcatttccctccagtgtcaccaacacactcatgatgacatcaaagactataacaatgacaacctccacagactccactcttggaaacacagaagagacatcaacagcaggaactgaaagttctaccccagtgacctcagcagtctcaataacagctggacaggaaggacaatcacgaacaacttcctggaggacctctatccaagacacatcagcttcttctcagaaccactggactcggagcacgcagaccaccagggaatctcaaaccagcaccctaacacacagaaccacttcaactccttctttctctccaagtgtacacaatgtgacagggactgtttctcagaagacatctccttcaggtgaaacagctacctcatccctctgtagtgtcacaaacacatccatgatgacatcagagaagataacagtgacaacctccacaggctccactcttggaaacccaggggagacatcatcagtacctgttactggaagtcttatgccagtcacctcagcagccttagtaacatttgatccagaaggacaatcaccagcaactttctcaaggacttctactcaggacacaacagctttttctaagaaccaccagactcagagcgtggagaccaccagagtatctcaaatcaacaccctcaacaccctcacaccggttacaacatcaactgttttatcctcaccaagtggattcaacccaagtggaacagtttctcaggagacattcccttctggtgaaacaaccacctcatccccttccagtgtcagcaatacattcctggtaacatcaaaggtgttcagaatgccaacctccagagactctactcttggaaacacagaggagacatcactatctgtaagtggaaccatttctgcaatcacttccaaagtttcaaccatatggtggtcagacactctgtcaacagcactctcccccagttctctacctccaaaaatatccacagctttccacacccagcagagtgaaggtgcagagaccacaggacggcctcatgagaggagctcattctctccaggtgtgtctcaagaaatatttactctacatgaaacaacaacatggccttcctcattctccagcaaaggccacacaacttggtcacaaacagaactgccctcaacatcaacaggtgctgccactaggcttgtcacaggaaatccatctacagggacagctggcactattccaagggtcccctctaaggtctcagcaataggggaaccaggagagcccaccacatactcctcccacagcacaactctcccaaaaacaacaggggcaggcgcccagacacaatggacacaagaaacggggaccactggagaggctcttctcagcagcccaagctacagtgtgactcagatgataaaaacggccacatccccatcttcttcacctatgctggatagacacacatcccaacaaattacaacggcaccatcaacaaatcattcaacaatacattccacaagcacctctcctcaggaatcaccagctgtttcccaaaggggtcacactcaagccccgcagaccacacaagaatcacaaaccacgaggtccgtctcccccatgactgacaccaagacagtcaccaccccaggttcttccttcacagccagtgggcactcgccctcagaaattgttcctcaggacgcacccaccataagtgcagcaacaacctttgccccagctcccaccggggatggtcacacaacccaggccccgaccacagcactgcaggcagcacccagcagccatgatgccaccctggggccctcaggaggcacgtcactttccaaaacaggtgcccttactctggccaactctgtagtgtcaacaccagggggcccagaaggacaatggacatcagcctctgccagcacctcacctgacacagcagcagccatgacccatacccaccaggctgagagcacagaggcctctggacaaacacagaccagcgaaccggcctcctcagggtcacgaaccacctcagcgggcacagctaccccttcctcatccggggcgagtggcacaacaccttcaggaagcgaaggaatatccacctcaggagagacgacaaggttttcatcaaacccctccagggacagtcacacaacccagtcaacaaccgaattgctgtccgcctcagccagtcatggtgccatcccagtaagcacaggaatggcgtcttcgatcgtccccggcacctttcatcccaccctctctgaggcctccactgcagggagaccgacaggacagtcaagcccaacttctcccagtgcctctcctcaggagacagccgccatttcccggatggcccagactcagaggacaagaaccagcagagggtctgacactatcagcctggcgtcccaggcaaccgacaccttctcaacagtcccacccacacctccatcgatcacatccactgggcttacatctccacaaaccgagacccacactctgtcaccttcagggtctggtaaaaccttcaccacggccctcatcagcaacgccacccctcttcctgtcacctacgcttcctcggcatccacaggtcacaccacccctcttcatgtcaccgatgcttcctcagtatccacaggtcacgccacccctcttcctgtcaccagcccttcctcagtatccacaggtcacaccacccctcttcctgtcaccgacacttcctcagaatccacaggtcacgtcacccctcttcctgtcaccagcttttcctcagcatccacaggtgacagcacccctcttcctgtcactgacacttcctcagcatccacaggtcacgtcacccctcttcctgtcaccagcctttcctcagcatccacaggtgacaccacccctcttcctgtcactgacacttcctcagcatccacaggtcacgccacctctcttcctgtcaccgacacttcctcagtatccacaggtcacaccacccctcttcctgtcaccgacacttcctcagcatccacaggtcacgccacctctcttcctgtcaccgacacttcctcagtatccacaggtcacaccacccctcttcatgtcactgatgcttcctcagcatccacaggtcaggccacccctcttcctgtcaccagcctttcctcagtatccacaggtgacaccacgcctcttcctgtcactagcccttcctcagcatccacaggtcacgccacccctcttcttgtcaccgacacttcctcagcatccacaggacacgccacccctcttcctgtcaccgacgcttcctcagtgtccacagatcacgccacctctcttcctgtaaccatcccttccgcagcatccacaggtcacaccacccctcttcctgtcaccgacacttcctcagcatccacaggtcaggccacctctcttcttgtcaccgacacttcctcagtatccacaggtgacaccacgcctcttcctgtcactagcacttcctcagcatccacaggtcacgtcactcctcttcatgtcaccagcccttcctcagcatccacaggtcacgccacccctcttcctgtcaccagcctttcctcagcatccacaggtgacaccatgcctcttcctgtcactagcccttcctcagcatccacaggtgacaccacccctcttcctgtcaccgacgcttcctcagtatccacaggtcacaccacccctcttcatgtcactgatgcttcctcagcatccacaggtcaggccacccctcttcctgtcaccagcctttcctcagtatccacaggtgacaccacgcctcttcctgtcactagcccttcctcagcatccacaggtcacgccacccctcttcttgtcaccgacacttcctcagcatccacaggacacgccacccctcttcctgtcaccgacgcttcctcagtgtccacagatcacgccacctctcttcctgtaaccatcccttccgcagcatccacaggtcacaccacccctcttcctgtcaccgacacttcctcagcatccacaggtcaggccacctctcttcttgtcaccgacacttcctcagtatccacaggtgacaccacgcctcttcctgtcactagcacttcctcagcatccacaggtcacgtcactcctcttcatgtcaccagcccttcctcagcatccacaggtcacgccacccctcttcctgtcaccagcctttcctcagcatccacaggtgacaccatgcctcttcctgtcactagcccttcctcagcatccacaggtgacaccacccctcttcctgtcaccgacgcttcctcagtatccacaggtcacaccacccctcttcctgtcaccagcccttcctcagcatctacaggtcacaccacccctcttcctgtcaccgacacttcctcagcatccaaaggtgacaccacccctcttcctgtcaccagcccttcctcagcatctacaggtcacaccacccctcttcctgtcaccgacacttcctcagcatccacaggtgacaccacccctcttcctgtcaccaatgcttcctcattatccacaggtcacgccacccctcttcatgtcaccagcccttcctcagcatccacaggtcacgccacccctcttcctgtcaccagcacttcctcagcatccaccggtcacgccacccctcttcctgtcaccggcctttcctcagctaccacagatgacaccacccgtcttcctgtcaccgacgtttcctcggcatccacaggtcaggccacccctcttcctgtcaccagcctttcctcagtatccacaggtgacaccacgcctcttcctgtcactagcccttcctcagcatccacaggtcacgccagccctcttcttgtcactgacgcttcctcagcatccacaggtcaggccacccctcttcctgtcaccgacacttcctcagtatccacagctcacgccaccccacttcctgtcaccggcctttcttcagcttccacagatgacaccacccgtcttcctgtcaccgacgtttcctcggcatccacaggtcaggccatccctcttcctgtcaccagcccttcctcagcatccacaggtgacaccacccctcttcctgtcaccgacgcttcctcagcatccacaggtgacaccacctctcttcctgtcaccatcccttcctcagcatcttcaggtcacaccacctctcttcctgtcaccgacgcttcctcagtgtccacaggtcacgccacctctcttcttgtcaccgacgcttcctcagtatccacaggtgacaccacccctcttcctgtcaccgacactaactcagcatccacaggtgacaccacccctcttcatgtcaccgacgcttcctcagtatccacaggtcacgccacctctcttcctgtcaccagcctttcctcagcatccacaggtgacaccacgcctcttcctgtcactagcccttcctcagcatcctcaggtcacaccacccctcttcctgtcaccgacgcttcctcagtacccacaggtcacgccacctctcttcctgtcaccgacgcttcctcagtgtccacaggtcacgccacccctcttcctgtcaccgacgcttcctcagtgtccacaggtcatgccacccctcttccggtcaccgacacttcctcagtatctacaggacaggccacccctcttcctgtcaccagcctttcctcagcatccacaggtgacaccacccctcttcctgtcaccgacacttcctcagcatccacaggtcacgccccccatcttcctgtcaccggcctttcctcagcttccacaggtgacaccacccgtcttcctgtcaccaacgtttcctcggcatccacaggtcatgccacccctcttcctgtcaccagcacttcctcagcatccacaggtgacaccacccctcttcctggcaccgacacttcctcagtatccacaggtcacaccacccctcttcttgtcaccgacgcttcgtcagtatccacaggtgacaccacccgtcttcctgtcaccagcccttcctcagcatctacaggtcacaccacccctcttcatgtcaccgatgcttcctcagtatccacaggtcacaccacccctcttcctgtcaccgacacttcctcagcatccacaggtcaggccacctctcttcttgtcaccgacacttcctcagtatccacaggtgacaccacgcctcttcctgtcactagcacttcctcagcatccacaggtcacgtcactcctcttcatgtcaccagcccttcctcagcatccacaggtcacgccacccctcttcctgtcaccagcctttcctcagcatccacaggtgacaccacccctcttcctgtcaccgacacttcctcagtatccacaggtcacaccacccctcttcctgtcaccagcccttcctcagcatctacaggtcacaccacccctcttcctgtcaccgacacttcctcagcatccaaaggtgacaccacccctcttcctgtcaccagcccttcctcagcatctacaggtcacaccacccctcttcctgtcaccgacacttcctcagcatccacaggtgacaccacccctcttcctgtcaccaatgcttcctcattatccacaggtcacgccacccctcttcatgtcaccagcccttcctcagcatccacaggtcacgccacccctcttcctgtcaccagcacttcctcagcatccaccggtcacgccacccctcttcctgtcaccagcacttcctcagcatccaccggtcacgccacccctcttcctgtcaccgacaattcctcagtatccacaggtcatgccacccctcttcctgtcaccggcctttcctcagctaccacagatgacaccacccgtcttcctgtcaccgacgtgtcctcggcatccacaggtcaggccacccctcttcctgtcaccagcctttcctcagtatccacaggtgacaccacgcctcttcctgtcactagcccttcctcagcatccacaggtcacgccagccctcttcttgtcactgacgcttcctcagcatccacaggtcaggccacccctcttcctgtcaccgacacttcctcagtatccacagctcacgccaccccacttcctgtcaccggcctttcctcagcttccacagatgacaccacccgtcttcctgtcaccgacgtttcctcggcatccacaggtcaggccatccctcttcctgtcaccagcccttcctcagcatccacaggtgacaccacccctcttcctgtcaccgacgcttcctcagcatccacaggtgacaccacctctcttcctgtcaccatcccttcctcagcatcttcaggtcacaccacctctcttcctgtcaccgacgcttcctcagtgtccacaggtcacgccacctctcttcttgtcaccgacgcttcctcagtatccacaggtgacaccacccctcttcctgtcaccgacactaactcagcatccacaggtgacaccacccctcttcatgtcaccgacgcttcctcagtatccacaggtcacgccacctctcttcctgtcaccagcctttcctcagcatccacaggtgacaccacgcctcttcctgtcactagcccttcctcagcatcctcaggtcacaccacctctcttcctgtcaccgacgcttcctcagtgtccacaggtcacgccacctctcttcctgtcaccatcccttcctcagcatcctcaggtcacaccacccctcttcctgtcaccgacgcttcctcagtacccacaggtcacgccacctctcttcctgtcaccgacgcttcctcagtgtccacaggtcacgccacccctcttcctgtcaccgacgcttcctcagtgtccacaggtcatgccacccctcttccggtcaccgacacttcctcagtatctacaggacaggccacccctcttcctgtcaccagcctttcctcagcatcatccactggtgacaccacgccgcttcctgtcactgatacttcctcagcatccacaggtcaggacacccctcttcctgtcaccagccttttctcagtatccacaggtgacaccacgcctcttcctgtcactagcccttcctcagcatccacaggtcacgccacccatcttcttgtcaccgacgcttcctcagtatccacaggtcacgccacctctcttcttgtcaccgacgcttcctcagtatccacaggtcacgccaccgctcttcatgtcaccgatgcttcctcattatccacaggggacaccacccctcttcctgtcaccagcccttcctcagcatccacaggtgacaccacccctcttcctgtcaccgacacttcctcagtatccacaggtcacgccacctctcttcctgtcactgacacttcctcagcatccacaggtcacgccacctctcttcctgtcaccgacacttcctcagcatccacaggtcaggccacccctcttcctgtcaccagcccttcctcagcatccacaggtcacgccatccctcttcttgtcaccgacacttcctcagcatccacaggacaggccacccctcttcctgtcaccagcctttcctcagcatccacaggtgacaccacccctcttcctgtcaccgatgcttcctcagtgtccacaggtcacgccacctctcttcctgtcaccagcctttcctcagtatccacaggtgacaccacccctcttcctgtcactagcccttcctcagcatccacaggtcacgccacccctcttcatgtcaccagcccttcctcagcatccacaggtcacgccacccctcttcctgtcaccagcctttcctcagcatccacaggtgacaccacgcctcttcctgtcactagcccttcctcagcatccacaggtcacgccacccctcttcatgtcaccgacgcttcctcagtatccacaggtgacaccacccctcttcctgtcaccagcccttcctcagcatcctcaggtcacaccacccctcttcctgtcaccgacgcttcctcagcatccacaggtgacaccacccctcttcctgtcaccgacacttcctcagcatccacaggtcacgccacccatcttcctgtcaccggcctttcctcagcttccacaggtgacaccacccgtcttcctgtcaccgacgtttcctcggcatccacaggtcatgccacccctcttcctgtcaccagcacttcctcagcatccacaggtgacaccacccctcttcctggcaccgacacttcctcagtatccacaggtcacaccacccctcttcttgtcaccgacgcttcgtcagtatccacaggtgacaccacccgtcttcctgtcaccagcccttcctcagcatctacaggtcacaccacccctctacctgtcaccgacactccctcagcatccacaggtgacaccacccctcttcctgtcaccaatgcttcctcattatccacacgtcacgccacctctcttcatgtcaccagcccttcctcagcatccaccggtcacgccacccctcttcctgttaccgacacttccgcagcatccacaggtcacgccacccctcttcctgtcaccagcacttcctcagcatccacaggtgacaccacccctcttcctgtcaccgacacttcctcagcatccacaggtcatgccacccctcttcctgtcaccaacacttcctcagtatccacaggtcacgccacccctcttcatgtcaccagcccttcctcagcatccacaggtcacaccacccctcttcctgtcaccgacgcttcgtcagtgtccacaggtcacgccacctctcttcctgtcaccgacgcttcctcagtgtccacaggtcacgccacccctcttcctgtcaccgacgcttcctcagtgtccacaggtcacgctacccctcttcctctcaccagcctttcctcagtatccacaggtgacaccacgcctcttcctgtcaccgacacttcctcagcatccacaggtcaggccacccctcttcctgtcaccagcctttcctcagtatccacaggtgacaccacccctcttcctgtcaccgacacttcctcagcatccacaggtcacgccacctctcttcctgtcaccgacacttcctcagcatccacaggtcacgccacccctcttcatgtcaccagcccttcctcagcatccaccggtcacgccaccccgcttcctgtcaccgacacttcctcagcatccacaggtcacgccacccctcttcctgtcaccagcctttcctcagtatccacaggtgacaccacgcctcttcctgtcactagcccttcctcagcatccacaggtcacgccactcctcttcttgtcaccgacgcttcctcagcatccacaggtcaggccacccctcttcctgtcaccagcctttcctcagtatccacaggtgacaccacgcctcttcctgtcactagcccttcctcagcatccaccggtcatgccacctctcttcctgtcaccgacacttcctcagcatccacaggtgacaccacctctcttcctgtcaccgacacttcctcagcatacacaggtgacaccacctctcttcctgtcaccgacacttcctcatcatccacaggtgacaccacccctcttcttgtcaccgagacttcctcagcatccacaggtgacaccacccctgtgcctgtcaccgacacttcctcagtatccacaggtcacgccacccctcttcctgtcaccggcctttcctcagcttccacaggtgacaccacccgtcttcctgtcaccgacatttcctcggcatccacaggtcaggccacccctcttcctgtcaccaacacttcctcagtatccacaggtgacaccatgcctcttcctgtcactagcccttcctcagcatccacaggtcacgccacccctcttcctgtcaccagcacttcctcagcatccaccggtcacgccacccctgttcctgtcaccagcacttcctcagcatccacaggtcacaccacccctcttcctgtcaccagcccttcctcagcatctacaggtcacaccacccctcttcctgtcaccgacacttcctcagcatccacaggtgacaccacccctcttcctgtcaccaatgcttcctcattatccacaggacacaccacccctcttcatgtcaccatcccttcctcagcatccacaggtgacaccagcactcttcctgtcaccggcgcttcctcagcatccaccggtcacgccacccctcttcctgtcaccgacacttcctcagtatccacaggtcacgccacccctcttcctgtcaccagcttttcctcagtatccacaggtgacaccacccctcttcctgtcaccgacgcttcctcggcatccaccggtcacgccacccctcttcctgtcaccgacacttcctcagcatccacaggtgacaccacccctcttcctgtcaccgacgcttcctcggcatccacaggtcaggccacccctcttcctgtcaccagcctttcctcagtatcaacaggtgacaccacgcctcttcctgtcaccatcccttcctcagcatcctcaggtcacaccacctctcttcctgtcagcgacacttcctcagcatccacaggtcaggccacccctcttcctgtcaccagcctttcctcagtatccacaggtgacaccacccctcttcttgtcaccgacgcttcctcagtatccacaggtcacgccacccctcttcctgtcaccgacacttcctcagcatccacaggtgacaccacccgtcttcctgtcacggacacttcctcagcatccacaggtcaggccacccctcttcctgtcaccagcctttcctcagtatccacaggtgacaccacccctcttcttgtcaccaacacttcctcagtatccacaggtcacgccacctctcttcctgtcaccatcccttcctcatcatcctcaggtcacaccacccctcttcctgtcaccagcacttcctcagtatctacaggtcacgtcacccctcttcatgtcaccagcccttcctcatcatccacaggtcaggccacccctcttcctgtcaccagcacttcctcatcatccacaggtcaggccacccctcttcctgtcaccagcacttcctcagcatccacaggtcacgccacccctcttcctgtcaccgacgcttcctcagtgtccacaggtcacgccacgcctcttcctgtcaccgacacttcctcagcatccacaggtgacaccacccctcttcctgtcaccgacacttcctcagcatccacaggtcaggccacccctcttcctgtcaccagcctttcctcagtatccacaggtcacgccacccctcttgctgtcagcagtgctacctcagcttccacagtatcctcggactcccctctgaagatggaaacatcaggaatgacaacaccgtcactgaagacagacggtgggagacgcacagccacatcaccaccccccacaacctcccagaccatcatttccaccattcccagcactgccatgcacacccgctccacagctgcccccatccccatcctgcctgagagaggagtttccctcttcccctatggggcagacgccggggacctggagttcgtcaggaggaccgtggacttcacctccccactcttcaagccggcgactggcttcccccttggctcctctctccgtgattccctctacttcacagacaatggccagatcatcttcccagagtcagactaccagattttctcctaccccaacccactcccaacaggcttcacaggccgggaccctgtggccctggtggctccgttctgggacgatgctgacttctccactggtcgggggaccacattttatcagagcaacacctaccaagccatcctctccacggacgggagcaggtcctatgccctgtttctctaccagagcggtgggatgcagtgggacgtggcccagcgctcagtggagatggctatttcgaaaacagcccactgatgtcccagccagtgtgggagaggtatcgccctgatagattcctgaattccaactcaggcctccaagggctgcagttctacaggctacaccgggaagaaaggcccaactaccgtctcgagtgcctgcagtggctgaagagccagcctcggtggcccagctggggctggaaccaggtctcctgcccttgttcctggcagcagggacgacgggacttacgattccaacccgtcagcataggtcgctggggcctcggcagtaggcagctgtgcagcttcacctcttggcgaggaggcgtgtgctgcagctacgggccctggggagagtttcgtgaaggctggcacgtgcagcgtccttggcagttggcccaggaactggagccacagagctggtgctgccgctggaatgacaagccctacctctgtgccctgtaccagcagaggcggccccacgtgggctgtgctacatacaggcccccacagcccgcctggatgttcggggacccccacatcaccaccttggatggtgtcagttacaccttcaatgggctgggggacttcctgctggtcggggcccaagacgggaactcctccttcctgcttcagggccgcaccgcccagactggctcagcccaggccaccaacttcatcgcctttgcggctcagtaccgctccagcagcctgggccccgtcacggtccaatggctccttgagcctcacgacgcaatccgtgtcctgctggataaccagactgtgacatttcagcctgaccatgaagacggcggaggccaggagacgttcaacgccaccggagtcctcctgagccgcaacggctctgaggtctccgccagcttcgacggctgggccaccgtctcggtgatcgcgctctccaacatcctccactcctccgccagcctcccgcccgagtaccagaaccgcacggaggggctcctgggggtctggaataacaatccagaggacgacttcaggatgcccaatggctccaccattcccccagggagccctgaggagatgcttttccactttggaatgacctggcagatcaacgggacaggcctccttggcaagaggaatgaccagctgccttccaacttcacccctgttttctactcacaactgcaaaaaaacagctcctgggctgaacatttgatctccaactgtgacggagatagctcatgcatctatgacaccctggccctgcgcaacgcaagcatcggacttcacacgagggaagtcagtaaaaactacgagcaggcgaacgccaccctcaatcagtacccgccctccatcaatggtggtcgtgtgattgaagcctacaaggggcagaccacgctgattcagtacaccagcaatgctgaggatgccaacttcacgctcagagacagctgcaccgacttggagctctttgagaatgggacgttgctgtggacacccaagtcgctggagccattcactctggagattctagcaagaagtgccaagattggcttggcatctgcactccagcccaggactgtggtctgccattgcaatgcagagagccagtgtttgtacaatcagaccagcagggtgggcaactcctccctggaggtggctggctgcaagtgtgacgggggcaccttcggccgctactgcgagggctccgaggatgcctgtgaggagccgtgcttcccgagtgtccactgcgttcctgggaagggctgcgaggcctgccctccaaacctgactggggatgggcggcactgtgcggctctggggagctctttcctgtgtcagaaccagtcctgccctgtgaattactgctacaatcaaggccactgctacatctcccagactctgggctgtcagcccatgtgcacctgccccccagccttcactgacagccgctgcttcctggctgggaacaacttcagtccaactgtcaacctagaacttcccttaagagtcatccagctcttgctcagtgaagaggaaaatgcctccatggcagaggtcaacgcctcggtggcatacagactggggaccctggacatgcgggcctttctccgcaacagccaagtggaacgaatcgattctgcagcaccggcctcgggaagccccatccaacactggatggtcatctcggagttccagtaccgccctcggggcccggtcattgacttcctgaacaaccagctgctggccgcggtggtggaggcgttcttataccacgttccacggaggagtgaggagcccaggaacgacgtggtcttccagcccatctccggggaagacgtgcgcgatgtgacagccctgaacgtgagcacgctgaaggcttacttcagatgcgatggctacaagggctacgacctggtctacagcccccagagcggcttcacctgcgtgtccccgtgcagtaggggctactgtgaccatggaggccagtgccagcacctgcccagtgggccccgctgcagctgtgtgtccttctccatctacacggcctggggcgagcactgtgagcacctgagcatgaaactcgacgcgttcttcggcatcttctttggggccctgggcggcctcttgctgctgggggtcgggacgttcgtggtcctgcgcttctggggttgctccggggccaggttctcctatttcctgaactcagctgaggccttgccttgaaggggcagctgtggcctaggctacctcaagactcacctcatccttaccgcacatttaaggcgccattgcttttgggagactggaaaagggaaggtgactgaaggctgtcaggattctt

SEQ ID NO: 155751 - DNA, 16091 bp, Homo sapiens; identical to SEQ ID NO: 155691
  Payload ID: 10597
  Gene Symbol: MUC4
  Gene Name: mucin 4, cell surface associated
  ENST ID: ENST00000630459
  CDS Start-End: 1-13295

SEQ ID NO: 155752 - DNA, 3775 bp, Homo sapiens; identical to SEQ ID NO: 155749
  Payload ID: 10597
  Gene Symbol: MUC4
  Gene Name: mucin 4, cell surface associated
  ENST ID: ENST00000626390
  CDS Start-End: 1-434

SEQ ID NO: 155753 - DNA, 16289 bp, Homo sapiens
  Payload ID: 10597
  Gene Symbol: MUC4
  Gene Name: mucin 4, cell surface associated
  ENST ID: ENST00000630037
  CDS Start-End: 1-13211
gaaccacagaggacacattaataactggaagtaaaactgctgccccagtcacctcaacaggctcaacaacagcgacactagagggacaatcaactgcagcttcttcaaggacctctaatcaggacatatcagcttcatctcagaaccaccagactaagagcacggagaccaccagcaaagctcaaaccgacaccctcacgcagatgatgacatcaactcttttttcttccccaagtgtacacaatgtgatggagacagctcctccagatgaaatgaccacatcatttccctccagtgtcaccaacacactcatgatgacatcaaagactataacaatgacaacctccacagactccactcttggaaacacagaagagacatcaacagcaggaactgaaagttctaccccagtgacctcagcagtctcaataacagctggacaggaaggacaatcacgaacaacttcctggaggacctctatccaagacacatcagcttcttctcagaaccactggactcggagcacgcagaccaccagggaatctcaaaccagcaccctaacacacagaaccacttcaactccttctttctctccaagtgtacacaatgtgacagggactgtttctcagaagacatctccttcaggtgaaacagctacctcatccctctgtagtgtcacaaacacatccatgatgacatcagagaagataacagtgacaacctccacaggctccactcttggaaacccaggggagacatcatcagtacctgttactggaagtcttatgccagtcacctcagcagccttagtaacatttgatccagaaggacaatcaccagcaactttctcaaggacttctactcaggacacaacagctttttctaagaaccaccagactcagagcgtggagaccaccagagtatctcaaatcaacaccctcaacaccctcacaccggttacaacatcaactgttttatcctcaccaagtggattcaacccaagtggaacagtttctcaggagacattcccttctggtgaaacaaccacctcatccccttccagtgtcagcaatacattcctggtaacatcaaaggtgttcagaatgccaacctccagagactctactcttggaaacacagaggagacatcactatctgtaagtggaaccatttctgcaatcacttccaaagtttcaaccatatggtggtcagacactctgtcaacagcactctcccccagttctctacctccaaaaatatccacagctttccacacccagcagagtgaaggtgcagagaccacaggacggcctcatgagaggagctcattctctccaggtgtgtctcaagaaatatttactctacatgaaacaacaacatggccttcctcattctccagcaaaggccacacaacttggtcacaaacagaactgccctcaacatcaacaggtgctgccactaggcttgtcacaggaaatccatctacagggacagctggcactattccaagggtcccctctaaggtctcagcaataggggaaccaggagagcccaccacatactcctcccacagcacaactctcccaaaaacaacaggggcaggcgcccagacacaatggacacaagaaacggggaccactggagaggctcttctcagcagcccaagctacagtgtgactcagatgataaaaacggccacatccccatcttcttcacctatgctggatagacacacatcccaacaaattacaacggcaccatcaacaaatcattcaacaatacattccacaagcacctctcctcaggaatcaccagctgtttcccaaaggggtcacactcaagccccgcagaccacacaagaatcacaaaccacgaggtccgtctcccccatgactgacaccaagacagtcaccaccccaggttcttccttcacagccagtgggcactcgccctcagaaattgttcctcaggacgcacccaccataagtgcagcaacaacctttgccccagctcccaccggggatggtcacacaacccaggccccgaccacagcactgcaggcagcacccagcagccatgatgccaccctggggccctcaggaggcacgtcactttccaaaacaggtgcccttactctggccaactctgtagtgtcaacaccagggggcccagaaggacaatggacatcagcctctgccagcacctcacctgacacagcagcagccatgacccatacccaccaggctgagagcacagaggcctctggacaaacacagaccagcgaaccggcctcctcagggtcacgaaccacctcagcgggcacagctaccccttcctcatccggggcgagtggcacaacaccttcaggaagcgaaggaatatccacctcaggagagacgacaaggttttcatcaaacccctccagggacagtcacacaacccagtcaacaaccgaattgctgtccgcctcagccagtcatggtgccatcccagtaagcacaggaatggcgtcttcgatcgtccccggcacctttcatcccaccctctctgaggcctccactgcagggagaccgacaggacagtcaagcccaacttctcccagtgcctctcctcaggagacagccgccatttcccggatggcccagactcagaggacaagaaccagcagagggtctgacactatcagcctggcgtcccaggcaaccgacaccttctcaacagtcccacccacacctccatcgatcacatccactgggcttacatctccacaaaccgagacccacactctgtcaccttcagggtctggtaaaaccttcaccacggccctcatcagcaacgccacccctcttcctgtcacctacgcttcctcggcatccacaggtcacaccacccctcttcatgtcaccgatgcttcctcagtatccacaggtcacgccacccctcttcctgtcaccagcccttcctcagtatccacaggtcacaccacccctcttcctgtcaccgacacttcctcagaatccacaggtcacgtcacccctcttcctgtcaccagcttttcctcagcatccacaggtgacagcacccctcttcctgtcactgacacttcctcagcatccacaggtcacgtcacccctcttcctgtcaccagcctttcctcagcatccacaggtgacaccacccctcttcctgtcactgacacttcctcagcatccacaggtcacgccacctctcttcctgtcaccgacacttcctcagtatccacaggtcacaccacccctcttcctgtcaccgacacttcctcagcatccacaggtcacgccacctctcttcctgtcaccgacacttcctcagtatccacaggtcacaccacccctcttcatgtcactgatgcttcctcagcatccacaggtcaggccacccctcttcctgtcaccagcctttcctcagtatccacaggtgacaccacgcctcttcctgtcactagcccttcctcagcatccacaggtcacgccacccctcttcttgtcaccgacacttcctcagcatccacaggacacgccacccctcttcctgtcaccgacgcttcctcagtgtccacagatcacgccacctctcttcctgtaaccatcccttccgcagcatccacaggtcacaccacccctcttcctgtcaccgacacttcctcagcatccacaggtcaggccacctctcttcttgtcaccgacacttcctcagtatccacaggtgacaccacgcctcttcctgtcactagcacttcctcagcatccacaggtcacgtcactcctcttcatgtcaccagcccttcctcagcatccacaggtcacgccacccctcttcctgtcaccagcctttcctcagcatccacaggtgacaccatgcctcttcctgtcactagcccttcctcagcatccacaggtgacaccacccctcttcctgtcaccgacgcttcctcagtatccacaggtcacaccacccctcttcatgtcactgatgcttcctcagcatccacaggtcaggccacccctcttcctgtcaccagcctttcctcagtatccacaggtgacaccacgcctcttcctgtcactagcccttcctcagcatccacaggtcacgccacccctcttcttgtcaccgacacttcctcagcatccacaggacacgccacccctcttcctgtcaccgacgcttcctcagtgtccacagatcacgccacctctcttcctgtaaccatcccttccgcagcatccacaggtcacaccacccctcttcctgtcaccgacacttcctcagcatccacaggtcaggccacctctcttcttgtcaccgacacttcctcagtatccacaggtgacaccacgcctcttcctgtcactagcacttcctcagcatccacaggtcacgtcactcctcttcatgtcaccagcccttcctcagcatccacaggtcacgccacccctcttcctgtcaccagcctttcctcagcatccacaggtgacaccatgcctcttcctgtcactagcccttcctcagcatccacaggtgacaccacccctcttcctgtcaccgacgcttcctcagtatccacaggtcacaccacccctcttcctgtcaccagcccttcctcagcatctacaggtcacaccacccctcttcctgtcaccgacacttcctcagcatccaaaggtgacaccacccctcttcctgtcaccagcccttcctcagcatctacaggtcacaccacccctcttcctgtcaccgacacttcctcagcatccacaggtgacaccacccctcttcctgtcaccaatgcttcctcattatccacaggtcacgccacccctcttcatgtcaccagcccttcctcagcatccacaggtcacgccacccctcttcctgtcaccagcacttcctcagcatccaccggtcacgccacccctcttcctgtcaccggcctttcctcagctaccacagatgacaccacccgtcttcctgtcaccgacgtttcctcggcatccacaggtcaggccacccctcttcctgtcaccagcctttcctcagtatccacaggtgacaccacgcctcttcctgtcactagcccttcctcagcatccacaggtcacgccagccctcttcttgtcactgacgcttcctcagcatccacaggtcaggccacccctcttcctgtcaccgacacttcctcagtatccacagctcacgccaccccacttcctgtcaccggcctttcttcagcttccacagatgacaccacccgtcttcctgtcaccgacgtttcctcggcatccacaggtcaggccatccctcttcctgtcaccagcccttcctcagcatccacaggtgacaccacccctcttcctgtcaccgacgcttcctcagcatccacaggtgacaccacctctcttcctgtcaccatcccttcctcagcatcttcaggtcacaccacctctcttcctgtcaccgacgcttcctcagtgtccacaggtcacgccacctctcttcttgtcaccgacgcttcctcagtatccacaggtgacaccacccctcttcctgtcaccgacactaactcagcatccacaggtgacaccacccctcttcatgtcaccgacgcttcctcagtatccacaggtcacgccacctctcttcctgtcaccagcctttcctcagcatccacaggtgacaccacgcctcttcctgtcactagcccttcctcagcatcctcaggtcacaccacccctcttcctgtcaccgacgcttcctcagtacccacaggtcacgccacctctcttcctgtcaccgacgcttcctcagtgtccacaggtcacgccacccctcttcctgtcaccgacgcttcctcagtgtccacaggtcatgccacccctcttccggtcaccgacacttcctcagtatctacaggacaggccacccctcttcctgtcaccagcctttcctcagcatccactggtgacaccacgccgcttcctgtcaccgatacttcctcagcatccacaggtcaggacacccctcttcctgtcaccagcctttcctcagtatccacaggtgacaccacgcctcttcctgtcactaacccttcctcagcatccacaggtcacgccacccctcttcttgtcaccgacgcttcctcaatatccacaggtcacgccacctctcttcttgtcaccgacgcttcctcagtatccacaggtcacgccaccgctcttcatgacaccgatgcttcctcattatccacaggggacaccacccctcttcctgtcaccagcccttcctcaacatccacaggtgacaccacccctcttcctgtcaccgaaacttcctcagtatccacaggtcacgccacctctcttcctgtcaccgacacttcctcagcatccacaggtcacgccacctctcttcctgtcaccgacacttcctcagcatccacaggtcacgccacccctcttcctgtcaccgacacttcctcagcatccacaggtcaggccacccctcttcctgtcaccagcccttcctcagcatccacaggtcacgccatccctcttcttgtcaccgacacttcctcagcatccacaggacaggccacccctcttcctgtcaccagcctttcctcagcatccacaggtgacaccacccctcttcctgtcaccgacgcttcctcagtgtccacaggtcacgccacctctcttcctgtcaccagcctttcctcagtatccacaggtgacaccactcctcttcctgtcactagcccttcctcagcatccacaggtcacgccacccctcttcatgtcaccgacgcttcctcagcatccacaggtcacgccacccctcttcctgtcaccagcctttcctcagcatccacaggtgacaccacgcctcttcctgtcactagcccttcctcagcatccacaggtcacgccacccctcttcatgtcaccgacgcttcctcagtatccacaggtgacaccacccctcttcctgtcaccagctcttcctcagcatcctcaggtcacaccacccctcttcctgtcaccgacgcttcctcagcatccacaggtgacaccacccctcttcctgtcaccgacacttcctcagcatccacaggtcacgccacccatcttcctgtcaccggcctttcctcagcttccacaggtgacaccacccgtcttcctgtcaccaacgtttcctcggcatccacaggtcatgccacccctcttcctgtcaccagcacttcctcagcatccacaggtgacaccacccctcttcctggcaccgacacttcctcagtatccacaggtcacaccacccctcttcttgtcaccgacgcttcgtcagtatccacaggtgacaccacccgtcttcctgtcaccagcccttcctcagcatctacaggtcacaccacccctctacctgtcaccgacactccctcagcatccacaggtgacaccacccctcttcctgtcaccaatgcttcctcattatccacacgtcacgccacctctcttcatgtcaccagcccttcctcagcatccacaggtcacgccacctctcttcctgtcaccgacacttccgcagcatccacaggtcacgccacccctcttcctgtcaccagcacttcctcagcatccacaggtgacaccacccctcttcctgtcaccgacacttactcagcatccacaggtcaggccacccctcttcctgtcaccagcctttcctcagtatccacaggtgacaccacgcctcttcctgtcactagcccttcctcagcatccacaggtcacgccactcctcttcttgtcaccgacgcttcctcagcatccacaggtcaggccacccctcttcctgtcaccagcctttcctcagtatccacaggtgacaccacgcctcttcctgtcactagcccttcctcagcatccaccggtcatgccacctctcttcctgtcaccgacacttcctcagcatccacaggtgacaccacctctcttcctgtcaccgacacttcctcagcatacacaggtgacaccacctctcttcctgtcaccgacacttcctcatcatccacaggtgacaccacccctcttcttgtcaccgagacttcctcagtatccacaggtgacaccacccctcttcctgtcaccgacacttcctcagcatccacaggtcacgccacccctcttcctgtcaccaacacttcctcagtatccacaggtcacgccacccctcttcatgtcaccagcccttcctcagcatccacaggtcacaccacccctcttcctgtcaccgacgcttcgtcagtgtccacaggtcacgccacctctcttcctgtcaccgacgcttcctcagtgttcacaggtcatgccacctctcttcctgtcaccatcccttcctcagcatcctcaggtcacaccacccctcttcctgtcaccgacgcttcctcagtgtccacaggtcacgccacctctcttcctgtcaccgacgcttcctcagtgtccacaggtcatgccacccctcttcctgtcaccgacgcttcctcagtgtccacaggtcacgctacccctcttcctctcaccagcctttcctcagtatccacaggtgacaccacgcctcttcctgtcaccgacacttcctcagcatccacaggtcaggccacccctcttcctgtcaccagcctttcctcagtatccacaggtgacaccacccctcttcctgtcaccgacacttcctcagcatccacaggtcacgccacctctcttcctgtcaccgacacttcctcagcatccacaggtcacgccacccctcttcctgacaccgacacttcctcagcatccacaggtcacgccacccttcttcctgtcaccgacacttcctcagcatccataggtcacgccacctctcttcctgtcaccgacacttcctcaatatccacaggtcacgccacccctcttcatgtcaccagcccttcctcagcatccaccggtcacgccaccccgcttcctgtcaccgacacttcctcagcatccacaggtcacgccaaccctcttcatgtcaccagcccttcctcagcatccaccggtcacgccaccccgcttcctgtcaccgacacttcctcagcatccacaggtcacgccacccctcttcctgtcaccagcctttcctcagtatccacaggtgacaccacgcctcttcctgtcactagcccttcctcagcatccacaggtcacaccacccctcttcctgtcaccgacacttcctcagcatccacaggtcaggccaccgctcttcctgtcaccagcacttcctcagcatccacaggtgacaccacccctcttcctgtcaccgacacttcctcagcatccacaggtcaggccacccctcttcctgtcaccagcctttcctcagtatccacaggtgacaccacgcctcttcctgtcactagcccttcctcagcatccacaggtcacgccactcctcttcttgtcaccgacgcttcctcagcatccacaggtcaggccacccctcttcctgtcaccagcctttcctcagtatccacaggtgacaccacgcctcttcctgtcactagcccttcctcagcatccaccggtcatgccacctctcttcctgtcaccgacacttcctcagcatccacaggtgacaccacctctcttcctgtcaccgacacttcctcagcatacacaggtgacaccacctctcttcctgtcaccgacacttcctcatcatccacaggtgacaccacccctcttcttgtcaccgagacttcctcagtatccacaggtcacgccactcctcttcttgtcaccgacgcttcctcagcatccacaggtcacgccacccctcttcatgtcaccagcccttcctcagcatccacaggtgacaccacccctgtgcctgtcaccgacacttcctcagtatccacaggtcacgccacccctcttcctgtcaccggcctttcctcagcttccacaggtgacaccacccgtcttcctgtcaccgacatttcctcggcatccacaggtcaggccacccctcttcctgtcaccaacacttcctcagtatccacaggtgacaccatgcctcttcctgtcactagcccttcctcagcatccacaggtcacgccacccctcttcctgtcaccagcacttcctcagcatccaccggtcacgccacccctgttcctgtcaccagcacttcctcagcatctacaggtcacaccacccctcttcctgtcaccgacacttcctcagcatccacaggtgacaccacccctcttcctgtcaccagcccttcctcagcatctacaggtcacaccacccctcttcatgtcaccatcccttcctcagcatccacaggtgacaccagcactcttcctgtcaccggcgcttcctcagcatccaccggtcacgccacccctcttcctgtcaccgacacttcctcagtatccaccggtcacgccacgcctcttcctgtcaccagcctttcctcagtatccacaggtgacaccacccctcttcctgtcaccgacgcttcctcggcatccacaggtcaggccacccctcttcctgtcaccagcctttcctcagtatccacaggtgacaccacccctcttcttgtcaccgacgcttcctcagtatccacaggtcacgccacccctcttcctgtcaccgacacttcctcagcatccacaggtgacaccacccgtcttcctgtcacggacacttcctcagcatccacaggtcaggccacccctcttcctgtcaccagcctttcctcagtatccacaggtgacaccacccctcttcttgtcaccgacgcttcctcagtatccacaggtcacgccacccctcttcctgtcaccgacacttcctcagcatccacaggtgacaccacccgtcttcctgtcacggacacttcctcagcatccacaggtcaggccacccctcttcctgtcaccatcccttcctcatcatcctcaggtcacaccacccctcttcctgtcaccagcacttcctcagtatctacaggtcacgtcacccctcttcatgtcaccagcccttcctcagcatccacaggtcacgtcacccctcttcctgtcaccagcacttcctcagcatccacaggtcacgccacccctcttcttgtcaccgacgcttcctcagtgtccacaggtcacgccacgcctcttcctgtcaccgacgcttcctcagcatccacaggtgacaccacccctcttcctgtcaccgacacttcctcagcatccacaggtcaggccacccctcttcctgtcaccagcctttcctcagtatccacaggtgacaccacccctcttcctgtcaccgacgcttcctcagcatccacaggtcacgccacccctcttcctgtcaccatcccttcctcagtatccacaggtgacaccatgcctcttcctgtcactagcccttcctcagcatccacaggtcacgccacccctcttcctgttaccggcctttcctcagcttccacaggtgacaccacccctcttcctgtcaccgacacttcctcagcatccacacgtcacgccacccctcttcctgtcaccgacacttcctcagcttccacagatgacaccacccgtcttcctgtcaccgacgtttcctcggcatccacaggacatgccacccctcttcctgtcaccagcacttcctcagcatccacaggtgacaccacccctcttcctgtcaccgacacttcctcagtatccacaggtcacgccacctctcttcctgtcaccagccgttcctcagcatccacaggtcacgccaccccccttcctgtcaccgacacttcctcagtatccacaggtcacgccacccctcttcctgtcaccagcacttcctcagtatctacaggtcacgccacccctcttcctgtcaccagcccttcctcagcatccacaggtcacgccacccctgttcctgtcaccagcacttcctcagcatccacaggtgacaccacccctcttcctgtcaccaatgcttcctcattatccacaggtcacgccacccctcttcatgtcaccagcccttcctcagcatccagaggtgacaccagcactcttcctgtcaccgatgcttcctcagcatccaccggtcacgccacccctcttcctctcaccagcctttcctcagtatccacaggtgacaccacgcctcttcctgtcaccgacacttcctctgcatccacaggtcaggccacccctcttcctgtcaccagcctttcctcagtatccacaggtgacaccacgcctcttcctgtcaccatcccttcctcagcatcctcaggtcacaccacctctcttcctgtcaccgacgcttcctcagtgtccacaggtcacggcacccctcttcctgtcaccagcacttcctcagcatccacaggtgacaccacccctcttcctgtcaccgacacttcctcagcatccacaggtcacgccacccctcttcctgtcaccgacacttcctcagcatccacaggtcacgccacccctcttcctgtcaccagcctttcctcagtatccacaggtcacgccacccctcttgctgtcagcagtgctacctcagcttccacagtatcctcggactcccctctgaagatggaaacaccaggaatgacaacaccgtcactgaagacagacggtgggagacgcacagccacatcaccaccccccacaacctcccagaccatcatttccaccattcccagcactgccatgcacacccgctccacagctgcccccatccccatcctgcctgagagaggtgaggccatacaggagtttccctcttcccctatggggcaggcgccggggacctggagttcgtcaggaggaccgtggacttcacctccccactcttcaagccggcgactggcttcccccttggctcctctctccgtgattccctctacttcacagacaatggccagatcatcttcccagagtcagactaccagattttctcctaccccaacccactcccaacaggcttcacaggccgggaccctgtggccctggtggctccgttctgggacgatgctgacttctccactggtcgggggaccacattttatcaggaatacgagacgttctatggtgaacacagcctgctagtccagcaggccgagtcttggattagaaagatgacaaacaacgggggctacaaggccaggtgggccctaaaggtcacgtgggtcaatgcccacgcctatcctgcccagtggaccctcgggagcaacacctaccaagccatcctctccacggacgggagcaggtcctatgccctgtttctctaccagagcggtgggatgcagtgggacgtggcccagcgctcaggcaacccggtgctcatgggcttctctagtggagatggctatttcgaaaacagcccactgatgtcccagccagtgtgggagaggtatcgccctgatagattcctgaattccaactcaggcctccaagggctgcagttctacaggctacaccgggaagaaaggcccaactaccgtctcgagtgcctgcagtggctgaagagccagcctcggtggcccagctggggctggaaccaggtctcctgcccttgttcctggcagcagggacgacgggacttacgattccaacccgtcagcataggtcgctggggcctcggcagtaggcagctgtgcagcttcacctcttggcgaggaggcgtgtgctgcagctacgggccctggggagagtttcgtgaaggctggcacgtgcagcgtccttggcagttggcccaggaactggagccacagagctggtgctgccgctggaatgacaagccctacctctgtgccctgtaccagcagaggcggccccacgtgggctgtgctacatacaggcccccacagcccgcctggatgttcggggacccccacatcaccaccttggatggtgtcagttacaccttcaatgggctgggggacttcctgctggtcggggcccaagacgggaactcctccttcctgcttcagggccgcaccgcccagactggctcagcccaggccaccaacttcatcgcctttgcggctcagtaccgctccagcagcctgggccccgtcacggtccaatggctccttgagcctcacgacgcaatccgtgtcctgctggataaccagactgtgacatttcagcctgaccatgaagacggcggaggccaggagacgttcaacgccaccggagtcctcctgagccgcaacggctctgaggtctcggccagcttcgacggctgggccaccgtctcggtgatcgcgctctccaacatcctccacgcctccgccagcctcccgcccgagtaccagaaccgcacggaggggctcctgggggtctggaataacaatccagaggacgacttcaggatgcccaatggctccaccattcccccagggagccctgaggagatgcttttccactttggaatgacctggcagatcaacgggacaggcctccttggcaagaggaatgaccagctgccttccaacttcacccctgttttctactcacaactgcaaaaaaacagctcctgggctgaacatttgatctccaactgtgacggagatagctcatgcatctatgacaccctggccctgcgcaacgcaagcatcggacttcacacgagggaagtcagtaaaaactacgagcaggcgaacgccaccctcaatcagtacccgccctccatcaatggtggtcgtgtgattgaagcctacaaggggcagaccacgctgattcagtacaccagcaatgctgaggatgccaacttcacgctcagagacagctgcaccgacttggagctctttgagaatgggacgttgctgtggacacccaagtcgctggagccattcactctggagattctagcaagaagtgccaagattggcttggcatctgcactccagcccaggactgtggtctgccattgcaatgcagagagccagtgtttgtacaatcagaccagcagggtgggcaactcctccctggaggtggctggctgcaagtgtgacgggggcaccttcggccgctactgcgagggctccgaggatgcctgtgaggagccgtgcttcccgagtgtccactgcgttcctgggaagggctgcgaggcctgccctccaaacctgactggggatgggcggcactgtgcggctctggggagctctttcctgtgtcagaaccagtcctgccctgtgaattactgctacaatcaaggccactgctacatctcccagactctgggctgtcagcccatgtgcacctgccccccagccttcactgacagccgctgcttcctggctgggaacaacttcagtccaactgtcaacctagaacttcccttaagagtcatccagctcttgctcagtgaagaggaaaatgcctccatggcagaagtcaacgcctcggtggcatacagactggggaccctggacatgcgggcctttctccgcaacagccaagtggaacgaatcgattctgcagcaccggcctcgggaagccccatccaacactggatggtcatctcggagttccagtaccgccctcggggcccggtcattgacttcctgaacaaccagctgctggccgcggtggtggaggcgttcttataccacgttccacggaggagtgaggagcccaggaacgacgtggtcttccagcccatctccggggaagacgtgcgcgatgtgacagccctgaacgtgagcacgctgaaggcttacttcagatgcgatggctacaagggctacgacctggtctacagcccccagagcggcttcacctgcgtgtccccgtgcagtaggggctactgtgaccatggaggccagtgccaacacctgcccagtgggccccgctgcagctgtgtgtccttctccatctacacggcctggggcgagcactgtgagcacctgagcatgaaactcgacgcgttcttcggcatcttctttggggccctgggcggcctcttgctgctgggggtcgggacgttcgtggtcctgcgcttctggggttgctccggggccaggttctcctatttcctgaactcagctgaggccttgccttgaaggggcagctgtggcctaggctacctcaagactcacctcatccttaccgcacatttaaggcgccattgcttttgggagactggaaaagggaaggtgactgaaggctgtcaggattctt

SEQ ID NO: 155754 - DNA, 16199 bp, Homo sapiens; identical to SEQ ID NO: 155736
  Payload ID: 10597
  Gene Symbol: MUC4
  Gene Name: mucin 4, cell surface associated
  ENST ID: ENST00000630325
  CDS Start-End: 1-13121

SEQ ID NO: 155755 - DNA, 16464 bp, Homo sapiens
  Payload ID: 10597
  Gene Symbol: MUC4
  Gene Name: mucin 4, cell surface associated
  ENST ID: ENST00000626113
  CDS Start-End: 1-13121
gaaccacagaggacacattaataactggaagtaaaactgctgccccagtcacctcaacaggctcaacaacagcgacactagagggacaatcaactgcagcttcttcaaggacctctaatcaggacatatcagcttcatctcagaaccaccagactaagagcacggagaccaccagcaaagctcaaaccgacaccctcacgcagatgatgacatcaactcttttttcttccccaagtgtacacaatgtgatggagacagctcctccagatgaaatgaccacatcatttccctccagtgtcaccaacacactcatgatgacatcaaagactataacaatgacaacctccacagactccactcttggaaacacagaagagacatcaacagcaggaactgaaagttctaccccagtgacctcagcagtctcaataacagctggacaggaaggacaatcacgaacaacttcctggaggacctctatccaagacacatcagcttcttctcagaaccactggactcggagcacgcagaccaccagggaatctcaaaccagcaccctaacacacagaaccacttcaactccttctttctctccaagtgtacacaatgtgacagggactgtttctcagaagacatctccttcaggtgaaacagctacctcatccctctgtagtgtcacaaacacatccatgatgacatcagagaagataacagtgacaacctccacaggctccactcttggaaacccaggggagacatcatcagtacctgttactggaagtcttatgccagtcacctcagcagccttagtaacatttgatccagaaggacaatcaccagcaactttctcaaggacttctactcaggacacaacagctttttctaagaaccaccagactcagagcgtggagaccaccagagtatctcaaatcaacaccctcaacaccctcacaccggttacaacatcaactgttttatcctcaccaagtggattcaacccaagtggaacagtttctcaggagacattcccttctggtgaaacaaccacctcatccccttccagtgtcagcaatacattcctggtaacatcaaaggtgttcagaatgccaacctccagagactctactcttggaaacacagaggagacatcactatctgtaagtggaaccatttctgcaatcacttccaaagtttcaaccatatggtggtcagacactctgtcaacagcactctcccccagttctctacctccaaaaatatccacagctttccacacccagcagagtgaaggtgcagagaccacaggacggcctcatgagaggagctcattctctccaggtgtgtctcaagaaatatttactctacatgaaacaacaacatggccttcctcattctccagcaaaggccacacaacttggtcacaaacagaactgccctcaacatcaacaggtgctgccactaggcttgtcacaggaaatccatctacagggacagctggcactattccaagggtcccctctaaggtctcagcaataggggaaccaggagagcccaccacatactcctcccacagcacaactctcccaaaaacaacaggggcaggcgcccagacacaatggacacaagaaacggggaccactggagaggctcttctcagcagcccaagctacagtgtgactcagatgataaaaacggccacatccccatcttcttcacctatgctggatagacacacatcccaacaaattacaacggcaccatcaacaaatcattcaacaatacattccacaagcacctctcctcaggaatcaccagctgtttcccaaaggggtcacactcaagccccgcagaccacacaagaatcacaaaccacgaggtccgtctcccccatgactgacaccaagacagtcaccaccccaggttcttccttcacagccagtgggcactcgccctcagaaattgttcctcaggacgcacccaccataagtgcagcaacaacctttgccccagctcccaccggggatggtcacacaacccaggccccgaccacagcactgcaggcagcacccagcagccatgatgccaccctggggccctcaggaggcacgtcactttccaaaacaggtgcccttactctggccaactctgtagtgtcaacaccagggggcccagaaggacaatggacatcagcctctgccagcacctcacctgacacagcagcagccatgacccatacccaccaggctgagagcacagaggcctctggacaaacacagaccagcgaaccggcctcctcagggtcacgaaccacctcagcgggcacagctaccccttcctcatccggggcgagtggcacaacaccttcaggaagcgaaggaatatccacctcaggagagacgacaaggttttcatcaaacccctccagggacagtcacacaacccagtcaacaaccgaattgctgtccgcctcagccagtcatggtgccatcccagtaagcacaggaatggcgtcttcgatcgtccccggcacctttcatcccaccctctctgaggcctccactgcagggagaccgacaggacagtcaagcccaacttctcccagtgcctctcctcaggagacagccgccatttcccggatggcccagactcagaggacaagaaccagcagagggtctgacactatcagcctggcgtcccaggcaaccgacaccttctcaacagtcccacccacacctccatcgatcacatccactgggcttacatctccacaaaccgagacccacactctgtcaccttcagggtctggtaaaaccttcaccacggccctcatcagcaacgccacccctcttcctgtcacctacgcttcctcggcatccacaggtcacaccacccctcttcatgtcaccgatgcttcctcagtatccacaggtcacgccacccctcttcctgtcaccagcccttcctcagtatccacaggtcacaccacccctcttcctgtcaccgacacttcctcagaatccacaggtcacgtcacccctcttcctgtcaccagcttttcctcagcatccacaggtgacagcacccctcttcctgtcactgacacttcctcagcatccacaggtcacgtcacccctcttcctgtcaccagcctttcctcagcatccacaggtgacaccacccctcttcctgtcactgacacttcctcagcatccacaggtcacgccacctctcttcctgtcaccgacacttcctcagtatccacaggtcacaccacccctcttcctgtcaccgacacttcctcagcatccacaggtcacgccacctctcttcctgtcaccgacacttcctcagtatccacaggtcacaccacccctcttcatgtcactgatgcttcctcagcatccacaggtcaggccacccctcttcctgtcaccagcctttcctcagtatccacaggtgacaccacgcctcttcctgtcactagcccttcctcagcatccacaggtcacgccacccctcttcttgtcaccgacacttcctcagcatccacaggacacgccacccctcttcctgtcaccgacgcttcctcagtgtccacagatcacgccacctctcttcctgtaaccatcccttccgcagcatccacaggtcacaccacccctcttcctgtcaccgacacttcctcagcatccacaggtcaggccacctctcttcttgtcaccgacacttcctcagtatccacaggtgacaccacgcctcttcctgtcactagcacttcctcagcatccacaggtcacgtcactcctcttcatgtcaccagcccttcctcagcatccacaggtcacgccacccctcttcctgtcaccagcctttcctcagcatccacaggtgacaccatgcctcttcctgtcactagcccttcctcagcatccacaggtgacaccacccctcttcctgtcaccgacgcttcctcagtatccacaggtcacaccacccctcttcatgtcactgatgcttcctcagcatccacaggtcaggccacccctcttcctgtcaccagcctttcctcagtatccacaggtgacaccacgcctcttcctgtcactagcccttcctcagcatccacaggtcacgccacccctcttcttgtcaccgacacttcctcagcatccacaggacacgccacccctcttcctgtcaccgacgcttcctcagtgtccacagatcacgccacctctcttcctgtaaccatcccttccgcagcatccacaggtcacaccacccctcttcctgtcaccgacacttcctcagcatccacaggtcaggccacctctcttcttgtcaccgacacttcctcagtatccacaggtgacaccacgcctcttcctgtcactagcacttcctcagcatccacaggtcacgtcactcctcttcatgtcaccagcccttcctcagcatccacaggtcacgccacccctcttcctgtcaccagcctttcctcagcatccacaggtgacaccatgcctcttcctgtcactagcccttcctcagcatccacaggtgacaccacccctcttcctgtcaccgacgcttcctcagtatccacaggtcacaccacccctcttcctgtcaccagcccttcctcagcatctacaggtcacaccacccctcttcctgtcaccgacacttcctcagcatccaaaggtgacaccacccctcttcctgtcaccagcccttcctcagcatctacaggtcacaccacccctcttcctgtcaccgacacttcctcagcatccacaggtgacaccacccctcttcctgtcaccaatgcttcctcattatccacaggtcacgccacccctcttcatgtcaccagcccttcctcagcatccacaggtcacgccacccctcttcctgtcaccagcacttcctcagcatccaccggtcacgccacccctcttcctgtcaccggcctttcctcagctaccacagatgacaccacccgtcttcctgtcaccgacgtttcctcggcatccacaggtcaggccacccctcttcctgtcaccagcctttcctcagtatccacaggtgacaccacgcctcttcctgtcactagcccttcctcagcatccacaggtcacgccagccctcttcttgtcactgacgcttcctcagcatccacaggtcaggccacccctcttcctgtcaccgacacttcctcagtatccacagctcacgccaccccacttcctgtcaccggcctttcttcagcttccacagatgacaccacccgtcttcctgtcaccgacgtttcctcggcatccacaggtcaggccatccctcttcctgtcaccagcccttcctcagcatccacaggtgacaccacccctcttcctgtcaccgacgcttcctcagcatccacaggtgacaccacctctcttcctgtcaccatcccttcctcagcatcttcaggtcacaccacctctcttcctgtcaccgacgcttcctcagtgtccacaggtcacgccacctctcttcttgtcaccgacgcttcctcagtatccacaggtgacaccacccctcttcctgtcaccgacactaactcagcatccacaggtgacaccacccctcttcatgtcaccgacgcttcctcagtatccacaggtcacgccacctctcttcctgtcaccagcctttcctcagcatccacaggtgacaccacgcctcttcctgtcactagcccttcctcagcatcctcaggtcacaccacccctcttcctgtcaccgacgcttcctcagtacccacaggtcacgccacctctcttcctgtcaccgacgcttcctcagtgtccacaggtcacgccacccctcttcctgtcaccgacgcttcctcagtgtccacaggtcatgccacccctcttccggtcaccgacacttcctcagtatctacaggacaggccacccctcttcctgtcaccagcctttcctcagcatccactggtgacaccacgccgcttcctgtcaccgatacttcctcagcatccacaggtcaggacacccctcttcctgtcaccagcctttcctcagtatccacaggtgacaccacgcctcttcctgtcactaacccttcctcagcatccacaggtcacgccacccctcttcttgtcaccgacgcttcctcaatatccacaggtcacgccacctctcttcttgtcaccgacgcttcctcagtatccacaggtcacgccaccgctcttcatgacaccgatgcttcctcattatccacaggggacaccacccctcttcctgtcaccagcccttcctcaacatccacaggtgacaccacccctcttcctgtcaccgaaacttcctcagtatccacaggtcacgccacctctcttcctgtcaccgacacttcctcagcatccacaggtcacgccacctctcttcctgtcaccgacacttcctcagcatccacaggtcacgccacccctcttcctgtcaccgacacttcctcagcatccacaggtcaggccacccctcttcctgtcaccagcccttcctcagcatccacaggtcacgccatccctcttcttgtcaccgacacttcctcagcatccacaggacaggccacccctcttcctgtcaccagcctttcctcagcatccacaggtgacaccacccctcttcctgtcaccgacgcttcctcagtgtccacaggtcacgccacctctcttcctgtcaccagcctttcctcagtatccacaggtgacaccactcctcttcctgtcactagcccttcctcagcatccacaggtcacgccacccctcttcatgtcaccgacgcttcctcagcatccacaggtcacgccacccctcttcctgtcaccagcctttcctcagcatccacaggtgacaccacgcctcttcctgtcactagcccttcctcagcatccacaggtcacgccacccctcttcatgtcaccgacgcttcctcagtatccacaggtgacaccacccctcttcctgtcaccagctcttcctcagcatcctcaggtcacaccacccctcttcctgtcaccgacgcttcctcagcatccacaggtgacaccacccctcttcctgtcaccgacacttcctcagcatccacaggtcacgccacccatcttcctgtcaccggcctttcctcagcttccacaggtgacaccacccgtcttcctgtcaccaacgtttcctcggcatccacaggtcatgccacccctcttcctgtcaccagcacttcctcagcatccacaggtgacaccacccctcttcctggcaccgacacttcctcagtatccacaggtcacaccacccctcttcttgtcaccgacgcttcgtcagtatccacaggtgacaccacccgtcttcctgtcaccagcccttcctcagcatctacaggtcacaccacccctctacctgtcaccgacactccctcagcatccacaggtgacaccacccctcttcctgtcaccaatgcttcctcattatccacacgtcacgccacctctcttcatgtcaccagcccttcctcagcatccacaggtcacgccacctctcttcctgtcaccgacacttccgcagcatccacaggtcacgccacccctcttcctgtcaccagcacttcctcagcatccacaggtgacaccacccctcttcctgtcaccgacacttactcagcatccacaggtcaggccacccctcttcctgtcaccagcctttcctcagtatccacaggtgacaccacgcctcttcctgtcactagcccttcctcagcatccacaggtcacgccactcctcttcttgtcaccgacgcttcctcagcatccacaggtcaggccacccctcttcctgtcaccagcctttcctcagtatccacaggtgacaccacgcctcttcctgtcactagcccttcctcagcatccaccggtcatgccacctctcttcctgtcaccgacacttcctcagcatccacaggtgacaccacctctcttcctgtcaccgacacttcctcagcatacacaggtgacaccacctctcttcctgtcaccgacacttcctcatcatccacaggtgacaccacccctcttcttgtcaccgagacttcctcagtatccacaggtgacaccacccctcttcctgtcaccgacacttcctcagcatccacaggtcacgccacccctcttcctgtcaccaacacttcctcagtatccacaggtcacgccacccctcttcatgtcaccagcccttcctcagcatccacaggtcacaccacccctcttcctgtcaccgacgcttcgtcagtgtccacaggtcacgccacctctcttcctgtcaccgacgcttcctcagtgttcacaggtcatgccacctctcttcctgtcaccatcccttcctcagcatcctcaggtcacaccacccctcttcctgtcaccgacgcttcctcagtgtccacaggtcacgccacctctcttcctgtcaccgacgcttcctcagtgtccacaggtcatgccacccctcttcctgtcaccgacgcttcctcagtgtccacaggtcacgctacccctcttcctctcaccagcctttcctcagtatccacaggtgacaccacgcctcttcctgtcaccgacacttcctcagcatccacaggtcaggccacccctcttcctgtcaccagcctttcctcagtatccacaggtgacaccacccctcttcctgtcaccgacacttcctcagcatccacaggtcacgccacctctcttcctgtcaccgacacttcctcagcatccacaggtcacgccacccctcttcctgacaccgacacttcctcagcatccacaggtcacgccacccttcttcctgtcaccgacacttcctcagcatccataggtcacgccacctctcttcctgtcaccgacacttcctcaatatccacaggtcacgccacccctcttcatgtcaccagcccttcctcagcatccaccggtcacgccaccccgcttcctgtcaccgacacttcctcagcatccacaggtcacgccaaccctcttcatgtcaccagcccttcctcagcatccaccggtcacgccaccccgcttcctgtcaccgacacttcctcagcatccacaggtcacgccacccctcttcctgtcaccagcctttcctcagtatccacaggtgacaccacgcctcttcctgtcactagcccttcctcagcatccacaggtcacaccacccctcttcctgtcaccgacacttcctcagcatccacaggtcaggccaccgctcttcctgtcaccagcacttcctcagcatccacaggtgacaccacccctcttcctgtcaccgacacttcctcagcatccacaggtcaggccacccctcttcctgtcaccagcctttcctcagtatccacaggtgacaccacgcctcttcctgtcactagcccttcctcagcatccacaggtcacgccactcctcttcttgtcaccgacgcttcctcagcatccacaggtcaggccacccctcttcctgtcaccagcctttcctcagtatccacaggtgacaccacgcctcttcctgtcactagcccttcctcagcatccaccggtcatgccacctctcttcctgtcaccgacacttcctcagcatccacaggtgacaccacctctcttcctgtcaccgacacttcctcagcatacacaggtgacaccacctctcttcctgtcaccgacacttcctcatcatccacaggtgacaccacccctcttcttgtcaccgagacttcctcagtatccacaggtcacgccactcctcttcttgtcaccgacgcttcctcagcatccacaggtcacgccacccctcttcatgtcaccagcccttcctcagcatccacaggtgacaccacccctgtgcctgtcaccgacacttcctcagtatccacaggtcacgccacccctcttcctgtcaccggcctttcctcagcttccacaggtgacaccacccgtcttcctgtcaccgacatttcctcggcatccacaggtcaggccacccctcttcctgtcaccaacacttcctcagtatccacaggtgacaccatgcctcttcctgtcactagcccttcctcagcatccacaggtcacgccacccctcttcctgtcaccagcacttcctcagcatccaccggtcacgccacccctgttcctgtcaccagcacttcctcagcatctacaggtcacaccacccctcttcctgtcaccgacacttcctcagcatccacaggtgacaccacccctcttcctgtcaccagcccttcctcagcatctacaggtcacaccacccctcttcatgtcaccatcccttcctcagcatccacaggtgacaccagcactcttcctgtcaccggcgcttcctcagcatccaccggtcacgccacccctcttcctgtcaccgacacttcctcagtatccaccggtcacgccacgcctcttcctgtcaccagcctttcctcagtatccacaggtgacaccacccctcttcctgtcaccgacgcttcctcggcatccacaggtcaggccacccctcttcctgtcaccagcctttcctcagtatccacaggtgacaccacccctcttcttgtcaccgacgcttcctcagtatccacaggtcacgccacccctcttcctgtcaccgacacttcctcagcatccacaggtgacaccacccgtcttcctgtcacggacacttcctcagcatccacaggtcaggccacccctcttcctgtcaccagcctttcctcagtatccacaggtgacaccacccctcttcttgtcaccgacgcttcctcagtatccacaggtcacgccacccctcttcctgtcaccgacacttcctcagcatccacaggtgacaccacccgtcttcctgtcacggacacttcctcagcatccacaggtcaggccacccctcttcctgtcaccatcccttcctcatcatcctcaggtcacaccacccctcttcctgtcaccagcacttcctcagtatctacaggtcacgtcacccctcttcatgtcaccagcccttcctcagcatccacaggtcacgtcacccctcttcctgtcaccagcacttcctcagcatccacaggtcacgccacccctcttcttgtcaccgacgcttcctcagtgtccacaggtcacgccacgcctcttcctgtcaccgacgcttcctcagcatccacaggtgacaccacccctcttcctgtcaccgacacttcctcagcatccacaggtcaggccacccctcttcctgtcaccagcctttcctcagtatccacaggtgacaccacccctcttcctgtcaccgacgcttcctcagcatccacaggtcacgccacccctcttcctgtcaccatcccttcctcagtatccacaggtgacaccatgcctcttcctgtcactagcccttcctcagcatccacaggtcacgccacccctcttcctgttaccggcctttcctcagcttccacaggtgacaccacccctcttcctgtcaccgacacttcctcagcatccacacgtcacgccacccctcttcctgtcaccgacacttcctcagcttccacagatgacaccacccgtcttcctgtcaccgacgtttcctcggcatccacaggacatgccacccctcttcctgtcaccagcacttcctcagcatccacaggtgacaccacccctcttcctgtcaccgacacttcctcagtatccacaggtcacgccacctctcttcctgtcaccagccgttcctcagcatccacaggtcacgccaccccccttcctgtcaccgacacttcctcagtatccacaggtcacgccacccctcttcctgtcaccagcacttcctcagtatctacaggtcacgccacccctcttcctgtcaccagcccttcctcagcatccacaggtcacgccacccctgttcctgtcaccagcacttcctcagcatccacaggtgacaccacccctcttcctgtcaccaatgcttcctcattatccacaggtcacgccacccctcttcatgtcaccagcccttcctcagcatccagaggtgacaccagcactcttcctgtcaccgatgcttcctcagcatccaccggtcacgccacccctcttcctctcaccagcctttcctcagtatccacaggtgacaccacgcctcttcctgtcaccgacacttcctctgcatccacaggtcaggccacccctcttcctgtcaccagcctttcctcagtatccacaggtgacaccacgcctcttcctgtcaccatcccttcctcagcatcctcaggtcacaccacctctcttcctgtcaccgacgcttcctcagtgtccacaggtcacggcacccctcttcctgtcaccagcacttcctcagcatccacaggtgacaccacccctcttcctgtcaccgacacttcctcagcatccacaggtcacgccacccctcttcctgtcaccgacacttcctcagcatccacaggtcacgccacccctcttcctgtcaccagcctttcctcagtatccacaggtcacgccacccctcttgctgtcagcagtgctacctcagcttccacagtatcctcggactcccctctgaagatggaaacaccaggaatgacaacaccgtcactgaagacagacggtgggagacgcacagccacatcaccaccccccacaacctcccagaccatcatttccaccattcccagcactgccatgcacacccgctccacagctgcccccatccccatcctgcctgagagaggagtttccctcttcccctatggggcaggcgccggggacctggagttcgtcaggaggaccgtggacttcacctccccactcttcaagccggcgactggcttcccccttggctcctctctccgtgattccctctacgcttcacaggccgggaccctgtggccctggtggctccgttctgggacgatgctgacttctccactggtcgggggaccacattttatcaggaatacgagacgttctatggtgaacacagcctgctagtccagcaggccgagtcttggattagaaagatgacaaacaacgggggctacaaggccaggtgggccctaaaggtcacgtgggtcaatgcccacgcctatcctgcccagtggaccctcgggagcaacacctaccaagccatcctctccacggacgggagcaggtcctatgccctgtttctctaccagagcggtgggatgcagtgggacgtggcccagcgctcagtggagatggctatttcgaaaacagcccactgatgtcccagccagtgtgggagaggtatcgccctgatagattcctgaattccaactcaggcctccaagggctgcagttctacaggctacaccgggaagaaaggcccaactaccgtctcgagtgcctgcagtggctgaagagccagcctcggtggcccagctggggctggaaccaggtctcctgcccttgttcctggcagcagggacgacgggacttacgattccaacccgtcagcataggtcgctggggcctcggcagtaggcagctgtgcagcttcacctcttggcgaggaggcgtgtgctgcagctacgggccctggggagagtttcgtgaaggctggcacgtgcagcgtccttggcagttggcccaggaactggagccacagagctggtgctgccgctggaatgacaagccctacctctgtgccctgtaccagcagaggcggccccacgtgggctgtgctacatacaggcccccacagcccgcctggatgttcggggacccccacatcaccaccttggatggtgtcagttacaccttcaatgggctgggggacttcctgctggtcggggcccaagacgggaactcctccttcctgcttcagggccgcaccgcccagactggctcagcccaggccaccaacttcatcgcctttgcggctcagtaccgctccagcagcctgggccccgtcacggtccaatggctccttgagcctcacgacgcaatccgtgtcctgctggataaccagactgtgacatttcagcctgaccatgaagacggcggaggccaggagacgttcaacgccaccggagtcctcctgagccgcaacggctctgaggtctcggccagcttcgacggctgggccaccgtctcggtgatcgcgctctccaacatcctccacgcctccgccagcctcccgcccgagtaccagaaccgcacggaggggctcctgggggtctggaataacaatccagaggacgacttcaggatgcccaatggctccaccattcccccagggagccctgaggagatgcttttccactttggaatgacctggcagatcaacgggacaggcctccttggcaagaggaatgaccagctgccttccaacttcacccctgttttctactcacaactgcaaaaaaacagctcctgggctgaacatttgatctccaactgtgacggagatagctcatgcatctatgacaccctggccctgcgcaacgcaagcatcggacttcacacgagggaagtcagtaaaaactacgagcaggcgaacgccaccctcaatcagtacccgccctccatcaatggtggtcgtgtgattgaagcctacaaggggcagaccacgctgattcagtacaccagcaatgctgaggatgccaacttcacgctcagagacagctgcaccgacttggagctctttgagaatgggacgttgctgtggacacccaagtcgctggagccattcactctggagattctagcaagaagtgccaagattggcttggcatctgcactccagcccaggactgtggtctgccattgcaatgcagagagccagtgtttgtacaatcagaccagcagggtgggcaactcctccctggaggtggctggctgcaagtgtgacgggggcaccttcggccgctactgcgagggctccgaggatgcctgtgaggagccgtgcttcccgagtgtccactgcgttcctgggaagggctgcgaggcctgccctccaaacctgactggggatgggcggcactgtgcggctctggggagctctttcctgtgtcagaaccagtcctgccctgtgaattactgctacaatcaaggccactgctacatctcccagactctgggctgtcagcccatgtgcacctgccccccagccttcactgacagccgctgcttcctggctgggaacaacttcagtccaactgtcaacctagaacttcccttaagagtcatccagctcttgctcagtgaagaggaaaatgcctccatggcagaagtcaacgcctcggtggcatacagactggggaccctggacatgcgggcctttctccgcaacagccaagtggaacgaatcgattctgcagcaccggcctcgggaagccccatccaacactggatggtcatctcggagttccagtaccgccctcggggcccggtcattgacttcctgaacaaccagctgctggccgcggtggtggaggcgttcttataccacgttccacggaggagtgaggagcccaggaacgacgtggtcttccagcccatctccggggaagacgtgcgcgatgtgacagccctgaacgtgagcacgctgaaggcttacttcagatgcgatggctacaagggctacgacctggtctacagcccccagagcggcttcacctgcgtgtccccgtgcagtaggggctactgtgaccatggaggccagtgccagcacctgcccagtgggccccgctgcagctgtgtgtccttctccatctacacggcctggggcgagcactgtgagcacctgagcatgaaactcgacgcgttcttcggcatcttctttggggccctgggcggcctcttgctgctgggggtcgggacgttcgtggtcctgcgcttctggggttgctccggggccaggttctcctatttcctgaactcagctgaggccttgccttgaaggggcagctgtggcctaggctacctcaagactcacctcatccttaccgcacatttaaggcgccattgcttttgggagactggaaaagggaaggtgactgaaggctgtcaggattcttcaaggagaatgaatactgggaatcaagacaagactataccttatccataggcgcaggtgcacagggggaggccataaagatcaaacatgcatggatgggtcctcacgcagacacacccacagaaggacactagcctgtgcacgcgcgcgtgcacacacacacacacacacacgagttcataatgtggtgatggccctaagttaagcaaaatgcttctgcacacaaaactctctggtttacttcaaattaactctatttaaataaagtctctctgactttttgtgtctccaaaa

SEQ ID NO: 155756 - DNA, 23128 bp, Homo sapiens
  Payload ID: 10597
  Gene Symbol: MUC4
  Gene Name: mucin 4, cell surface associated
  ENST ID: ENST00000626947
  CDS Start-End: 461-22717
tacagccccaaggtcgctccctctggggccctttcttccccattcttcccagcagcccaaagctctggtgggacaggggcagcccctggggagggaggagaggacccaggaacccggctaggagggtggcccacccatttccagtgtgacctgttcccattcccccatgtctcctcccatccctcccgccactcagctcaggctgatgagaagcagagcaacgggtgtatcggtgttttctttcctggtggggtagtggggtggggctgaggagagaaaagggtgattagcgtggggccccgccctcttttgtcctcttcccaggttccctggccccttcggagaaacgcacttggttcgggccagccgcctgaggggacgggctcacgtctgctcctcacactgcagctgctgggccgtggagcttccccagggagccagggggacttttgccgcagccatgaagggggcacgctggaggagggtcccctgggtgtccctgagctgcctgtgtctctgcctccttccgcatgtggtcccaggaaccacagaggacacattaataactggaagtaaaactcctgccccagtcacctcaacaggctcaacaacagcgacactagagggacaatcaactgcagcttcttcaaggacctctaatcaggacatatcagcttcatctcagaaccaccagactaagagcacggagaccaccagcaaagctcaaaccgacaccctcacgcagatgatgacatcaactcttttttcttccccaagtgtacacaatgtgatggagactgttacgcaggagacagctcctccagatgaaatgaccacatcatttccctccagtgtcaccaacacactcatgatgacatcaaagactataacaatgacaacctccacagactccactcttggaaacacagaagagacatcaacagcaggaactgaaagttctaccccagtgacctcagcagtctcaataacagctggacaggaaggacaatcacgaacaacttcctggaggacctctatccaagacacatcagcttcttctcagaaccactggactcggagcacgcagaccaccagggaatctcaaaccagcaccctaacacacagaaccacttcaactccttctttctctccaagtgtacacaatgtgacagggactgtttctcagaagacatctccttcaggtgaaacagctacctcatccctctgtagtgtcacaaacacatccatgatgacatcagagaagataacagtgacaacctccacaggctccactcttggaaacccaggggagacatcatcagtacctgttactggaagtcttatgccagtcacctcagcagccttagtaacagttgatccagaaggacaatcaccagtaactttctcaaggacttctactcaggacacaacagctttttctaagaaccaccagactcagagcgtggagaccaccagagtatctcaaatcaacaccctcaacaccctcacaccggttacaacatcaactgttttatcctcaccaagtggattcaacccaagtggaacagtttctcaggagacattcccttctggtgaaacaaccatctcatccccttccagtgtcagcaatacattcctggtaacatcaaaggtgttcagaatgccaatctccagagactctactcttggaaacacagaggagacatcactatctgtaagtggaaccatttctgcaatcacttccaaagtttcaaccatatggtggtcagacactctgtcaacagcactctcccccagttctctacctccaaaaatatccacagctttccacacccagcagagtgaaggtgcagagaccacaggacggcctcatgagaggagctcattctctccaggtgtgtctcaagaaatatttactctacatgaaacaacaacatggccttcctcattctccagcaaaggccacacaacttggtcacaaacagaactgccctcaacatcaacaggtgctgccactaggcttgtcacaggaaatccatctacaggggcagctggcactattccaagggtcccctctaaggtctcagcaataggggaaccaggagagcccaccacatactcctcccacagcacaactctcccaaaaacaacaggggcaggcgcccagacacaatggacacaagaaacggggaccactggagaggctcttctcagcagcccaagctacagtgtgactcagatgataaaaacggccacatccccatcttcttcacctatgctggatagacacacatcacaacaaattacaacggcaccatcaacaaatcattcaacaatacattccacaagcacctctcctcaggaatcaccagctgtttcccaaaggggtcacactcaagccccgcagaccacacaagaatcacaaaccacgaggtccgtctcccccatgactgacaccaagacagtcaccaccccaggttcttccttcacagccagtgggcactcgccctcagaaattgttcctcaggacgcacccaccataagtgcagcaacaacctttgccccagctcccaccggggatggtcacacaacccaggccccgaccacagcactgcaggcagcacccagcagccatgatgccaccctggggccctcaggaggcacgtcactttccaaaacaggtgcccttactctggccaactctgtagtgtcaacaccagggggcccagaaggacaatggacatcagcctctgccagcacctcacctgacacagcagcagccatgacccatacccaccaggctgagagcacagaggcctctggacaaacacagaccagcgaaccggcctcctcagggtcacgaaccacctcagcgggcacagctaccccttcctcatccggggcgagtggcacaacaccttcaggaagcgaaggaatatccacctcaggagagacgacaaggttttcatcaaacccctccagggacagtcacacaacccagtcaacaaccgaattgctgtccgcctcagccagtcatggtgccatcccagtaagcacaggaatggcgtcttcgatcgtccccggcacctttcatcccaccctctctgaggcctccactgcagggagaccgacaggacagtcaagcccaacttctcccagtgcctctcctcaggagacagccgccatttcccggatggcccagactcagaggacaagaaccagcagagggtctgacactatcagcctggcgtcccaggcaaccgacaccttctcaacagtcccacccacacctccatcgatcacatccagtgggcttacatctccacaaacccagacccacactctgtcaccttcagggtctggtaaaaccttcaccacggccctcatcagcaacgccacccctcttcctgtcacctacgcttcctcggcatccacaggtcacaccacccctcttcatgtcaccgatgcttcctcagtatccacaggtcacgccacccctcttcctgtcaccgacacttcctcagaatccacaggtcacgccacccctcttcctgtcaccagcccttcctcagtatccacaggtcacaccacccctcttcctgtcaccgacacttcctcagaatccacaggtcatgtcacccctcttcctgtcaccagcctttcctcagcatccacaggtgacagcacccctcttcctgtcactgacacttcctcagcatccacaggtcacgtcacccctcttcctgtcaccagcctttcctcagcatccacaggtgacaccacccctcttcctgtcactgacacttcctcagcatccacaggtcacgccacctctcttcctgtcaccgacacttcctcagtatccacaggtcacaccacccctcttcctgtcaccgacacttcctcagcatccacaggtcacgccacctctcttcctgtcaccgacacttcctcagtatccacagctcacgccaccccacttcctgtcaccggcctttcttcagcttccacagatgacaccacccgtcttcctgtcaccgacgtttcctcggcatccacaggtcaggccatccctcttcctgtcaccagcccttcctcagcatccacaggtgacaccacccctcttcctgtcaccgacgcttcctcagcatccacaggtgacaccacctctcttcctgtcaccatcccttcctcagcatcttcaggtcacaccacctctcttcctgtcaccgacgcttcctcagtgtccacaggtcacgccacctctcttcttgtcaccgacgcttcctcagtatccacaggtgacaccacccctcttcctgtcaccgacactaactcagcatccacaggtgacaccacccctcttcatgtcaccgacgcttcctcagtatccacaggtcacgccacctctcttcctgtcaccagcctttcctcagcatccacaggtgacaccacgcctcttcctgtcactagcccttcctcagcatcctcaggtcacaccacccctcttcctgtcaccgacgcttcctcagtacccacaggtcacgccacctctcttcctgtcaccgacgcttcctcagtgtccacaggtcacgccacccctcttcctgtcaccgacgcttcctcagtgtccacaggtcatgccacccctcttccggtcaccgacacttcctcagtatctacaggacaggccacccctcttcctgtcaccagcctttcctcagcatccactggtgacaccacgccgcttcctgtcaccgatacttcctcagcatccacaggtcaggacacccctcttcctgtcaccagcctttcctcagtatccacaggtgacaccacgcctcttcctgtcactagcccttcctcagcatccacaggtcacgccacccctcttcttgtcaccgacgcttcctcagtatccacaggtcacgccacctctcttcttgtcaccgacgcttcctcagtatccacaggtcacgccaccgctcttcatgtcaccgatgcttcctcattatccacaggggacaccacccctcttcctgtcaccagcccttcctcagcatccacaggtgacaccacccctcttcctgtcaccgacacttcctcagcatccacaggtcacgccacctctcttcctgtcaccgacacttcctcagcatccacaggtcacgccacccctcttcctgtcaccgacacttcctcagcatccacaggtcaggccacccctcttcctgtcaccggcccttcctcagcatccacaggtcacgccatccctcttcttgtcaccgacacttcctcagcatccacaggacaggccacccctcttcctgtcaccagcctttcctcagcatccacaggtgacaccacccctcttcctgtcaccgacgcttcctcagtgtccacaggtcacgccacctctcttcctgtcaccagcctttcctcagtatccacaggtgacaccacccctcttcctgtcaccagcccttcctcagcatcctcaggtcacaccacccctcttcctgtcaccgacgcttcctcagtatccacaggtgacaccacccctcttcctgtcaccagcccttcctcagcatcctcaggtcacaccacccctcttcctgtcaccagcccttcctcagcatcctcaggtcacaccacccctcttcctgtcaccgacgcttcctcagcatccacaggtgacaccacccctcttcctgtcaccgacacttcctcagcatccacaggtcacgccacccatcttcctgtcaccggcctttcctcagcttccacaggtgacaccacccgtcttcctgtcaccaacgtttcctcggcatccacaggtcatgccacccctcttcctgtcaccagcacttcctcagcatccacaggtgacaccacccctcttcctggcaccgacacttcctcagtatccacaggtcacaccacccctcttcttgtcaccgacgcttcgtcagtatccacaggtgacaccacccgtcttcctgtcaccagcccttcctcagcatctacaggtcacaccacccctctacctgtcaccgacactccctcagcatccacaggtgacaccacccctcttcctgtcaccaatgcttcctcattatccacacgtcacaccacctctcttcatgtcaccagcccttcctcagcatccacaggtcacgccacctctcttcctgtcaccgacacttcctcagtatccacaggtcatgccacccctcttcatgtcaccagcccttcctcagcatccacaggtgacaccacccctcttcctgtcaccgacacttactcagcatccacaggtcaggccacccctcttcctgtcaccgacacttcctcagcatccacaggtgacaccacccctcttcctgtcaccgacacttcctcagcatccacaggtcacgccacccctcttcctgtcaccaacacttcctcagtatccacaggtcacgccacccctcttcatgtcaccagcccttcctcagcatccacaggtcacaccacccctcttcctgtcaccgacgcttcgtcagtgtccacaggtcacgccacctctcttcctgtcaccgacgcttcctcagtgttcacaggtcacgccacctcgcttcctgtcaccatcccttcctcagcatcctcaggtcacaccacccctcttcctgtcaccgacgcttcctcagtgtccacaggtcacgccacctctcttcctgtcaccgacgcttcctcagtgtccacaggtcacgccacccctcttcctgtcaccgacgcttcctcagtgtccacaggtcacgctacccctcttcctgtcaccgacacttcctcagtatccacaggtcacgccacccctcttcctctcaccagcctttcctcagtatccacaggtgacaccacgcctcttcctgtcaccgacacttcctcagcatccacaggtcaggccacccctcttcctgtcaccagcctttcctcagtatccacaggtgacaccacccctcttcctgtcaccgacacttcctcagcatccacaggtcacgccacctctcttcctgtcaccgacacttcctcagcatccacaggtcacgccacccctcttcctgacaccgacacttcctcagcatccacaggtcacgccacccctcttcctgtcaccgacacttcctcagcatccacaggtcacgccacccttcttcctgtcaccgacacttcctcagcatccataggtcacgccacccctcttcctgtcaccgacacttcctcaatatccacaggtcacgccacccctcttcatgtcaccagcccttcctcagcatccaccggtcacgccaccccgcttcctgtcaccgacacttcctcagcatccacaggtcacgccaaccctcttcatgtcaccagcccttcctcagcatccaccggtcacgccaccccgcttcctgtcaccgacacttcctcagcatccacaggtcacgccacccctcttcctgtcaccagcctttcctcagtatccacaggtgacaccacgcctcttcctgtcactagcccttcctcagcatccacaggtcacaccacccctcttcctgtcaccgacacttcctcagcatccacaggtcaggccaccgctcttcctgtcaccagcacttcctcagcatccacaggtgacaccacccctcttcctgttaccgacacttcctcagcatccacaggtcaggccacccctcttcctgtcaccagcctttcctcagtatccacaggtgacaccacgcctcttcctgtcactagcccttcctcagcatccacaggtcacgccactcctcttcttgtcaccgacgcttcctcagcatccacaggtcaggccacccctcttcctgtcaccgacacttcctcagcatacacaggtgacaccacctctcttcctgtcaccgacacttcctcatcatccacaggtgacaccacccctcttcttgtcaccgagacttcctcagcatccacaggtcacgccacccctcttcatgtcaccagcccttcctcagcatccacaggtgacaccacccctgtgcctgtcaccgacacttcctcagtatccacaggtcacgccacccctcttcctgtcaccggcctttcctcagcttccacaggtgacaccacccgtcttcctgtcaccgacatttcctcggcatccacaggtcaggccacccctcttcctgtcaccaacacttcctcagcatccacaggtcacgccacccctcttcctgtcaccggcctttcctcagcttccacaggtgacaccacccgtcttcctgtcaccgacatttcctcggcatccacaggtcaggccacccctcttcctgtcaccaacacttcctcagtatccacaggtgacaccatgcctcttcctgtcactagcccttcctcagcatccacaggtcacgccacccctcttcctgtcaccagcacttcctcagcatccaccggtcacgccacccctgttcctgtcaccagcacttcctcagcatctacaggtcacaccacccctcttcctgtcaccgacacttcctcagcatccacaggtgacaccacccctcttcctgtcaccagcccttcctcagcatctacaggtcacaccacccctcttcatgtcaccatcccttcctcagcatccacaggtgacaccagcactcttcctgtcaccggcgcttcctcagcatccaccggtcacgccacccctcttcctgtcaccgacacttcctcagtatccacaggtcacgccacccctcttcctgtcaccagcttttcctcagtatccacaggtgacaccacgcctcttcctgtcaccgacacttcctcagtatccacaggtcacgccacccctcttcctgtcaccagcttttcctcagtatccacaggtgacaccacccctcttcctgtcaccgacgcttcctcggcatccaccggtcacgccacccctcttcctgtcaccgacacttcctcagtatccacaggtcacgccacccctcttcctctcaccagcctttcctcagtatccacaggtgacaccacgactcttcctgtcaccgacacttcctcagtatccacaggtcacgccacccctcttcctgtcaccagcttttcctcagtatccacaggtgacaccacccctcttcctgtcaccgacgcttcctcggcatccaccggtcacgccacccctcttcctgtcaccgacacttcctcagtatccaccggtcacgccacgcctcttcctgtcaccagcctttcctcagtatccacaggtgacaccacccctcttcctgtcaccgacgcttcctcggcatccacaggtcaggccacccctcttcctgtcaccagcctttcctcagtatcaacaggtgacaccacgcctcttcctgtcaccatcccttcctcagcatcctcaggtcacaccacctctcttcctgtcaccgacacttcctcagcatccacaggtcaggccacccctcttcctgtcaccagcctttcctcagtatccacaggtgacaccacccctcttcttgtcaccgacgcttcctcagtatccacaggtcacgccacccctcttcctgtcaccgacacttcctcagcatccacaggtgacaccacccgtcttcctgtcacagacacttcctcagcatccacaggtcaggccacccctcttcctgtcaccagcctttcctcagtatccacaggtgacaccacccctcttcttgtcaccaacacttcctcagtatccagaggtcacgccacctctcttcctgtcaccatcccttcctcatcatcctcaggtcacaccacccctcttcctgtcaccagcacttcctcagtatctacaggtcacgtcacccctcttcctgtcaccagcacttcctcagcatccacaggtcacgccacctctcttcctgtcaccgacacttcctcagtatccacaggtcacgccacctctcttcctgtcaccgacacttcctcagtatccacaggtcacgccacccctcttcctgtcaccgacgcttcctcagtgtccacaggtcacgccacgcctcttcctgtcaccgacgcttcctcagcatccacaggtgacaccacccctcttcctgtcaccaacacttcctcagcatccacaggtcaggccacccctcttcctgtcaccagcctttcctcagtatccacaggtgacaccatgcctcttcctgtcactagcccttcctcagcatccacaggtcacgccacccctcttcctgttaccggcctttcctcagcttccacaggtgacaccacccctcttcctgtcactgacacttcctcagcatccacaggtcacgtcacccctcttcctgtcaccagcctttcctcagcatccacaggtgacagcacccctcttcctgtcactgacacttcctcagcatccacaggtcacgtcacccctcttcctgtcaccagcctttcctcagcatccacaggtgacaccacccctcttcctgtcactgacacttcctcagcatccacaggtcacgccacccctcttcatgtcactgatgcttcctcagcatccacaggtcaggccacccttcttcctgtcaccagcctttcctcagtatccacaggtgacaccacgcctcttcctgtcactagcccttcctcagcatccacaggtcacgccacccctcttcttgtcaccgacacttcctcagcatccacaggacacgccacccctcttcctgtcacggacgcttcctcagtgtccacaggtcacgccacctctcttcctgtaaccatccgttcctcaggttccacaggtcacaccacccctcttcctgtcaccgacacttcctcagcatccacaggtcaggccacctctcttcttgtcaccgacacttcctcagtatccacaggtgacaccacgcctcttcctgtcactagcacttcctcagcatccacaggtcacgtcactcctcttcatgtcaccagcccttcctcagcatccacaggtcacgccacccctcttcctgtcaccagcctttcctcagcatccacaggtgacaccatgcctcttcctgtcactagcccttcctcagcatccacaggtgacaccacccctcttcctgtcaccgacgcttcctcagtatccacaggtcacaccacccctcttcctgtcaccagcccttcctcagcatctacaggtcacaccacccctcttcctgtcaccgacactacctcagcatccaaaggtgacaccacccctcttcctgtcaccagcccttcctcagcatctacaggtcacaccacccctcttcctgtcaccgacacttcctcagcatccacaggtgacaccacccctcttcctgtcaccagcccttcctcagcatccacaggtcacgccacccctcttcctgtcaccaatgcttcctcattatccacaggtcacgccacccctcttcatgtcaccagcccttcctcagcatccacaggtcacgccacccctcttcctgtcaccagcacttcctcagcatccaccggtcacgccacctctcttcctgtcaccagcacttcctcagcatccaccggtcacgccacccctcttcctgtcaccgacaattcctcagtatccacaggtcacgccacccctcttcctgtcaccggcctttcctcagctaccacagatgacaccacccgtcttcctgtcaccgacgtttcctcggcatccacaggtcaggccacccctcttcctgtcaccagcctttcctcagtatccacaggtgacaccacgcctcttcctgtcactagcccttcctcagcatccacaggtcacgccagccctcttcttgtcactgacgcttcctcagcatccacaggtcaggccacccctcttcctgtcaccgacacttcctcagtatccacagctcacgccaccccacttcctgtcaccggcctttcttcagcttccacagatgacaccacccgtcttcctgtcaccgacgtttcctcggcatccacaggtcaggccatccctcttcctgtcaccagcccttcctcagcatccacaggtgacaccacccctcttcctgtcaccgacgcttcctcagcatccacaggtgacaccacctctcttcctgtcaccatcccttcctcagcatcttcaggtcacaccacctctcttcctgtcaccgacgcttcctcagtgtccacaggtcacgccacctctcttcttgtcaccgacgcttcctcagtatccacaggtgacaccacccctcttcctgtcaccgacactaactcagcatccacaggtgacaccacccctcttcatgtcaccgacgcttcctcagtatccacaggtcacgccacctctcttcctgtcaccagcctttcctcagcatccacaggtgacaccacgcctcttcctgtcactagcccttcctcagcatcctcaggtgacaccacccctcttcctgtcaccgacacttcctcagcatccacaggtcacgccacccatcttcctgtcaccggcctttcctcagcttccacaggtgacaccacccgtcttcctgtcaccaacgtttcctcggcatccacaggtcatgccacccctcttcctgtcaccagcacttcctcagcatccacaggtgacaccacccctcttcctggcaccgacacttcctcagtatccacaggtcacaccacccctcttcttgtcaccgacgcttcgtcagtatccacaggtgacaccacccgtcttcctgtcaccagcccttcctcagcatctacaggtcacaccacccctcttcatgtcaccgatgcttcctcagtatccacaggtcacaccacccctcttcctgtcaccgacacttcctcagcatccacaggtcaggccacctctcttcttgtcaccgacacttcctcagtatccacaggtgacaccacgcctcttcctgtcactagcacttcctcagcatccacaggtcacgtcactcctcttcatgtcaccagcccttcctcagcatccacaggtcacgccacccctcttcctgtcaccagcctttcctcagcatccacaggtgacaccacccctcttcctgtcaccgacacttcctcagtatccacaggtcacaccacccctcttcctgtcaccagcccttcctcagcatctacaggtcacaccacccctcttcctgtcaccgacacttcctcagcatccaaaggtgacaccacccctcttcctgtcaccagcccttcctcagcatctacaggtcacaccacccctcttcctgtcaccgacacttcctcagcatccacaggtgacaccacccctcttcctgtcaccaatgcttcctcattatccacaggtcacgccacccctcttcatgtcaccagcccttcctcagcatccacaggtcacgccacccctcttcctgtcaccagcacttcctcagcatccaccggtcacgccacccctcttcctgtcaccagcacttcctcagcatccaccggtcacgccacccctcttcctgtcaccgacaattcctcagtatccacaggtcatgccacccctcttcctgtcaccggcctttcctcagctaccacagatgacaccacccgtcttcctgtcaccgacgtgtcctcggcatccacaggtcaggccacccctcttcctgtcaccagcctttcctcagtatccacaggtgacaccacgcctcttcctgtcactagcccttcctcagcatccacaggtcacgccagccctcttcttgtcactgacgcttcctcagcatccacaggtcaggccacccctcttcctgtcaccgacacttcctcagtatccacagctcacgccaccccacttcctgtcaccggcctttcctcagcttccacagatgacaccacccgtcttcctgtcaccgacgtttcctcggcatccacaggtcaggccatccctcttcctgtcaccagcccttcctcagcatccacaggtgacaccacccctcttcctgtcaccgacgcttcctcagcatccacaggtgacaccacctctcttcctgtcaccatcccttcctcagcatcttcaggtcacaccacctctcttcctgtcaccgacgcttcctcagtgtccacaggtcacgccacctctcttcttgtcaccgacgcttcctcagtatccacaggtgacaccacccctcttcctgtcaccgacactaactcagcatccacaggtgacaccacccctcttcatgtcaccgacgcttcctcagtatccacaggtcacgccacctctcttcctgtcaccagcctttcctcagcatccacaggtgacaccacgcctcttcctgtcactagcccttcctcagcatcctcaggtcacaccacctctcttcctgtcaccgacgcttcctcagtgtccacaggtcacgccacctctcttcctgtcaccatcccttcctcagcatcctcaggtcacaccacccctcttcctgtcaccgacgcttcctcagtacccacaggtcacgccacctctcttcctgtcaccgacgcttcctcagtgtccacaggtcacgccacccctcttcctgtcaccgacgcttcctcagtgtccacaggtcatgccacccctcttccggtcaccgacacttcctcagtatctacaggacaggccacccctcttcctgtcaccagcctttcctcagcatcatccactggtgacaccacgccgcttcctgtcactgatacttcctcagcatccacaggtcaggacacccctcttcctgtcaccagccttttctcagtatccacaggtgacaccacgcctcttcctgtcactagcccttcctcagcatccacaggtcacgccacccatcttcttgtcaccgacgcttcctcagtatccacaggtcacgccacctctcttcttgtcaccgacgcttcctcagtatccacaggtcacgccaccgctcttcatgtcaccgatgcttcctcattatccacaggggacaccacccctcttcctgtcaccagcccttcctcagcatccacaggtgacaccacccctcttcctgtcaccgacacttcctcagtatccacaggtcacgccacctctcttcctgtcactgacacttcctcagcatccacaggtcacgccacctctcttcctgtcaccgacacttcctcagcatccacaggtcaggccacccctcttcctgtcaccagcccttcctcagcatccacaggtcacgccatccctcttcttgtcaccgacacttcctcagcatccacaggacaggccacccctcttcctgtcaccagcctttcctcagcatccacaggtgacaccacccctcttcctgtcaccgatgcttcctcagtgtccacaggtcacgccacctctcttcctgtcaccagcctttcctcagtatccacaggtgacaccacccctcttcctgtcactagcccttcctcagcatccacaggtcacgccacccctcttcatgtcaccagcccttcctcagcatccacaggtcacgccacccctcttcctgtcaccagcctttcctcagcatccacaggtgacaccacgcctcttcctgtcactagcccttcctcagcatccacaggtcacgccacccctcttcatgtcaccgacgcttcctcagtatccacaggtgacaccacccctcttcctgtcaccagcccttcctcagcatcctcaggtcacaccacccctcttcctgtcaccgacgcttcctcagcatccacaggtgacaccacccctcttcctgtcaccgacacttcctcagcatccacaggtcacgccacccatcttcctgtcaccggcctttcctcagcttccacaggtgacaccacccgtcttcctgtcaccgacgtttcctcggcatccacaggtcatgccacccctcttcctgtcaccagcacttcctcagcatccacaggtgacaccacccctcttcctggcaccgacacttcctcagtatccacaggtcacaccacccctcttcttgtcaccgacgcttcgtcagtatccacaggtgacaccacccgtcttcctgtcaccagcccttcctcagcatctacaggtcacaccacccctctacctgtcaccgacactccctcagcatccacaggtgacaccacccctcttcctgtcaccaatgcttcctcattatccacacgtcacgccacctctcttcatgtcaccagcccttcctcagcatccaccggtcacgccacccctcttcctgttaccgacacttccgcagcatccacaggtcacgccacccctcttcctgtcaccagcacttcctcagcatccacaggtgacaccacccctcttcctgtcaccgacacttcctcagcatccacaggtcacgccacccctcttcctgtcaccaacacttcctcagtatccacaggtcacgccacccctcttcatgtcaccagcccttcctcagcatccacaggtcacaccacccctcttcctgtcaccgacgcttcgtcagtgtccacaggtcacgccacctctcttcctgtcaccgacgcttcctcagtgtccacaggtcacgccacccctcttcctgtcaccgacgcttcctcagtgtccacaggtcacgctacccctcttcctctcaccagcctttcctcagtatccacaggtgacaccacgcctcttcctgtcaccgacacttcctcagcatccacaggtcaggccacccctcttcctgtcaccagcctttcctcagtatccacaggtgacaccacccctcttcctgtcaccgacacttcctcagcatccacaggtcacgccacctctcttcctgtcaccgacacttcctcagcatccacaggtcacgccacccctcttcctgtcaccgacacttcctcaatatccacaggtcacgccacccctcttcatgtcaccagcccttcctcagcatccaccggtcacgccaccccgcttcctgtcaccgacacttcctcagcatccacaggtcacgccacccctcttcctgtcaccagcctttcctcagtatccacaggtgacaccacgcctcttcctgtcactagcccttcctcagcatccacaggtcacgccactcctcttcttgtcaccgacgcttcctcagcatccacaggtcaggccacccctcttcctgtcaccagcctttcctcagtatccacaggtgacaccacgcctcttcctgtcactagcccttcctcagcatccaccggtcatgccacctctcttcctgtcaccgacacttcctcagcatccacaggtgacaccacctctcttcctgtcaccgacacttcctcagcatacacaggtgacaccacctctcttcctgtcaccgacacttcctcatcatccacaggtgacaccacccctcttcttgtcaccgagacttcctcagcatccacaggtgacaccacccctgtgcctgtcaccgacacttcctcagtatccacaggtcacgccacccctcttcctgtcaccggcctttcctcagcttccacaggtgacaccacccgtcttcctgtcaccgacatttcctcggcatccacaggtcaggccacccctcttcctgtcaccaacacttcctcagtatccacaggtgacaccatgcctcttcctgtcactagcccttcctcagcatccacaggtcacgccacccctcttcctgtcaccagcacttcctcagcatccaccggtcacgccacccctgttcctgtcaccagcacttccttagcatccacaggtcacaccacccctcttcctgtcaccagcccttcctcagcatctacaggtcacaccacccctcttcctgtcaccgacacttcctcagcatccacaggtgacaccacccctcttcctgtcaccaatgcttcctcattatccacaggacacaccacccctcttcatgtcaccatcccttcctcagcatccacaggtgacaccagcactcttcctgtcaccggcgcttcctcagcatccaccggtcacgccacccctcttcctgtcaccgacacttcctcagtatccacaggtcacgccacccctcttcctgtcaccagcttttcctcagtatccacaggtgacaccacccctcttcctgtcaccgacgcttcctcggcatccaccggtcacgccacccctcttcctgtcaccgacacttcctcagcatccacaggtgacaccacccctcttcctgtcaccgacgcttcctcggcatccacaggtcaggccacccctcttcctgtcaccagcctttcctcagtatcaacaggtgacaccacgcctcttcctgtcaccatcccttcctcagcatcctcaggtcacaccacctctcttcctgtcagcgacacttcctcagcatccacaggtcaggccacccctcttcctgtcaccagcctttcctcagtatccacaggtgacaccacccctcttcttgtcaccgacgcttcctcagtatccacaggtcacgccacccctcttcctgtcaccgacacttcctcagcatccacaggtgacaccacccgtcttcctgtcacggacacttcctcagcatccacaggtcaggccacccctcttcctgtcaccagcctttcctcagtatccacaggtgacaccacccctcttcttgtcaccaacacttcctcagtatccacaggtcacgccacctctcttcctgtcaccatcccttcctcatcatcctcaggtcacaccacccctcttcctgtcaccagcacttcctcagtatctacaggtcacgtcacccctcttcatgtcaccagcccttcctcatcatccacaggtcaggccacccctcttcctgtcaccagcacttcctcagtatctacaggtcacgtcacccctcttcatgtcaccagcccttcctcagcatccacaggtcacgccacccctcttcctgtcaccagcacttcctcagcatccacaggtcacgccacccctcttcctgtcaccgacgcttcctcagtgtccacaggtcacgccacgcctcttcctgtcaccgacacttcctcagcatccacaggtgacaccacccctcttcctgtcaccgacacttcctcagcatccacaggtcaggccacccctcttcctgtcaccagcctttcctcagtatccacaggtcacgccacccctcttgctgtcagcagtgctacctcagcttccacagtatcctcggactcccctctgaagatggaaacatcaggaatgacaacaccgtcactgaagacagacggtgggagacgcacagccacatcaccaccccccacaacctcccagaccatcatttccaccattcccagcactgccatgcacacccgctccacagctgcccccatccccatcctgcctgagagaggagtttccctcttcccctatggggcagacgccggggacctggagttcgtcaggaggaccgtggacttcacctccccactcttcaagccggcgactggcttcccccttggctcctctctccgtgattccctctacttcacagacaatggccagatcatcttcccagagtcagactaccagattttctcctaccccaacccactcccaacaggcttcacaggccgggaccctgtggccctggtggctccgttctgggacgatgctgacttctccactggtcgggggaccacattttatcaggaatacgagacgttctatggtgaacacagcctgctagtccagcaggccgagtcttggattagaaagatgacaaacaacgggggctacaaggccaggtgggccctaaaggtcacgtgggtcaatgcccacgcctatcctgcccagtggaccctcgggagcaacacctaccaagccatcctctccacggacgggagcaggtcctatgccctgtttctctaccagagcggtgggatgcagtgggacgtggcccagcgctcaggcaacccggtgctcatgggcttctctagtggagatggctatttcgaaaacagcccactgatgtcccagccagtgtgggagaggtatcgccctgatagattcctgaattccaactcaggcctccaagggctgcagttctacaggctacaccgggaagaaaggcccaactaccgtctcgagtgcctgcagtggctgaagagccagcctcggtggcccagctggggctggaaccaggtctcctgcccttgttcctggcagcagggacgacgggacttacgattccaacccgtcagcataggtcgctggggcctcggcagtaggcagctgtgcagcttcacctcttggcgaggaggcgtgtgctgcagctacgggccctggggagagtttcgtgaaggctggcacgtgcagcgtccttggcagttggcccaggaactggagccacagagctggtgctgccgctggaatgacaagccctacctctgtgccctgtaccagcagaggcggccccacgtgggctgtgctacatacaggcccccacagcccgcctggatgttcggggacccccacatcaccaccttggatggtgtcagttacaccttcaatgggctgggggacttcctgctggtcggggcccaagacgggaactcctccttcctgcttcagggccgcaccgcccagactggctcagcccaggccaccaacttcatcgcctttgcggctcagtaccgctccagcagcctgggccccgtcacggtccaatggctccttgagcctcacgacgcaatccgtgtcctgctggataaccagactgtgacatttcagcctgaccatgaagacggcggaggccaggagacgttcaacgccaccggagtcctcctgagccgcaacggctctgaggtctcggccagcttcgacggctgggccaccgtctcggtgatcgcgctctccaacatcctccacgcctccgccagcctcccgcccgagtaccagaaccgcacggaggggctcctgggggtctggaataacaatccagaggacgacttcaggatgcccaatggctccaccattcccccagggagccctgaggagatgcttttccactttggaatgacctggcagatcaacgggacaggcctccttggcaagaggaatgaccagctgccttccaacttcacccctgttttctactcacaactgcaaaaaaacagctcctgggctgaacatttgatctccaactgtgacggagatagctcatgcatctatgacaccctggccctgcgcaacgcaagcatcggacttcacacgagggaagtcagtaaaaactacgagcaggcgaacgccaccctcaatcagtacccgccctccatcaatggtggtcgtgtgattgaagcctacaaggggcagaccacgctgattcagtacaccagcaatgctgaggatgccaacttcacgctcagagacagctgcaccgacttggagctctttgagaatgggacgttgctgtggacacccaagtcgctggagccattcactctggagattctagcaagaagtgccaagattggcttggcatctgcactccagcccaggactgtggtctgccattgcaatgcagagagccagtgtttgtacaatcagaccagcagggtgggcaactcctccctggaggtggctggctgcaagtgtgacgggggcaccttcggccgctactgcgagggctccgaggatgcctgtgaggagccgtgcttcccgagtgtccactgcgttcctgggaagggctgcgaggcctgccctccaaacctgactggggatgggcggcactgtgcggctctggggagctctttcctgtgtcagaaccagtcctgccctgtgaattactgctacaatcaaggccactgctacatctcccagactctgggctgtcagcccatgtgcacctgccccccagccttcactgacagccgctgcttcctggctgggaacaacttcagtccaactgtcaacctagaacttcccttaagagtcatccagctcttgctcagtgaagaggaaaatgcctccatggcagaagtcaacgcctcggtggcatacagactggggaccctggacatgcgggcctttctccgcaacagccaagtggaacgaatcgattctgcagcaccggcctcgggaagccccatccaacactggatggtcatctcggagttccagtaccgccctcggggcccggtcattgacttcctgaacaaccagctgctggccgcggtggtggaggcgttcttataccacgttccacggaggagtgaggagcccaggaacgacgtggtcttccagcccatctccggggaagacgtgcgcgatgtgacagccctgaacgtgagcacgctgaaggcttacttcagatgcgatggctacaagggctacgacctggtctacagcccccagagcggcttcacctgcgtgtccccgtgcagtaggggctactgtgaccatggaggccagtgccagcacctgcccagtgggccccgctgcagctgtgtgtccttctccatctacacggcctggggcgagcactgtgagcacctgagcatgaaactcgacgcgttcttcggcatcttctttggggccctgggcggcctcttgctgctgggggtcgggacgttcgtggtcctgcgcttctggggttgctccggggccaggttctcctatttcctgaactcagctgaggccttgccttgaaggggcagctgtggcctaggctacctcaagactcacctcatccttaccgcacatttaaggcgccattgcttttgggagactggaaaagggaaggtgactgaaggctgtcaggattcttcaaggagaatgaatactgggaatcaagacaagactataccttatccataggcgcaggtgcacagggggaggccataaagatcaaacatgcatggatgggtcctcacgcagacacacccacagaaggacactagcctgtgcacgcgcgcgtgcacacacacacacacacacacgagttcataatgtggtgatggccctaagttaagcaaaatgcttctgcacacaaaactctctggtttacttcaaattaactctatttaaataaagtctctctgactttttgtgtctccaaaa

SEQ ID NO: 155757 - DNA, 16247 bp, Homo sapiens; identical to SEQ ID NO: 155732
  Payload ID: 10597
  Gene Symbol: MUC4
  Gene Name: mucin 4, cell surface associated
  ENST ID: ENST00000625520
  CDS Start-End: 1-13451

SEQ ID NO: 155758 - DNA, 16292 bp, Homo sapiens
  Payload ID: 10597
  Gene Symbol: MUC4
  Gene Name: mucin 4, cell surface associated
  ENST ID: ENST00000631360
  CDS Start-End: 1-13214
gaaccacagaggacacattaataactggaagtaaaactgctgccccagtcacctcaacaggctcaacaacagcgacactagagggacaatcaactgcagcttcttcaaggacctctaatcaggacatatcagcttcatctcagaaccaccagactaagagcacggagaccaccagcaaagctcaaaccgacaccctcacgcagatgatgacatcaactcttttttcttccccaagtgtacacaatgtgatggagacagctcctccagatgaaatgaccacatcatttccctccagtgtcaccaacacactcatgatgacatcaaagactataacaatgacaacctccacagactccactcttggaaacacagaagagacatcaacagcaggaactgaaagttctaccccagtgacctcagcagtctcaataacagctggacaggaaggacaatcacgaacaacttcctggaggacctctatccaagacacatcagcttcttctcagaaccactggactcggagcacgcagaccaccagggaatctcaaaccagcaccctaacacacagaaccacttcaactccttctttctctccaagtgtacacaatgtgacagggactgtttctcagaagacatctccttcaggtgaaacagctacctcatccctctgtagtgtcacaaacacatccatgatgacatcagagaagataacagtgacaacctccacaggctccactcttggaaacccaggggagacatcatcagtacctgttactggaagtcttatgccagtcacctcagcagccttagtaacatttgatccagaaggacaatcaccagcaactttctcaaggacttctactcaggacacaacagctttttctaagaaccaccagactcagagcgtggagaccaccagagtatctcaaatcaacaccctcaacaccctcacaccggttacaacatcaactgttttatcctcaccaagtggattcaacccaagtggaacagtttctcaggagacattcccttctggtgaaacaaccacctcatccccttccagtgtcagcaatacattcctggtaacatcaaaggtgttcagaatgccaacctccagagactctactcttggaaacacagaggagacatcactatctgtaagtggaaccatttctgcaatcacttccaaagtttcaaccatatggtggtcagacactctgtcaacagcactctcccccagttctctacctccaaaaatatccacagctttccacacccagcagagtgaaggtgcagagaccacaggacggcctcatgagaggagctcattctctccaggtgtgtctcaagaaatatttactctacatgaaacaacaacatggccttcctcattctccagcaaaggccacacaacttggtcacaaacagaactgccctcaacatcaacaggtgctgccactaggcttgtcacaggaaatccatctacagggacagctggcactattccaagggtcccctctaaggtctcagcaataggggaaccaggagagcccaccacatactcctcccacagcacaactctcccaaaaacaacaggggcaggcgcccagacacaatggacacaagaaacggggaccactggagaggctcttctcagcagcccaagctacagtgtgactcagatgataaaaacggccacatccccatcttcttcacctatgctggatagacacacatcccaacaaattacaacggcaccatcaacaaatcattcaacaatacattccacaagcacctctcctcaggaatcaccagctgtttcccaaaggggtcacactcaagccccgcagaccacacaagaatcacaaaccacgaggtccgtctcccccatgactgacaccaagacagtcaccaccccaggttcttccttcacagccagtgggcactcgccctcagaaattgttcctcaggacgcacccaccataagtgcagcaacaacctttgccccagctcccaccggggatggtcacacaacccaggccccgaccacagcactgcaggcagcacccagcagccatgatgccaccctggggccctcaggaggcacgtcactttccaaaacaggtgcccttactctggccaactctgtagtgtcaacaccagggggcccagaaggacaatggacatcagcctctgccagcacctcacctgacacagcagcagccatgacccatacccaccaggctgagagcacagaggcctctggacaaacacagaccagcgaaccggcctcctcagggtcacgaaccacctcagcgggcacagctaccccttcctcatccggggcgagtggcacaacaccttcaggaagcgaaggaatatccacctcaggagagacgacaaggttttcatcaaacccctccagggacagtcacacaacccagtcaacaaccgaattgctgtccgcctcagccagtcatggtgccatcccagtaagcacaggaatggcgtcttcgatcgtccccggcacctttcatcccaccctctctgaggcctccactgcagggagaccgacaggacagtcaagcccaacttctcccagtgcctctcctcaggagacagccgccatttcccggatggcccagactcagaggacaagaaccagcagagggtctgacactatcagcctggcgtcccaggcaaccgacaccttctcaacagtcccacccacacctccatcgatcacatccactgggcttacatctccacaaaccgagacccacactctgtcaccttcagggtctggtaaaaccttcaccacggccctcatcagcaacgccacccctcttcctgtcacctacgcttcctcggcatccacaggtcacaccacccctcttcatgtcaccgatgcttcctcagtatccacaggtcacgccacccctcttcctgtcaccagcccttcctcagtatccacaggtcacaccacccctcttcctgtcaccgacacttcctcagaatccacaggtcacgtcacccctcttcctgtcaccagcttttcctcagcatccacaggtgacagcacccctcttcctgtcactgacacttcctcagcatccacaggtcacgtcacccctcttcctgtcaccagcctttcctcagcatccacaggtgacaccacccctcttcctgtcactgacacttcctcagcatccacaggtcacgccacctctcttcctgtcaccgacacttcctcagtatccacaggtcacaccacccctcttcctgtcaccgacacttcctcagcatccacaggtcacgccacctctcttcctgtcaccgacacttcctcagtatccacaggtcacaccacccctcttcatgtcactgatgcttcctcagcatccacaggtcaggccacccctcttcctgtcaccagcctttcctcagtatccacaggtgacaccacgcctcttcctgtcactagcccttcctcagcatccacaggtcacgccacccctcttcttgtcaccgacacttcctcagcatccacaggacacgccacccctcttcctgtcaccgacgcttcctcagtgtccacagatcacgccacctctcttcctgtaaccatcccttccgcagcatccacaggtcacaccacccctcttcctgtcaccgacacttcctcagcatccacaggtcaggccacctctcttcttgtcaccgacacttcctcagtatccacaggtgacaccacgcctcttcctgtcactagcacttcctcagcatccacaggtcacgtcactcctcttcatgtcaccagcccttcctcagcatccacaggtcacgccacccctcttcctgtcaccagcctttcctcagcatccacaggtgacaccatgcctcttcctgtcactagcccttcctcagcatccacaggtgacaccacccctcttcctgtcaccgacgcttcctcagtatccacaggtcacaccacccctcttcatgtcactgatgcttcctcagcatccacaggtcaggccacccctcttcctgtcaccagcctttcctcagtatccacaggtgacaccacgcctcttcctgtcactagcccttcctcagcatccacaggtcacgccacccctcttcttgtcaccgacacttcctcagcatccacaggacacgccacccctcttcctgtcaccgacgcttcctcagtgtccacagatcacgccacctctcttcctgtaaccatcccttccgcagcatccacaggtcacaccacccctcttcctgtcaccgacacttcctcagcatccacaggtcaggccacctctcttcttgtcaccgacacttcctcagtatccacaggtgacaccacgcctcttcctgtcactagcacttcctcagcatccacaggtcacgtcactcctcttcatgtcaccagcccttcctcagcatccacaggtcacgccacccctcttcctgtcaccagcctttcctcagcatccacaggtgacaccatgcctcttcctgtcactagcccttcctcagcatccacaggtgacaccacccctcttcctgtcaccgacgcttcctcagtatccacaggtcacaccacccctcttcctgtcaccagcccttcctcagcatctacaggtcacaccacccctcttcctgtcaccgacacttcctcagcatccaaaggtgacaccacccctcttcctgtcaccagcccttcctcagcatctacaggtcacaccacccctcttcctgtcaccgacacttcctcagcatccacaggtgacaccacccctcttcctgtcaccaatgcttcctcattatccacaggtcacgccacccctcttcatgtcaccagcccttcctcagcatccacaggtcacgccacccctcttcctgtcaccagcacttcctcagcatccaccggtcacgccacccctcttcctgtcaccggcctttcctcagctaccacagatgacaccacccgtcttcctgtcaccgacgtttcctcggcatccacaggtcaggccacccctcttcctgtcaccagcctttcctcagtatccacaggtgacaccacgcctcttcctgtcactagcccttcctcagcatccacaggtcacgccagccctcttcttgtcactgacgcttcctcagcatccacaggtcaggccacccctcttcctgtcaccgacacttcctcagtatccacagctcacgccaccccacttcctgtcaccggcctttcttcagcttccacagatgacaccacccgtcttcctgtcaccgacgtttcctcggcatccacaggtcaggccatccctcttcctgtcaccagcccttcctcagcatccacaggtgacaccacccctcttcctgtcaccgacgcttcctcagcatccacaggtgacaccacctctcttcctgtcaccatcccttcctcagcatcttcaggtcacaccacctctcttcctgtcaccgacgcttcctcagtgtccacaggtcacgccacctctcttcttgtcaccgacgcttcctcagtatccacaggtgacaccacccctcttcctgtcaccgacactaactcagcatccacaggtgacaccacccctcttcatgtcaccgacgcttcctcagtatccacaggtcacgccacctctcttcctgtcaccagcctttcctcagcatccacaggtgacaccacgcctcttcctgtcactagcccttcctcagcatcctcaggtcacaccacccctcttcctgtcaccgacgcttcctcagtacccacaggtcacgccacctctcttcctgtcaccgacgcttcctcagtgtccacaggtcacgccacccctcttcctgtcaccgacgcttcctcagtgtccacaggtcatgccacccctcttccggtcaccgacacttcctcagtatctacaggacaggccacccctcttcctgtcaccagcctttcctcagcatccacaggtgacaccacccctcttcctgtcaccgacacttcctcagcatccacaggtcacgccccccatcttcctgtcaccggcctttcctcagcttccacaggtgacaccacccgtcttcctgtcaccaacgtttcctcggcatccacaggtcatgccacccctcttcctgtcaccagcacttcctcagcatccacaggtgacaccacccctcttcctggcaccgacacttcctcagtatccacaggtcacaccacccctcttcttgtcaccgacgcttcgtcagtatccacaggtgacaccacccgtcttcctgtcaccagcccttcctcagcatctacaggtcacaccacccctcttcatgtcaccgatgcttcctcagtatccacaggtcacaccacccctcttcctgtcaccgacacttcctcagcatccacaggtcaggccacctctcttcttgtcaccgacacttcctcagtatccacaggtgacaccacgcctcttcctgtcactagcacttcctcagcatccacaggtcacgtcactcctcttcatgtcaccagcccttcctcagcatccacaggtcacgccacccctcttcctgtcaccagcctttcctcagcatccacaggtgacaccacccctcttcctgtcaccgacacttcctcagtatccacaggtcacaccacccctcttcctgtcaccagcccttcctcagcatctacaggtcacaccacccctcttcctgtcaccgacacttcctcagcatccaaaggtgacaccacccctcttcctgtcaccagcccttcctcagcatctacaggtcacaccacccctcttcctgtcaccgacacttcctcagcatccacaggtgacaccacccctcttcctgtcaccaatgcttcctcattatccacaggtcacgccacccctcttcatgtcaccagcccttcctcagcatccacaggtcacgccacccctcttcctgtcaccagcacttcctcagcatccaccggtcacgccacccctcttcctgtcaccagcacttcctcagcatccaccggtcacgccacccctcttcctgtcaccgacaattcctcagtatccacaggtcatgccacccctcttcctgtcaccggcctttcctcagctaccacagatgacaccacccgtcttcctgtcaccgacgtgtcctcggcatccacaggtcaggccacccctcttcctgtcaccagcctttcctcagtatccacaggtgacaccacgcctcttcctgtcactagcccttcctcagcatccacaggtcacgccagccctcttcttgtcactgacgcttcctcagcatccacaggtcaggccacccctcttcctgtcaccgacacttcctcagtatccacagctcacgccaccccacttcctgtcaccggcctttcctcagcttccacagatgacaccacccgtcttcctgtcaccgacgtttcctcggcatccacaggtcaggccatccctcttcctgtcaccagcccttcctcagcatccacaggtgacaccacccctcttcctgtcaccgacgcttcctcagcatccacaggtgacaccacctctcttcctgtcaccatcccttcctcagcatcttcaggtcacaccacctctcttcctgtcaccgacgcttcctcagtgtccacaggtcacgccacctctcttcttgtcaccgacgcttcctcagtatccacaggtgacaccacccctcttcctgtcaccgacactaactcagcatccacaggtgacaccacccctcttcatgtcaccgacgcttcctcagtatccacaggtcacgccacctctcttcctgtcaccagcctttcctcagcatccacaggtgacaccacgcctcttcctgtcactagcccttcctcagcatcctcaggtcacaccacctctcttcctgtcaccgacgcttcctcagtgtccacaggtcacgccacctctcttcctgtcaccatcccttcctcagcatcctcaggtcacaccacccctcttcctgtcaccgacgcttcctcagtacccacaggtcacgccacctctcttcctgtcaccgacgcttcctcagtgtccacaggtcacgccacccctcttcctgtcaccgacgcttcctcagtgtccacaggtcatgccacccctcttccggtcaccgacacttcctcagtatctacaggacaggccacccctcttcctgtcaccagcctttcctcagcatcatccactggtgacaccacgccgcttcctgtcactgatacttcctcagcatccacaggtcaggacacccctcttcctgtcaccagccttttctcagtatccacaggtgacaccacgcctcttcctgtcactagcccttcctcagcatccacaggtcacgccacccatcttcttgtcaccgacgcttcctcagtatccacaggtcacgccacctctcttcttgtcaccgacgcttcctcagtatccacaggtcacgccaccgctcttcatgtcaccgatgcttcctcattatccacaggggacaccacccctcttcctgtcaccagcccttcctcagcatccacaggtgacaccacccctcttcctgtcaccgacacttcctcagtatccacaggtcacgccacctctcttcctgtcactgacacttcctcagcatccacaggtcacgccacctctcttcctgtcaccgacacttcctcagcatccacaggtcaggccacccctcttcctgtcaccagcccttcctcagcatccacaggtcacgccatccctcttcttgtcaccgacacttcctcagcatccacaggacaggccacccctcttcctgtcaccagcctttcctcagcatccacaggtgacaccacccctcttcctgtcaccgatgcttcctcagtgtccacaggtcacgccacctctcttcctgtcaccagcctttcctcagtatccacaggtgacaccacccctcttcctgtcactagcccttcctcagcatccacaggtcacgccacccctcttcatgtcaccagcccttcctcagcatccacaggtcacgccacccctcttcctgtcaccagcctttcctcagcatccacaggtgacaccacgcctcttcctgtcactagcccttcctcagcatccacaggtcacgccacccctcttcatgtcaccgacgcttcctcagtatccacaggtgacaccacccctcttcctgtcaccagcccttcctcagcatcctcaggtcacaccacccctcttcctgtcaccgacgcttcctcagcatccacaggtgacaccacccctcttcctgtcaccgacacttcctcagcatccacaggtcacgccacccatcttcctgtcaccggcctttcctcagcttccacaggtgacaccacccgtcttcctgtcaccgacgtttcctcggcatccacaggtcatgccacccctcttcctgtcaccagcacttcctcagcatccacaggtgacaccacccctcttcctggcaccgacacttcctcagtatccacaggtcacaccacccctcttcttgtcaccgacgcttcgtcagtatccacaggtgacaccacccgtcttcctgtcaccagcccttcctcagcatctacaggtcacaccacccctctacctgtcaccgacactccctcagcatccacaggtgacaccacccctcttcctgtcaccaatgcttcctcattatccacacgtcacgccacctctcttcatgtcaccagcccttcctcagcatccaccggtcacgccacccctcttcctgttaccgacacttccgcagcatccacaggtcacgccacccctcttcctgtcaccagcacttcctcagcatccacaggtgacaccacccctcttcctgtcaccgacacttcctcagcatccacaggtcatgccacccctcttcctgtcaccaacacttcctcagtatccacaggtcacgccacccctcttcatgtcaccagcccttcctcagcatccacaggtcacaccacccctcttcctgtcaccgacgcttcgtcagtgtccacaggtcacgccacctctcttcctgtcaccgacgcttcctcagtgtccacaggtcacgccacccctcttcctgtcaccgacgcttcctcagtgtccacaggtcacgctacccctcttcctctcaccagcctttcctcagtatccacaggtgacaccacgcctcttcctgtcaccgacacttcctcagcatccacaggtcaggccacccctcttcctgtcaccagcctttcctcagtatccacaggtgacaccacccctcttcctgtcaccgacacttcctcagcatccacaggtcacgccacctctcttcctgtcaccgacacttcctcagcatccacaggtcacgccacccctcttcatgtcaccagcccttcctcagcatccaccggtcacgccaccccgcttcctgtcaccgacacttcctcagcatccacaggtcacgccacccctcttcctgtcaccagcctttcctcagtatccacaggtgacaccacgcctcttcctgtcactagcccttcctcagcatccacaggtcacgccactcctcttcttgtcaccgacgcttcctcagcatccacaggtcaggccacccctcttcctgtcaccagcctttcctcagtatccacaggtgacaccacgcctcttcctgtcactagcccttcctcagcatccaccggtcatgccacctctcttcctgtcaccgacacttcctcagcatccacaggtgacaccacctctcttcctgtcaccgacacttcctcagcatacacaggtgacaccacctctcttcctgtcaccgacacttcctcatcatccacaggtgacaccacccctcttcttgtcaccgagacttcctcagcatccacaggtgacaccacccctgtgcctgtcaccgacacttcctcagtatccacaggtcacgccacccctcttcctgtcaccggcctttcctcagcttccacaggtgacaccacccgtcttcctgtcaccgacatttcctcggcatccacaggtcaggccacccctcttcctgtcaccaacacttcctcagtatccacaggtgacaccatgcctcttcctgtcactagcccttcctcagcatccacaggtcacgccacccctcttcctgtcaccagcacttcctcagcatccaccggtcacgccacccctgttcctgtcaccagcacttcctcagcatccacaggtcacaccacccctcttcctgtcaccagcccttcctcagcatctacaggtcacaccacccctcttcctgtcaccgacacttcctcagcatccacaggtgacaccacccctcttcctgtcaccaatgcttcctcattatccacaggacacaccacccctcttcatgtcaccatcccttcctcagcatccacaggtgacaccagcactcttcctgtcaccggcgcttcctcagcatccaccggtcacgccacccctcttcctgtcaccgacacttcctcagtatccacaggtcacgccacccctcttcctgtcaccagcttttcctcagtatccacaggtgacaccacccctcttcctgtcaccgacgcttcctcggcatccaccggtcacgccacccctcttcctgtcaccgacacttcctcagcatccacaggtgacaccacccctcttcctgtcaccgacgcttcctcggcatccacaggtcaggccacccctcttcctgtcaccagcctttcctcagtatcaacaggtgacaccacgcctcttcctgtcaccatcccttcctcagcatcctcaggtcacaccacctctcttcctgtcagcgacacttcctcagcatccacaggtcaggccacccctcttcctgtcaccagcctttcctcagtatccacaggtgacaccacccctcttcttgtcaccgacgcttcctcagtatccacaggtcacgccacccctcttcctgtcaccgacacttcctcagcatccacaggtgacaccacccgtcttcctgtcacggacacttcctcagcatccacaggtcaggccacccctcttcctgtcaccagcctttcctcagtatccacaggtgacaccacccctcttcttgtcaccaacacttcctcagtatccacaggtcacgccacctctcttcctgtcaccatcccttcctcatcatcctcaggtcacaccacccctcttcctgtcaccagcacttcctcagtatctacaggtcacgtcacccctcttcatgtcaccagcccttcctcatcatccacaggtcaggccacccctcttcctgtcaccagcacttcctcatcatccacaggtcaggccacccctcttcctgtcaccagcacttcctcagcatccacaggtcacgccacccctcttcctgtcaccgacgcttcctcagtgtccacaggtcacgccacgcctcttcctgtcaccgacacttcctcagcatccacaggtgacaccacccctcttcctgtcaccgacacttcctcagcatccacaggtcaggccacccctcttcctgtcaccagcctttcctcagtatccacaggtcacgccacccctcttgctgtcagcagtgctacctcagcttccacagtatcctcggactcccctctgaagatggaaacatcaggaatgacaacaccgtcactgaagacagacggtgggagacgcacagccacatcaccaccccccacaacctcccagaccatcatttccaccattcccagcactgccatgcacacccgctccacagctgcccccatccccatcctgcctgagagaggtgaggccatacaggagtttccctcttcccctatggggcagacgccggggacctggagttcgtcaggaggaccgtggacttcacctccccactcttcaagccggcgactggcttcccccttggctcctctctccgtgattccctctacttcacagacaatggccagatcatcttcccagagtcagactaccagattttctcctaccccaacccactcccaacaggcttcacaggccgggaccctgtggccctggtggctccgttctgggacgatgctgacttctccactggtcgggggaccacattttatcaggaatacgagacgttctatggtgaacacagcctgctagtccagcaggccgagtcttggattagaaagatcacaaacaacgggggctacaaggccaggtgggccctaaaggtcacgtgggtcaatgcccacgcctatcctgcccagtggaccctcgggagcaacacctaccaagccatcctctccacggacgggagcaggtcctatgccctgtttctctaccagagcggtgggatgcagtgggacgtggcccagcgctcaggcaagccggtgctcatgggcttctctagtggagatggctatttcgaaaacagcccactgatgtcccagccagtgtgggagaggtatcgccctgatagattcctgaattccaactcaggcctccaagggctgcagttctacaggctacaccgggaagaaaggcccaactaccgtctcgagtgcctgcagtggctgaagagccagcctcggtggcccagctggggctggaaccaggtctcctgcccttgttcctggcagcagggacgacgggacttacgattccaacccgtcagcataggtcgctggggcctcggcagtaggcagctgtgcagcttcacctcttggcgaggaggcgtgtgctgcagctacgggccctggggagagtttcgtgaaggctggcacgtgcagcgtccttggcagttggcccaggaactggagccacagagctggtgctgccgctggaatgacaagccctacctctgtgccctgtaccagcagaggcggccccacgtgggctgtgctacatacaggcccccacagcccgcctggatgttcggggacccccacatcaccaccttggatggtgtcagttacaccttcaatgggctgggggacttcctgctggtcggggcccaagacgggaactcctccttcctgcttcagggccgcaccgcccagactggctcagcccaggccaccaacttcatcgcctttgcggctcagtaccgctccagcagcctgggccccgtcacggtccaatggctccttgagcctcacgacgcaatccgtgtcctgctggataaccagactgtgacatttcagcctgaccatgaagacggcggaggccaggagacgttcaacgccaccggagtcctcctgagccgcaacggctctgaggtctccgccagcttcgacggctgggccaccgtctcggtgatcgcgctctccaacatcctccactcctccgccagcctcccgcccgagtaccagaaccgcacggaggggctcctgggggtctggaataacaatccagaggacgacttcaggatgcccaatggctccaccattcccccagggagccctgaggagatgcttttccactttggaatgacctggcagatcaacgggacaggcctccttggcaagaggaatgaccagctgccttccaacttcacccctgttttctactcacaactgcaaaaaaacagctcctgggctgaacatttgatctccaactgtgacggagatagctcatgcatctatgacaccctggccctgcgcaacgcaagcatcggacttcacacgagggaagtcagtaaaaactacgagcaggcgaacgccaccctcaatcagtacccgccctccatcaatggtggtcgtgtgattgaagcctacaaggggcagaccacgctgattcagtacaccagcaatgctgaggatgccaacttcacgctcagagacagctgcaccgacttggagctctttgagaatgggacgttgctgtggacacccaagtcgctggagccattcactctggagattctagcaagaagtgccaagattggcttggcatctgcactccagcccaggactgtggtctgccattgcaatgcagagagccagtgtttgtacaatcagaccagcagggtgggcaactcctccctggaggtggctggctgcaagtgtgacgggggcaccttcggccgctactgcgagggctccgaggatgcctgtgaggagccgtgcttcccgagtgtccactgcgttcctgggaagggctgcgaggcctgccctccaaacctgactggggatgggcggcactgtgcggctctggggagctctttcctgtgtcagaaccagtcctgccctgtgaattactgctacaatcaaggccactgctacatctcccagactctgggctgtcagcccatgtgcacctgccccccagccttcactgacagccgctgcttcctggctgggaacaacttcagtccaactgtcaacctagaacttcccttaagagtcatccagctcttgctcagtgaagaggaaaatgcctccatggcagaggtcaacgcctcggtggcatacagactggggaccctggacatgcgggcctttctccgcaacagccaagtggaacgaatcgattctgcagcaccggcctcgggaagccccatccaacactggatggtcatctcggagttccagtaccgccctcggggcccggtcattgacttcctgaacaaccagctgctggccgcggtggtggaggcgttcttataccacgttccacggaggagtgaggagcccaggaacgacgtggtcttccagcccatctccggggaagacgtgcgcgatgtgacagccctgaacgtgagcacgctgaaggcttacttcagatgcgatggctacaagggctacgacctggtctacagcccccagagcggcttcacctgcgtgtccccgtgcagtaggggctactgtgaccatggaggccagtgccagcacctgcccagtgggccccgctgcagctgtgtgtccttctccatctacacggcctggggcgagcactgtgagcacctgagcatgaaactcgacgcgttcttcggcatcttctttggggccctgggcggcctcttgctgctgggggtcgggacgttcgtggtcctgcgcttctggggttgctccggggccaggttctcctatttcctgaactcagctgaggccttgccttgaaggggcagctgtggcctaggctacctcaagactcacctcatccttaccgcacatttaaggcgccattgcttttgggagactggaaaagggaaggtgactgaaggctgtcaggattctt

SEQ ID NO: 155759 - DNA, 3707 bp, Homo sapiens
  Payload ID: 10597
  Gene Symbol: MUC4
  Gene Name: mucin 4, cell surface associated
  ENST ID: ENST00000631146
  CDS Start-End: 1-3296
gagtttccctcttcccctatggggcaggcgccggggacctggagttcgtcaggaggaccgtggacttcacctccccactcttcaagccggcgactggcttcccccttggctcctctctccgtgattccctctacttcacagacaatggccagatcatcttcccagagtcagactaccagattttctcctaccccaacccactcccaacaggcttcacaggccgggaccctgtggccctggtggctccgttctgggacgatgctgacttctccactggtcgggggaccacattttatcaggaatacgagacgttctatggtgaacacagcctgctagtccagcaggccgagtcttggattagaaagatgacaaacaacgggggctacaaggccaggtgggccctaaaggtcacgtgggtcaatgcccacgcctatcctgcccagtggaccctcgggagcaacacctaccaagccatcctctccacggacgggagcaggtcctatgccctgtttctctaccagagcggtgggatgcagtgggacgtggcccagcgctcaggcaacccggtgctcatgggcttctctagtggagatggctatttcgaaaacagcccactgatgtcccagccagtgtgggagaggtatcgccctgatagattcctgaattccaactcaggcctccaagggctgcagttctacaggctacaccgggaagaaaggcccaactaccgtctcgagtgcctgcagtggctgaagagccagcctcggtggcccagctggggctggaaccaggtctcctgcccttgttcctggcagcagggacgacgggacttacgattccaacccgtcagcataggtcgctggggcctcggcagtaggcagctgtgcagcttcacctcttggcgaggaggcgtgtgctgcagctacgggccctggggagagtttcgtgaaggctggcacgtgcagcgtccttggcagttggcccaggaactggagccacagagctggtgctgccgctggaatgacaagccctacctctgtgccctgtaccagcagaggcggccccacgtgggctgtgctacatacaggcccccacagcccgcctggatgttcggggacccccacatcaccaccttggatggtgtcagttacaccttcaatgggctgggggacttcctgctggtcggggcccaagacgggaactcctccttcctgcttcagggccgcaccgcccagactggctcagcccaggccaccaacttcatcgcctttgcggctcagtaccgctccagcagcctgggccccgtcacggtccaatggctccttgagcctcacgacgcaatccgtgtcctgctggataaccagactgtgacatttcagcctgaccatgaagacggcggaggccaggagacgttcaacgccaccggagtcctcctgagccgcaacggctctgaggtctcggccagcttcgacggctgggccaccgtctcggtgatcgcgctctccaacatcctccacgcctccgccagcctcccgcccgagtaccagaaccgcacggaggggctcctgggggtctggaataacaatccagaggacgacttcaggatgcccaatggctccaccattcccccagggagccctgaggagatgcttttccactttggaatgacctggcagatcaacgggacaggcctccttggcaagaggaatgaccagctgccttccaacttcacccctgttttctactcacaactgcaaaaaaacagctcctgggctgaacatttgatctccaactgtgacggagatagctcatgcatctatgacaccctggccctgcgcaacgcaagcatcggacttcacacgagggaagtcagtaaaaactacgagcaggcgaacgccaccctcaatcagtacccgccctccatcaatggtggtcgtgtgattgaagcctacaaggggcagaccacgctgattcagtacaccagcaatgctgaggatgccaacttcacgctcagagacagctgcaccgacttggagctctttgagaatgggacgttgctgtggacacccaagtcgctggagccattcactctggagattctagcaagaagtgccaagattggcttggcatctgcactccagcccaggactgtggtctgccattgcaatgcagagagccagtgtttgtacaatcagaccagcagggtgggcaactcctccctggaggtggctggctgcaagtgtgacgggggcaccttcggccgctactgcgagggctccgaggatgcctgtgaggagccgtgcttcccgagtgtccactgcgttcctgggaagggctgcgaggcctgccctccaaacctgactggggatgggcggcactgtgcggctctggggagctctttcctgtgtcagaaccagtcctgccctgtgaattactgctacaatcaaggccactgctacatctcccagactctgggctgtcagcccatgtgcacctgccccccagccttcactgacagccgctgcttcctggctgggaacaacttcagtccaactgtcaacctagaacttcccttaagagtcatccagctcttgctcagtgaagaggaaaatgcctccatggcagaagtcaacgcctcggtggcatacagactggggaccctggacatgcgggcctttctccgcaacagccaagtggaacgaatcgattctgcagcaccggcctcgggaagccccatccaacactggatggtcatctcggagttccagtaccgccctcggggcccggtcattgacttcctgaacaaccagctgctggccgcggtggtggaggcgttcttataccacgttccacggaggagtgaggagcccaggaacgacgtggtcttccagcccatctccggggaagacgtgcgcgatgtgacagccctgaacgtgagcacgctgaaggcttacttcagatgcgatggctacaagggctacgacctggtctacagcccccagagcggcttcacctgcgtgtccccgtgcagtaggggctactgtgaccatggaggccagtgccaacacctgcccagtgggccccgctgcagctgtgtgtccttctccatctacacggcctggggcgagcactgtgagcacctgagcatgaaactcgacgcgttcttcggcatcttctttggggccctgggcggcctcttgctgctgggggtcgggacgttcgtggtcctgcgcttctggggttgctccggggccaggttctcctatttcctgaactcagctgaggccttgccttgaaggggcagctgtggcctaggctacctcaagactcacctcatccttaccgcacatttaaggcgccattgcttttgggagactggaaaagggaaggtgactgaaggctgtcaggattcttcaaggagaatgaatactgggaatcaagacaagactataccttatccataggcgcaggtgcacagggggaggccataaagatcaaacatgcatggatgggtcctcacgcagacacacccacagaaggacactagcctgtgcacgcgcgcgtgcacacacacacacacacacacgagttcataatgtggtgatggccctaagttaagcaaaatgcttctgcacacaaaactctctggtttacttcaaattaactctatttaaataaagtctctctgactttttgtgtcttcaaaa

SEQ ID NO: 155760 - DNA, 3777 bp, Homo sapiens
  Payload ID: 10597
  Gene Symbol: MUC4
  Gene Name: mucin 4, cell surface associated
  ENST ID: ENST00000630258
  CDS Start-End: 1-434
ctctgaagatggaaacaccaggaatgacaacaccgtcactgaagacagacggtgggagacgcacagccacatcaccaccccccacaacctcccagaccatcatttccaccattcccagcactgccatgcacacccgctccacagctgcccccatccccatcctgcctgagagaggagtttccctcttcccctatggggcaggcgccggggacctggagttcgtcaggaggaccgtggacttcacctccccactcttcaagccggcgactggcttcccccttggctcctctctccgtgattccctctacgcttcacaggccgggaccctgtggccctggtggctccgttctgggacgatgctgacttctccactggtcgggggaccacattttatcaggaatacgagacgttctatggtgaacacagcctgctagtccagcaggccgagtcttggattagaaagatgacaaacaacgggggctacaaggccaggtgggccctaaaggtcacgtgggtcaatgcccacgcctatcctgcccagtggaccctcgggagcaacacctaccaagccatcctctccacggacgggagcaggtcctatgccctgtttctctaccagagcggtgggatgcagtgggacgtggcccagcgctcagtggagatggctatttcgaaaacagcccactgatgtcccagccagtgtgggagaggtatcgccctgatagattcctgaattccaactcaggcctccaagggctgcagttctacaggctacaccgggaagaaaggcccaactaccgtctcgagtgcctgcagtggctgaagagccagcctcggtggcccagctggggctggaaccaggtctcctgcccttgttcctggcagcagggacgacgggacttacgattccaacccgtcagcataggtcgctggggcctcggcagtaggcagctgtgcagcttcacctcttggcgaggaggcgtgtgctgcagctacgggccctggggagagtttcgtgaaggctggcacgtgcagcgtccttggcagttggcccaggaactggagccacagagctggtgctgccgctggaatgacaagccctacctctgtgccctgtaccagcagaggcggccccacgtgggctgtgctacatacaggcccccacagcccgcctggatgttcggggacccccacatcaccaccttggatggtgtcagttacaccttcaatgggctgggggacttcctgctggtcggggcccaagacgggaactcctccttcctgcttcagggccgcaccgcccagactggctcagcccaggccaccaacttcatcgcctttgcggctcagtaccgctccagcagcctgggccccgtcacggtccaatggctccttgagcctcacgacgcaatccgtgtcctgctggataaccagactgtgacatttcagcctgaccatgaagacggcggaggccaggagacgttcaacgccaccggagtcctcctgagccgcaacggctctgaggtctcggccagcttcgacggctgggccaccgtctcggtgatcgcgctctccaacatcctccacgcctccgccagcctcccgcccgagtaccagaaccgcacggaggggctcctgggggtctggaataacaatccagaggacgacttcaggatgcccaatggctccaccattcccccagggagccctgaggagatgcttttccactttggaatgacctggcagatcaacgggacaggcctccttggcaagaggaatgaccagctgccttccaacttcacccctgttttctactcacaactgcaaaaaaacagctcctgggctgaacatttgatctccaactgtgacggagatagctcatgcatctatgacaccctggccctgcgcaacgcaagcatcggacttcacacgagggaagtcagtaaaaactacgagcaggcgaacgccaccctcaatcagtacccgccctccatcaatggtggtcgtgtgattgaagcctacaaggggcagaccacgctgattcagtacaccagcaatgctgaggatgccaacttcacgctcagagacagctgcaccgacttggagctctttgagaatgggacgttgctgtggacacccaagtcgctggagccattcactctggagattctagcaagaagtgccaagattggcttggcatctgcactccagcccaggactgtggtctgccattgcaatgcagagagccagtgtttgtacaatcagaccagcagggtgggcaactcctccctggaggtggctggctgcaagtgtgacgggggcaccttcggccgctactgcgagggctccgaggatgcctgtgaggagccgtgcttcccgagtgtccactgcgttcctgggaagggctgcgaggcctgccctccaaacctgactggggatgggcggcactgtgcggctctggggagctctttcctgtgtcagaaccagtcctgccctgtgaattactgctacaatcaaggccactgctacatctcccagactctgggctgtcagcccatgtgcacctgccccccagccttcactgacagccgctgcttcctggctgggaacaacttcagtccaactgtcaacctagaacttcccttaagagtcatccagctcttgctcagtgaagaggaaaatgcctccatggcagaagtcaacgcctcggtggcatacagactggggaccctggacatgcgggcctttctccgcaacagccaagtggaacgaatcgattctgcagcaccggcctcgggaagccccatccaacactggatggtcatctcggagttccagtaccgccctcggggcccggtcattgacttcctgaacaaccagctgctggccgcggtggtggaggcgttcttataccacgttccacggaggagtgaggagcccaggaacgacgtggtcttccagcccatctccggggaagacgtgcgcgatgtgacagccctgaacgtgagcacgctgaaggcttacttcagatgcgatggctacaagggctacgacctggtctacagcccccagagcggcttcacctgcgtgtccccgtgcagtaggggctactgtgaccatggaggccagtgccaacacctgcccagtgggccccgctgcagctgtgtgtccttctccatctacacggcctggggcgagcactgtgagcacctgagcatgaaactcgacgcgttcttcggcatcttctttggggccctgggcggcctcttgctgctgggggtcgggacgttcgtggtcctgcgcttctggggttgctccggggccaggttctcctatttcctgaactcagctgaggccttgccttgaaggggcagctgtggcctaggctacctcaagactcacctcatccttaccgcacatttaaggcgccattgcttttgggagactggaaaagggaaggtgactgaaggctgtcaggattcttcaaggagaatgaatactgggaatcaagacaagactataccttatccataggcgcaggtgcacagggggaggccataaagatcaaacatgcatggatgggtcctcacgcagacacacccacagaaggacactagcctgtgcacgcgcgcgtgcacacacacacacacacacacgagttcataatgtggtgatggccctaagttaagcaaaatgcttctgcacacaaaactctctggtttacttcaaattaactctatttaaataaagtctctctgactttttgtgtcttcaaaa

SEQ ID NO: 155761 - DNA, 15924 bp, Homo sapiens
  Payload ID: 10597
  Gene Symbol: MUC4
  Gene Name: mucin 4, cell surface associated
  ENST ID: ENST00000628685
  CDS Start-End: 1-13214
gaaccacagaggacacattaataactggaagtaaaactgctgccccagtcacctcaacaggctcaacaacagcgacactagagggacaatcaactgcagcttcttcaaggacctctaatcaggacatatcagcttcatctcagaaccaccagactaagagcacggagaccaccagcaaagctcaaaccgacaccctcacgcagatgatgacatcaactcttttttcttccccaagtgtacacaatgtgatggagacagctcctccagatgaaatgaccacatcatttccctccagtgtcaccaacacactcatgatgacatcaaagactataacaatgacaacctccacagactccactcttggaaacacagaagagacatcaacagcaggaactgaaagttctaccccagtgacctcagcagtctcaataacagctggacaggaaggacaatcacgaacaacttcctggaggacctctatccaagacacatcagcttcttctcagaaccactggactcggagcacgcagaccaccagggaatctcaaaccagcaccctaacacacagaaccacttcaactccttctttctctccaagtgtacacaatgtgacagggactgtttctcagaagacatctccttcaggtgaaacagctacctcatccctctgtagtgtcacaaacacatccatgatgacatcagagaagataacagtgacaacctccacaggctccactcttggaaacccaggggagacatcatcagtacctgttactggaagtcttatgccagtcacctcagcagccttagtaacatttgatccagaaggacaatcaccagcaactttctcaaggacttctactcaggacacaacagctttttctaagaaccaccagactcagagcgtggagaccaccagagtatctcaaatcaacaccctcaacaccctcacaccggttacaacatcaactgttttatcctcaccaagtggattcaacccaagtggaacagtttctcaggagacattcccttctggtgaaacaaccacctcatccccttccagtgtcagcaatacattcctggtaacatcaaaggtgttcagaatgccaacctccagagactctactcttggaaacacagaggagacatcactatctgtaagtggaaccatttctgcaatcacttccaaagtttcaaccatatggtggtcagacactctgtcaacagcactctcccccagttctctacctccaaaaatatccacagctttccacacccagcagagtgaaggtgcagagaccacaggacggcctcatgagaggagctcattctctccaggtgtgtctcaagaaatatttactctacatgaaacaacaacatggccttcctcattctccagcaaaggccacacaacttggtcacaaacagaactgccctcaacatcaacaggtgctgccactaggcttgtcacaggaaatccatctacagggacagctggcactattccaagggtcccctctaaggtctcagcaataggggaaccaggagagcccaccacatactcctcccacagcacaactctcccaaaaacaacaggggcaggcgcccagacacaatggacacaagaaacggggaccactggagaggctcttctcagcagcccaagctacagtgtgactcagatgataaaaacggccacatccccatcttcttcacctatgctggatagacacacatcccaacaaattacaacggcaccatcaacaaatcattcaacaatacattccacaagcacctctcctcaggaatcaccagctgtttcccaaaggggtcacactcaagccccgcagaccacacaagaatcacaaaccacgaggtccgtctcccccatgactgacaccaagacagtcaccaccccaggttcttccttcacagccagtgggcactcgccctcagaaattgttcctcaggacgcacccaccataagtgcagcaacaacctttgccccagctcccaccggggatggtcacacaacccaggccccgaccacagcactgcaggcagcacccagcagccatgatgccaccctggggccctcaggaggcacgtcactttccaaaacaggtgcccttactctggccaactctgtagtgtcaacaccagggggcccagaaggacaatggacatcagcctctgccagcacctcacctgacacagcagcagccatgacccatacccaccaggctgagagcacagaggcctctggacaaacacagaccagcgaaccggcctcctcagggtcacgaaccacctcagcgggcacagctaccccttcctcatccggggcgagtggcacaacaccttcaggaagcgaaggaatatccacctcaggagagacgacaaggttttcatcaaacccctccagggacagtcacacaacccagtcaacaaccgaattgctgtccgcctcagccagtcatggtgccatcccagtaagcacaggaatggcgtcttcgatcgtccccggcacctttcatcccaccctctctgaggcctccactgcagggagaccgacaggacagtcaagcccaacttctcccagtgcctctcctcaggagacagccgccatttcccggatggcccagactcagaggacaagaaccagcagagggtctgacactatcagcctggcgtcccaggcaaccgacaccttctcaacagtcccacccacacctccatcgatcacatccactgggcttacatctccacaaaccgagacccacactctgtcaccttcagggtctggtaaaaccttcaccacggccctcatcagcaacgccacccctcttcctgtcacctacgcttcctcggcatccacaggtcacaccacccctcttcatgtcaccgatgcttcctcagtatccacaggtcacgccacccctcttcctgtcaccagcccttcctcagtatccacaggtcacaccacccctcttcctgtcaccgacacttcctcagaatccacaggtcacgtcacccctcttcctgtcaccagcttttcctcagcatccacaggtgacagcacccctcttcctgtcactgacacttcctcagcatccacaggtcacgtcacccctcttcctgtcaccagcctttcctcagcatccacaggtgacaccacccctcttcctgtcactgacacttcctcagcatccacaggtcacgccacctctcttcctgtcaccgacacttcctcagtatccacaggtcacaccacccctcttcctgtcaccgacacttcctcagcatccacaggtcacgccacctctcttcctgtcaccgacacttcctcagtatccacaggtcacaccacccctcttcatgtcactgatgcttcctcagcatccacaggtcaggccacccctcttcctgtcaccagcctttcctcagtatccacaggtgacaccacgcctcttcctgtcactagcccttcctcagcatccacaggtcacgccacccctcttcttgtcaccgacacttcctcagcatccacaggacacgccacccctcttcctgtcaccgacgcttcctcagtgtccacagatcacgccacctctcttcctgtaaccatcccttccgcagcatccacaggtcacaccacccctcttcctgtcaccgacacttcctcagcatccacaggtcaggccacctctcttcttgtcaccgacacttcctcagtatccacaggtgacaccacgcctcttcctgtcactagcacttcctcagcatccacaggtcacgtcactcctcttcatgtcaccagcccttcctcagcatccacaggtcacgccacccctcttcctgtcaccagcctttcctcagcatccacaggtgacaccatgcctcttcctgtcactagcccttcctcagcatccacaggtgacaccacccctcttcctgtcaccgacgcttcctcagtatccacaggtcacaccacccctcttcatgtcactgatgcttcctcagcatccacaggtcaggccacccctcttcctgtcaccagcctttcctcagtatccacaggtgacaccacgcctcttcctgtcactagcccttcctcagcatccacaggtcacgccacccctcttcttgtcaccgacacttcctcagcatccacaggacacgccacccctcttcctgtcaccgacgcttcctcagtgtccacagatcacgccacctctcttcctgtaaccatcccttccgcagcatccacaggtcacaccacccctcttcctgtcaccgacacttcctcagcatccacaggtcaggccacctctcttcttgtcaccgacacttcctcagtatccacaggtgacaccacgcctcttcctgtcactagcacttcctcagcatccacaggtcacgtcactcctcttcatgtcaccagcccttcctcagcatccacaggtcacgccacccctcttcctgtcaccagcctttcctcagcatccacaggtgacaccatgcctcttcctgtcactagcccttcctcagcatccacaggtgacaccacccctcttcctgtcaccgacgcttcctcagtatccacaggtcacaccacccctcttcctgtcaccagcccttcctcagcatctacaggtcacaccacccctcttcctgtcaccgacacttcctcagcatccaaaggtgacaccacccctcttcctgtcaccagcccttcctcagcatctacaggtcacaccacccctcttcctgtcaccgacacttcctcagcatccacaggtgacaccacccctcttcctgtcaccaatgcttcctcattatccacaggtcacgccacccctcttcatgtcaccagcccttcctcagcatccacaggtcacgccacccctcttcctgtcaccagcacttcctcagcatccaccggtcacgccacccctcttcctgtcaccggcctttcctcagctaccacagatgacaccacccgtcttcctgtcaccgacgtttcctcggcatccacaggtcaggccacccctcttcctgtcaccagcctttcctcagtatccacaggtgacaccacgcctcttcctgtcactagcccttcctcagcatccacaggtcacgccagccctcttcttgtcactgacgcttcctcagcatccacaggtcaggccacccctcttcctgtcaccgacacttcctcagtatccacagctcacgccaccccacttcctgtcaccggcctttcttcagcttccacagatgacaccacccgtcttcctgtcaccgacgtttcctcggcatccacaggtcaggccatccctcttcctgtcaccagcccttcctcagcatccacaggtgacaccacccctcttcctgtcaccgacgcttcctcagcatccacaggtgacaccacctctcttcctgtcaccatcccttcctcagcatcttcaggtcacaccacctctcttcctgtcaccgacgcttcctcagtgtccacaggtcacgccacctctcttcttgtcaccgacgcttcctcagtatccacaggtgacaccacccctcttcctgtcaccgacactaactcagcatccacaggtgacaccacccctcttcatgtcaccgacgcttcctcagtatccacaggtcacgccacctctcttcctgtcaccagcctttcctcagcatccacaggtgacaccacgcctcttcctgtcactagcccttcctcagcatcctcaggtcacaccacccctcttcctgtcaccgacgcttcctcagtacccacaggtcacgccacctctcttcctgtcaccgacgcttcctcagtgtccacaggtcacgccacccctcttcctgtcaccgacgcttcctcagtgtccacaggtcatgccacccctcttccggtcaccgacacttcctcagtatctacaggacaggccacccctcttcctgtcaccagcctttcctcagcatccacaggtgacaccacccctcttcctgtcaccgacacttcctcagcatccacaggtcacgccccccatcttcctgtcaccggcctttcctcagcttccacaggtgacaccacccgtcttcctgtcaccaacgtttcctcggcatccacaggtcatgccacccctcttcctgtcaccagcacttcctcagcatccacaggtgacaccacccctcttcctggcaccgacacttcctcagtatccacaggtcacaccacccctcttcttgtcaccgacgcttcgtcagtatccacaggtgacaccacccgtcttcctgtcaccagcccttcctcagcatctacaggtcacaccacccctcttcatgtcaccgatgcttcctcagtatccacaggtcacaccacccctcttcctgtcaccgacacttcctcagcatccacaggtcaggccacctctcttcttgtcaccgacacttcctcagtatccacaggtgacaccacgcctcttcctgtcactagcacttcctcagcatccacaggtcacgtcactcctcttcatgtcaccagcccttcctcagcatccacaggtcacgccacccctcttcctgtcaccagcctttcctcagcatccacaggtgacaccacccctcttcctgtcaccgacacttcctcagtatccacaggtcacaccacccctcttcctgtcaccagcccttcctcagcatctacaggtcacaccacccctcttcctgtcaccgacacttcctcagcatccaaaggtgacaccacccctcttcctgtcaccagcccttcctcagcatctacaggtcacaccacccctcttcctgtcaccgacacttcctcagcatccacaggtgacaccacccctcttcctgtcaccaatgcttcctcattatccacaggtcacgccacccctcttcatgtcaccagcccttcctcagcatccacaggtcacgccacccctcttcctgtcaccagcacttcctcagcatccaccggtcacgccacccctcttcctgtcaccagcacttcctcagcatccaccggtcacgccacccctcttcctgtcaccgacaattcctcagtatccacaggtcatgccacccctcttcctgtcaccggcctttcctcagctaccacagatgacaccacccgtcttcctgtcaccgacgtgtcctcggcatccacaggtcaggccacccctcttcctgtcaccagcctttcctcagtatccacaggtgacaccacgcctcttcctgtcactagcccttcctcagcatccacaggtcacgccagccctcttcttgtcactgacgcttcctcagcatccacaggtcaggccacccctcttcctgtcaccgacacttcctcagtatccacagctcacgccaccccacttcctgtcaccggcctttcctcagcttccacagatgacaccacccgtcttcctgtcaccgacgtttcctcggcatccacaggtcaggccatccctcttcctgtcaccagcccttcctcagcatccacaggtgacaccacccctcttcctgtcaccgacgcttcctcagcatccacaggtgacaccacctctcttcctgtcaccatcccttcctcagcatcttcaggtcacaccacctctcttcctgtcaccgacgcttcctcagtgtccacaggtcacgccacctctcttcttgtcaccgacgcttcctcagtatccacaggtgacaccacccctcttcctgtcaccgacactaactcagcatccacaggtgacaccacccctcttcatgtcaccgacgcttcctcagtatccacaggtcacgccacctctcttcctgtcaccagcctttcctcagcatccacaggtgacaccacgcctcttcctgtcactagcccttcctcagcatcctcaggtcacaccacctctcttcctgtcaccgacgcttcctcagtgtccacaggtcacgccacctctcttcctgtcaccatcccttcctcagcatcctcaggtcacaccacccctcttcctgtcaccgacgcttcctcagtacccacaggtcacgccacctctcttcctgtcaccgacgcttcctcagtgtccacaggtcacgccacccctcttcctgtcaccgacgcttcctcagtgtccacaggtcatgccacccctcttccggtcaccgacacttcctcagtatctacaggacaggccacccctcttcctgtcaccagcctttcctcagcatcatccactggtgacaccacgccgcttcctgtcactgatacttcctcagcatccacaggtcaggacacccctcttcctgtcaccagccttttctcagtatccacaggtgacaccacgcctcttcctgtcactagcccttcctcagcatccacaggtcacgccacccatcttcttgtcaccgacgcttcctcagtatccacaggtcacgccacctctcttcttgtcaccgacgcttcctcagtatccacaggtcacgccaccgctcttcatgtcaccgatgcttcctcattatccacaggggacaccacccctcttcctgtcaccagcccttcctcagcatccacaggtgacaccacccctcttcctgtcaccgacacttcctcagtatccacaggtcacgccacctctcttcctgtcactgacacttcctcagcatccacaggtcacgccacctctcttcctgtcaccgacacttcctcagcatccacaggtcaggccacccctcttcctgtcaccagcccttcctcagcatccacaggtcacgccatccctcttcttgtcaccgacacttcctcagcatccacaggacaggccacccctcttcctgtcaccagcctttcctcagcatccacaggtgacaccacccctcttcctgtcaccgatgcttcctcagtgtccacaggtcacgccacctctcttcctgtcaccagcctttcctcagtatccacaggtgacaccacccctcttcctgtcactagcccttcctcagcatccacaggtcacgccacccctcttcatgtcaccagcccttcctcagcatccacaggtcacgccacccctcttcctgtcaccagcctttcctcagcatccacaggtgacaccacgcctcttcctgtcactagcccttcctcagcatccacaggtcacgccacccctcttcatgtcaccgacgcttcctcagtatccacaggtgacaccacccctcttcctgtcaccagcccttcctcagcatcctcaggtcacaccacccctcttcctgtcaccgacgcttcctcagcatccacaggtgacaccacccctcttcctgtcaccgacacttcctcagcatccacaggtcacgccacccatcttcctgtcaccggcctttcctcagcttccacaggtgacaccacccgtcttcctgtcaccgacgtttcctcggcatccacaggtcatgccacccctcttcctgtcaccagcacttcctcagcatccacaggtgacaccacccctcttcctggcaccgacacttcctcagtatccacaggtcacaccacccctcttcttgtcaccgacgcttcgtcagtatccacaggtgacaccacccgtcttcctgtcaccagcccttcctcagcatctacaggtcacaccacccctctacctgtcaccgacactccctcagcatccacaggtgacaccacccctcttcctgtcaccaatgcttcctcattatccacacgtcacgccacctctcttcatgtcaccagcccttcctcagcatccaccggtcacgccacccctcttcctgttaccgacacttccgcagcatccacaggtcacgccacccctcttcctgtcaccagcacttcctcagcatccacaggtgacaccacccctcttcctgtcaccgacacttcctcagcatccacaggtcatgccacccctcttcctgtcaccaacacttcctcagtatccacaggtcacgccacccctcttcatgtcaccagcccttcctcagcatccacaggtcacaccacccctcttcctgtcaccgacgcttcgtcagtgtccacaggtcacgccacctctcttcctgtcaccgacgcttcctcagtgtccacaggtcacgccacccctcttcctgtcaccgacgcttcctcagtgtccacaggtcacgctacccctcttcctctcaccagcctttcctcagtatccacaggtgacaccacgcctcttcctgtcaccgacacttcctcagcatccacaggtcaggccacccctcttcctgtcaccagcctttcctcagtatccacaggtgacaccacccctcttcctgtcaccgacacttcctcagcatccacaggtcacgccacctctcttcctgtcaccgacacttcctcagcatccacaggtcacgccacccctcttcatgtcaccagcccttcctcagcatccaccggtcacgccaccccgcttcctgtcaccgacacttcctcagcatccacaggtcacgccacccctcttcctgtcaccagcctttcctcagtatccacaggtgacaccacgcctcttcctgtcactagcccttcctcagcatccacaggtcacgccactcctcttcttgtcaccgacgcttcctcagcatccacaggtcaggccacccctcttcctgtcaccagcctttcctcagtatccacaggtgacaccacgcctcttcctgtcactagcccttcctcagcatccaccggtcatgccacctctcttcctgtcaccgacacttcctcagcatccacaggtgacaccacctctcttcctgtcaccgacacttcctcagcatacacaggtgacaccacctctcttcctgtcaccgacacttcctcatcatccacaggtgacaccacccctcttcttgtcaccgagacttcctcagcatccacaggtgacaccacccctgtgcctgtcaccgacacttcctcagtatccacaggtcacgccacccctcttcctgtcaccggcctttcctcagcttccacaggtgacaccacccgtcttcctgtcaccgacatttcctcggcatccacaggtcaggccacccctcttcctgtcaccaacacttcctcagtatccacaggtgacaccatgcctcttcctgtcactagcccttcctcagcatccacaggtcacgccacccctcttcctgtcaccagcacttcctcagcatccaccggtcacgccacccctgttcctgtcaccagcacttcctcagcatccacaggtcacaccacccctcttcctgtcaccagcccttcctcagcatctacaggtcacaccacccctcttcctgtcaccgacacttcctcagcatccacaggtgacaccacccctcttcctgtcaccaatgcttcctcattatccacaggacacaccacccctcttcatgtcaccatcccttcctcagcatccacaggtgacaccagcactcttcctgtcaccggcgcttcctcagcatccaccggtcacgccacccctcttcctgtcaccgacacttcctcagtatccacaggtcacgccacccctcttcctgtcaccagcttttcctcagtatccacaggtgacaccacccctcttcctgtcaccgacgcttcctcggcatccaccggtcacgccacccctcttcctgtcaccgacacttcctcagcatccacaggtgacaccacccctcttcctgtcaccgacgcttcctcggcatccacaggtcaggccacccctcttcctgtcaccagcctttcctcagtatcaacaggtgacaccacgcctcttcctgtcaccatcccttcctcagcatcctcaggtcacaccacctctcttcctgtcagcgacacttcctcagcatccacaggtcaggccacccctcttcctgtcaccagcctttcctcagtatccacaggtgacaccacccctcttcttgtcaccgacgcttcctcagtatccacaggtcacgccacccctcttcctgtcaccgacacttcctcagcatccacaggtgacaccacccgtcttcctgtcacggacacttcctcagcatccacaggtcaggccacccctcttcctgtcaccagcctttcctcagtatccacaggtgacaccacccctcttcttgtcaccaacacttcctcagtatccacaggtcacgccacctctcttcctgtcaccatcccttcctcatcatcctcaggtcacaccacccctcttcctgtcaccagcacttcctcagtatctacaggtcacgtcacccctcttcatgtcaccagcccttcctcatcatccacaggtcaggccacccctcttcctgtcaccagcacttcctcatcatccacaggtcaggccacccctcttcctgtcaccagcacttcctcagcatccacaggtcacgccacccctcttcctgtcaccgacgcttcctcagtgtccacaggtcacgccacgcctcttcctgtcaccgacacttcctcagcatccacaggtgacaccacccctcttcctgtcaccgacacttcctcagcatccacaggtcaggccacccctcttcctgtcaccagcctttcctcagtatccacaggtcacgccacccctcttgctgtcagcagtgctacctcagcttccacagtatcctcggactcccctctgaagatggaaacatcaggaatgacaacaccgtcactgaagacagacggtgggagacgcacagccacatcaccaccccccacaacctcccagaccatcatttccaccattcccagcactgccatgcacacccgctccacagctgcccccatccccatcctgcctgagagaggtgaggccatacaggagtttccctcttcccctatggggcagacgccggggacctggagttcgtcaggaggaccgtggacttcacctccccactcttcaagccggcgactggcttcccccttggctcctctctccgtgattccctctacttcacagacaatggccagatcatcttcccagagtcagactaccagattttctcctaccccaacccactcccaacaggcttcacaggccgggaccctgtggccctggtggctccgttctgggacgatgctgacttctccactggtcgggggaccacattttatcaggaatacgagacgttctatggtgaacacagcctgctagtccagcaggccgagtcttggattagaaagatcacaaacaacgggggctacaaggccaggtgggccctaaaggtcacgtgggtcaatgcccacgcctatcctgcccagtggaccctcgggagcaacacctaccaagccatcctctccacggacgggagcaggtcctatgccctgtttctctaccagagcggtgggatgcagtgggacgtggcccagcgctcaggcaagccggtgctcatgggcttctctagtggagatggctatttcgaaaacagcccactgatgtcccagccagtgtgggagaggtatcgccctgatagattcctgaattccaactcaggcctccaagggctgcagttctacaggctacaccgggaagaaaggcccaactaccgtctcgagtgcctgcagtggctgaagagccagcctcggtggcccagctggggctggaaccaggtctcctgcccttgttcctggcagcagggacgacgggacttacgattccaacccgtcagcataggtcgctggggcctcggcagtaggcagctgtgcagcttcacctcttggcgaggaggcgtgtgctgcagctacgggccctggggagagtttcgtgaaggctggcacgtgcagcgtccttggcagttggcccaggaactggagccacagagctggtgctgccgctggaatgacaagccctacctctgtgccctgtaccagcagaggcggccccacgtgggctgtgctacatacaggcccccacagcccgcctggatgttcggggacccccacatcaccaccttggatggtgtcagttacaccttcaatgggctgggggacttcctgctggtcggggcccaagacgggaactcctccttcctgcttcagggccgcaccgcccagactggctcagcccaggccaccaacttcatcgcctttgcggctcagtaccgctccagcagcctgggccccgtcacggtccaatggctccttgagcctcacgacgcaatccgtgtcctgctggataaccagactgtgacatttcagcctgaccatgaagacggcggaggccaggagacgttcaacgccaccggagtcctcctgagccgcaacggctctgaggtctccgccagcttcgacggctgggccaccgtctcggtgatcgcgctctccaacatcctccactcctccgccagcctcccgcccgagtaccagaaccgcacggaggggctcctgggggtctggaataacaatccagaggacgacttcaggatgcccaatggctccaccattcccccagggagccctgaggagatgcttttccactttggaatgacctggcagatcaacgggacaggcctccttggcaagaggaatgaccagctgccttccaacttcacccctgttttctactcacaactgcaaaaaaacagctcctgggctgaacatttgatctccaactgtgacggagatagctcatgcatctatgacaccctggccctgcgcaacgcaagcatcggacttcacacgagggaagtcagtaaaaactacgagcaggcgaacgccaccctcaatcagtacccgccctccatcaatggtggtcgtgtgattgaagcctacaaggggcagaccacgctgattcagtacaccagcaatgctgaggatgccaacttcacgctcagagacagctgcaccgacttggagctctttgaaccagtcctgccctgtgaattactgctacaatcaaggccactgctacatctcccagactctgggctgtcagcccatgtgcacctgccccccagccttcactgacagccgctgcttcctggctgggaacaacttcagtccaactgtcaacctagaacttcccttaagagtcatccagctcttgctcagtgaagaggaaaatgcctccatggcagaggtcaacgcctcggtggcatacagactggggaccctggacatgcgggcctttctccgcaacagccaagtggaacgaatcgattctgcagcaccggcctcgggaagccccatccaacactggatggtcatctcggagttccagtaccgccctcggggcccggtcattgacttcctgaacaaccagctgctggccgcggtggtggaggcgttcttataccacgttccacggaggagtgaggagcccaggaacgacgtggtcttccagcccatctccggggaagacgtgcgcgatgtgacagccctgaacgtgagcacgctgaaggcttacttcagatgcgatggctacaagggctacgacctggtctacagcccccagagcggcttcacctgcgtgtccccgtgcagtaggggctactgtgaccatggaggccagtgccagcacctgcccagtgggccccgctgcagctgtgtgtccttctccatctacacggcctggggcgagcactgtgagcacctgagcatgaaactcgacgcgttcttcggcatcttctttggggccctgggcggcctcttgctgctgggggtcgggacgttcgtggtcctgcgcttctggggttgctccggggccaggttctcctatttcctgaactcagctgaggccttgccttgaaggggcagctgtggcctaggctacctcaagactcacctcatccttaccgcacatttaaggcgccattgcttttgggagactggaaaagggaaggtgactgaaggctgtcaggattctt

SEQ ID NO: 155762 - DNA, 15921 bp, Homo sapiens; identical to SEQ ID NO: 155717
  Payload ID: 10597
  Gene Symbol: MUC4
  Gene Name: mucin 4, cell surface associated
  ENST ID: ENST00000625430
  CDS Start-End: 1-13211

SEQ ID NO: 155763 - DNA, 3705 bp, Homo sapiens
  Payload ID: 10597
  Gene Symbol: MUC4
  Gene Name: mucin 4, cell surface associated
  ENST ID: ENST00000625485
  CDS Start-End: 1-3296
gagtttccctcttcccctatggggcagacgccggggacctggagttcgtcaggaggaccgtggacttcacctccccactcttcaagccggcgactggcttcccccttggctcctctctccgtgattccctctacttcacagacaatggccagatcatcttcccagagtcagactaccagattttctcctaccccaacccactcccaacaggcttcacaggccgggaccctgtggccctggtggctccgttctgggacgatgctgacttctccactggtcgggggaccacattttatcaggaatacgagacgttctatggtgaacacagcctgctagtccagcaggccgagtcttggattagaaagatcacaaacaacgggggctacaaggccaggtgggccctaaaggtcacgtgggtcaatgcccacgcctatcctgcccagtggaccctcgggagcaacacctaccaagccatcctctccacggacgggagcaggtcctatgccctgtttctctaccagagcggtgggatgcagtgggacgtggcccagcgctcaggcaagccggtgctcatgggcttctctagtggagatggctatttcgaaaacagcccactgatgtcccagccagtgtgggagaggtatcgccctgatagattcctgaattccaactcaggcctccaagggctgcagttctacaggctacaccgggaagaaaggcccaactaccgtctcgagtgcctgcagtggctgaagagccagcctcggtggcccagctggggctggaaccaggtctcctgcccttgttcctggcagcagggacgacgggacttacgattccaacccgtcagcataggtcgctggggcctcggcagtaggcagctgtgcagcttcacctcttggcgaggaggcgtgtgctgcagctacgggccctggggagagtttcgtgaaggctggcacgtgcagcgtccttggcagttggcccaggaactggagccacagagctggtgctgccgctggaatgacaagccctacctctgtgccctgtaccagcagaggcggccccacgtgggctgtgctacatacaggcccccacagcccgcctggatgttcggggacccccacatcaccaccttggatggtgtcagttacaccttcaatgggctgggggacttcctgctggtcggggcccaagacgggaactcctccttcctgcttcagggccgcaccgcccagactggctcagcccaggccaccaacttcatcgcctttgcggctcagtaccgctccagcagcctgggccccgtcacggtccaatggctccttgagcctcacgacgcaatccgtgtcctgctggataaccagactgtgacatttcagcctgaccatgaagacggcggaggccaggagacgttcaacgccaccggagtcctcctgagccgcaacggctctgaggtctccgccagcttcgacggctgggccaccgtctcggtgatcgcgctctccaacatcctccactcctccgccagcctcccgcccgagtaccagaaccgcacggaggggctcctgggggtctggaataacaatccagaggacgacttcaggatgcccaatggctccaccattcccccagggagccctgaggagatgcttttccactttggaatgacctggcagatcaacgggacaggcctccttggcaagaggaatgaccagctgccttccaacttcacccctgttttctactcacaactgcaaaaaaacagctcctgggctgaacatttgatctccaactgtgacggagatagctcatgcatctatgacaccctggccctgcgcaacgcaagcatcggacttcacacgagggaagtcagtaaaaactacgagcaggcgaacgccaccctcaatcagtacccgccctccatcaatggtggtcgtgtgattgaagcctacaaggggcagaccacgctgattcagtacaccagcaatgctgaggatgccaacttcacgctcagagacagctgcaccgacttggagctctttgagaatgggacgttgctgtggacacccaagtcgctggagccattcactctggagattctagcaagaagtgccaagattggcttggcatctgcactccagcccaggactgtggtctgccattgcaatgcagagagccagtgtttgtacaatcagaccagcagggtgggcaactcctccctggaggtggctggctgcaagtgtgacgggggcaccttcggccgctactgcgagggctccgaggatgcctgtgaggagccgtgcttcccgagtgtccactgcgttcctgggaagggctgcgaggcctgccctccaaacctgactggggatgggcggcactgtgcggctctggggagctctttcctgtgtcagaaccagtcctgccctgtgaattactgctacaatcaaggccactgctacatctcccagactctgggctgtcagcccatgtgcacctgccccccagccttcactgacagccgctgcttcctggctgggaacaacttcagtccaactgtcaacctagaacttcccttaagagtcatccagctcttgctcagtgaagaggaaaatgcctccatggcagaggtcaacgcctcggtggcatacagactggggaccctggacatgcgggcctttctccgcaacagccaagtggaacgaatcgattctgcagcaccggcctcgggaagccccatccaacactggatggtcatctcggagttccagtaccgccctcggggcccggtcattgacttcctgaacaaccagctgctggccgcggtggtggaggcgttcttataccacgttccacggaggagtgaggagcccaggaacgacgtggtcttccagcccatctccggggaagacgtgcgcgatgtgacagccctgaacgtgagcacgctgaaggcttacttcagatgcgatggctacaagggctacgacctggtctacagcccccagagcggcttcacctgcgtgtccccgtgcagtaggggctactgtgaccatggaggccagtgccagcacctgcccagtgggccccgctgcagctgtgtgtccttctccatctacacggcctggggcgagcactgtgagcacctgagcatgaaactcgacgcgttcttcggcatcttctttggggccctgggcggcctcttgctgctgggggtcgggacgttcgtggtcctgcgcttctggggttgctccggggccaggttctcctatttcctgaactcagctgaggccttgccttgaaggggcagctgtggcctaggctacctcaagactcacctcatccttaccgcacatttaaggcgccattgcttttgggagactggaaaagggaaggtgactgaaggctgtcaggattcttcaaggagaatgaatactgggaatcaagacaagactataccttatccataggcgcaggtgcacagggggaggccataaagatcaaacatgcatggatgggtcctcacgcagacacacccacagaaggacactagcctgtgcacgcgcgcgtgcacacacacacacacacaagagttcataatgtggtgatggccctaagttaagcaaaatgcttctgcacacaaaactctctggtttacttcaaattaactctatttaaataaagtctctctgactttttgtgtcttcaaaa

SEQ ID NO: 155764 - DNA, 16046 bp, Homo sapiens
  Payload ID: 10597
  Gene Symbol: MUC4
  Gene Name: mucin 4, cell surface associated
  ENST ID: ENST00000629594
  CDS Start-End: 1-13250
gaaccacagaggacacattaataactggaagtaaaactgctgccccagtcacctcaacaggctcaacaacagcgacactagagggacaatcaactgcagcttcttcaaggacctctaatcaggacatatcagcttcatctcagaaccaccagactaagagcacggagaccaccagcaaagctcaaaccgacaccctcacgcagatgatgacatcaactcttttttcttccccaagtgtacacaatgtgatggagacagctcctccagatgaaatgaccacatcatttccctccagtgtcaccaacacactcatgatgacatcaaagactataacaatgacaacctccacagactccactcttggaaacacagaagagacatcaacagcaggaactgaaagttctaccccagtgacctcagcagtctcaataacagctggacaggaaggacaatcacgaacaacttcctggaggacctctatccaagacacatcagcttcttctcagaaccactggactcggagcacgcagaccaccagggaatctcaaaccagcaccctaacacacagaaccacttcaactccttctttctctccaagtgtacacaatgtgacagggactgtttctcagaagacatctccttcaggtgaaacagctacctcatccctctgtagtgtcacaaacacatccatgatgacatcagagaagataacagtgacaacctccacaggctccactcttggaaacccaggggagacatcatcagtacctgttactggaagtcttatgccagtcacctcagcagccttagtaacatttgatccagaaggacaatcaccagcaactttctcaaggacttctactcaggacacaacagctttttctaagaaccaccagactcagagcgtggagaccaccagagtatctcaaatcaacaccctcaacaccctcacaccggttacaacatcaactgttttatcctcaccaagtggattcaacccaagtggaacagtttctcaggagacattcccttctggtgaaacaaccacctcatccccttccagtgtcagcaatacattcctggtaacatcaaaggtgttcagaatgccaacctccagagactctactcttggaaacacagaggagacatcactatctgtaagtggaaccatttctgcaatcacttccaaagtttcaaccatatggtggtcagacactctgtcaacagcactctcccccagttctctacctccaaaaatatccacagctttccacacccagcagagtgaaggtgcagagaccacaggacggcctcatgagaggagctcattctctccaggtgtgtctcaagaaatatttactctacatgaaacaacaacatggccttcctcattctccagcaaaggccacacaacttggtcacaaacagaactgccctcaacatcaacaggtgctgccactaggcttgtcacaggaaatccatctacagggacagctggcactattccaagggtcccctctaaggtctcagcaataggggaaccaggagagcccaccacatactcctcccacagcacaactctcccaaaaacaacaggggcaggcgcccagacacaatggacacaagaaacggggaccactggagaggctcttctcagcagcccaagctacagtgtgactcagatgataaaaacggccacatccccatcttcttcacctatgctggatagacacacatcccaacaaattacaacggcaccatcaacaaatcattcaacaatacattccacaagcacctctcctcaggaatcaccagctgtttcccaaaggggtcacactcaagccccgcagaccacacaagaatcacaaaccacgaggtccgtctcccccatgactgacaccaagacagtcaccaccccaggttcttccttcacagccagtgggcactcgccctcagaaattgttcctcaggacgcacccaccataagtgcagcaacaacctttgccccagctcccaccggggatggtcacacaacccaggccccgaccacagcactgcaggcagcacccagcagccatgatgccaccctggggccctcaggaggcacgtcactttccaaaacaggtgcccttactctggccaactctgtagtgtcaacaccagggggcccagaaggacaatggacatcagcctctgccagcacctcacctgacacagcagcagccatgacccatacccaccaggctgagagcacagaggcctctggacaaacacagaccagcgaaccggcctcctcagggtcacgaaccacctcagcgggcacagctaccccttcctcatccggggcgagtggcacaacaccttcaggaagcgaaggaatatccacctcaggagagacgacaaggttttcatcaaacccctccagggacagtcacacaacccagtcaacaaccgaattgctgtccgcctcagccagtcatggtgccatcccagtaagcacaggaatggcgtcttcgatcgtccccggcacctttcatcccaccctctctgaggcctccactgcagggagaccgacaggacagtcaagcccaacttctcccagtgcctctcctcaggagacagccgccatttcccggatggcccagactcagaggacaagaaccagcagagggtctgacactatcagcctggcgtcccaggcaaccgacaccttctcaacagtcccacccacacctccatcgatcacatccactgggcttacatctccacaaaccgagacccacactctgtcaccttcagggtctggtaaaaccttcaccacggccctcatcagcaacgccacccctcttcctgtcacctacgcttcctcggcatccacaggtcacaccacccctcttcatgtcaccgatgcttcctcagtatccacaggtcacgccacccctcttcctgtcaccagcccttcctcagtatccacaggtcacaccacccctcttcctgtcaccgacacttcctcagaatccacaggtcacgtcacccctcttcctgtcaccagcttttcctcagcatccacaggtgacagcacccctcttcctgtcactgacacttcctcagcatccacaggtcacgtcacccctcttcctgtcaccagcctttcctcagcatccacaggtgacaccacccctcttcctgtcactgacacttcctcagcatccacaggtcacgccacctctcttcctgtcaccgacacttcctcagtatccacaggtcacaccacccctcttcctgtcaccgacacttcctcagcatccacaggtcacgccacctctcttcctgtcaccgacacttcctcagtatccacaggtcacaccacccctcttcatgtcactgatgcttcctcagcatccacaggtcaggccacccctcttcctgtcaccagcctttcctcagtatccacaggtgacaccacgcctcttcctgtcactagcccttcctcagcatccacaggtcacgccacccctcttcttgtcaccgacacttcctcagcatccacaggacacgccacccctcttcctgtcaccgacgcttcctcagtgtccacagatcacgccacctctcttcctgtaaccatcccttccgcagcatccacaggtcacaccacccctcttcctgtcaccgacacttcctcagcatccacaggtcaggccacctctcttcttgtcaccgacacttcctcagtatccacaggtgacaccacgcctcttcctgtcactagcacttcctcagcatccacaggtcacgtcactcctcttcatgtcaccagcccttcctcagcatccacaggtcacgccacccctcttcctgtcaccagcctttcctcagcatccacaggtgacaccatgcctcttcctgtcactagcccttcctcagcatccacaggtgacaccacccctcttcctgtcaccgacgcttcctcagtatccacaggtcacaccacccctcttcatgtcactgatgcttcctcagcatccacaggtcaggccacccctcttcctgtcaccagcctttcctcagtatccacaggtgacaccacgcctcttcctgtcactagcccttcctcagcatccacaggtcacgccacccctcttcttgtcaccgacacttcctcagcatccacaggacacgccacccctcttcctgtcaccgacgcttcctcagtgtccacagatcacgccacctctcttcctgtaaccatcccttccgcagcatccacaggtcacaccacccctcttcctgtcaccgacacttcctcagcatccacaggtcaggccacctctcttcttgtcaccgacacttcctcagtatccacaggtgacaccacgcctcttcctgtcactagcacttcctcagcatccacaggtcacgtcactcctcttcatgtcaccagcccttcctcagcatccacaggtcacgccacccctcttcctgtcaccagcctttcctcagcatccacaggtgacaccatgcctcttcctgtcactagcccttcctcagcatccacaggtgacaccacccctcttcctgtcaccgacgcttcctcagtatccacaggtcacaccacccctcttcctgtcaccagcccttcctcagcatctacaggtcacaccacccctcttcctgtcaccgacacttcctcagcatccaaaggtgacaccacccctcttcctgtcaccagcccttcctcagcatctacaggtcacaccacccctcttcctgtcaccgacacttcctcagcatccacaggtgacaccacccctcttcctgtcaccaatgcttcctcattatccacaggtcacgccacccctcttcatgtcaccagcccttcctcagcatccacaggtcacgccacccctcttcctgtcaccagcacttcctcagcatccaccggtcacgccacccctcttcctgtcaccggcctttcctcagctaccacagatgacaccacccgtcttcctgtcaccgacgtttcctcggcatccacaggtcaggccacccctcttcctgtcaccagcctttcctcagtatccacaggtgacaccacgcctcttcctgtcactagcccttcctcagcatccacaggtcacgccagccctcttcttgtcactgacgcttcctcagcatccacaggtcaggccacccctcttcctgtcaccgacacttcctcagtatccacagctcacgccaccccacttcctgtcaccggcctttcttcagcttccacagatgacaccacccgtcttcctgtcaccgacgtttcctcggcatccacaggtcaggccatccctcttcctgtcaccagcccttcctcagcatccacaggtgacaccacccctcttcctgtcaccgacgcttcctcagcatccacaggtgacaccacctctcttcctgtcaccatcccttcctcagcatcttcaggtcacaccacctctcttcctgtcaccgacgcttcctcagtgtccacaggtcacgccacctctcttcttgtcaccgacgcttcctcagtatccacaggtgacaccacccctcttcctgtcaccgacactaactcagcatccacaggtgacaccacccctcttcatgtcaccgacgcttcctcagtatccacaggtcacgccacctctcttcctgtcaccagcctttcctcagcatccacaggtgacaccacgcctcttcctgtcactagcccttcctcagcatcctcaggtcacaccacccctcttcctgtcaccgacgcttcctcagtacccacaggtcacgccacctctcttcctgtcaccgacgcttcctcagtgtccacaggtcacgccacccctcttcctgtcaccgacgcttcctcagtgtccacaggtcatgccacccctcttccggtcaccgacacttcctcagtatctacaggacaggccacccctcttcctgtcaccagcctttcctcagcatccacaggtgacaccacccctcttcctgtcaccgacacttcctcagcatccacaggtcacgccccccatcttcctgtcaccggcctttcctcagcttccacaggtgacaccacccgtcttcctgtcaccaacgtttcctcggcatccacaggtcatgccacccctcttcctgtcaccagcacttcctcagcatccacaggtgacaccacccctcttcctggcaccgacacttcctcagtatccacaggtcacaccacccctcttcttgtcaccgacgcttcgtcagtatccacaggtgacaccacccgtcttcctgtcaccagcccttcctcagcatctacaggtcacaccacccctcttcatgtcaccgatgcttcctcagtatccacaggtcacaccacccctcttcctgtcaccgacacttcctcagcatccacaggtcaggccacctctcttcttgtcaccgacacttcctcagtatccacaggtgacaccacgcctcttcctgtcactagcacttcctcagcatccacaggtcacgtcactcctcttcatgtcaccagcccttcctcagcatccacaggtcacgccacccctcttcctgtcaccagcctttcctcagcatccacaggtgacaccacccctcttcctgtcaccgacacttcctcagtatccacaggtcacaccacccctcttcctgtcaccagcccttcctcagcatctacaggtcacaccacccctcttcctgtcaccgacacttcctcagcatccaaaggtgacaccacccctcttcctgtcaccagcccttcctcagcatctacaggtcacaccacccctcttcctgtcaccgacacttcctcagcatccacaggtgacaccacccctcttcctgtcaccaatgcttcctcattatccacaggtcacgccacccctcttcatgtcaccagcccttcctcagcatccacaggtcacgccacccctcttcctgtcaccagcacttcctcagcatccaccggtcacgccacccctcttcctgtcaccagcacttcctcagcatccaccggtcacgccacccctcttcctgtcaccgacaattcctcagtatccacaggtcatgccacccctcttcctgtcaccggcctttcctcagctaccacagatgacaccacccgtcttcctgtcaccgacgtgtcctcggcatccacaggtcaggccacccctcttcctgtcaccagcctttcctcagtatccacaggtgacaccacgcctcttcctgtcactagcccttcctcagcatccacaggtcacgccagccctcttcttgtcactgacgcttcctcagcatccacaggtcaggccacccctcttcctgtcaccgacacttcctcagtatccacagctcacgccaccccacttcctgtcaccggcctttcctcagcttccacagatgacaccacccgtcttcctgtcaccgacgtttcctcggcatccacaggtcaggccatccctcttcctgtcaccagcccttcctcagcatccacaggtgacaccacccctcttcctgtcaccgacgcttcctcagcatccacaggtgacaccacctctcttcctgtcaccatcccttcctcagcatcttcaggtcacaccacctctcttcctgtcaccgacgcttcctcagtgtccacaggtcacgccacctctcttcttgtcaccgacgcttcctcagtatccacaggtgacaccacccctcttcctgtcaccgacactaactcagcatccacaggtgacaccacccctcttcatgtcaccgacgcttcctcagtatccacaggtcacgccacctctcttcctgtcaccagcctttcctcagcatccacaggtgacaccacgcctcttcctgtcactagcccttcctcagcatcctcaggtcacaccacctctcttcctgtcaccgacgcttcctcagtgtccacaggtcacgccacctctcttcctgtcaccatcccttcctcagcatcctcaggtcacaccacccctcttcctgtcaccgacgcttcctcagtacccacaggtcacgccacctctcttcctgtcaccgacgcttcctcagtgtccacaggtcacgccacccctcttcctgtcaccgacgcttcctcagtgtccacaggtcatgccacccctcttccggtcaccgacacttcctcagtatctacaggacaggccacccctcttcctgtcaccagcctttcctcagcatcatccactggtgacaccacgccgcttcctgtcactgatacttcctcagcatccacaggtcaggacacccctcttcctgtcaccagccttttctcagtatccacaggtgacaccacgcctcttcctgtcactagcccttcctcagcatccacaggtcacgccacccatcttcttgtcaccgacgcttcctcagtatccacaggtcacgccacctctcttcttgtcaccgacgcttcctcagtatccacaggtcacgccaccgctcttcatgtcaccgatgcttcctcattatccacaggggacaccacccctcttcctgtcaccagcccttcctcagcatccacaggtgacaccacccctcttcctgtcaccgacacttcctcagtatccacaggtcacgccacctctcttcctgtcactgacacttcctcagcatccacaggtcacgccacctctcttcctgtcaccgacacttcctcagcatccacaggtcaggccacccctcttcctgtcaccagcccttcctcagcatccacaggtcacgccatccctcttcttgtcaccgacacttcctcagcatccacaggacaggccacccctcttcctgtcaccagcctttcctcagcatccacaggtgacaccacccctcttcctgtcaccgatgcttcctcagtgtccacaggtcacgccacctctcttcctgtcaccagcctttcctcagtatccacaggtgacaccacccctcttcctgtcactagcccttcctcagcatccacaggtcacgccacccctcttcatgtcaccagcccttcctcagcatccacaggtcacgccacccctcttcctgtcaccagcctttcctcagcatccacaggtgacaccacgcctcttcctgtcactagcccttcctcagcatccacaggtcacgccacccctcttcatgtcaccgacgcttcctcagtatccacaggtgacaccacccctcttcctgtcaccagcccttcctcagcatcctcaggtcacaccacccctcttcctgtcaccgacgcttcctcagcatccacaggtgacaccacccctcttcctgtcaccgacacttcctcagcatccacaggtcacgccacccatcttcctgtcaccggcctttcctcagcttccacaggtgacaccacccgtcttcctgtcaccgacgtttcctcggcatccacaggtcatgccacccctcttcctgtcaccagcacttcctcagcatccacaggtgacaccacccctcttcctggcaccgacacttcctcagtatccacaggtcacaccacccctcttcttgtcaccgacgcttcgtcagtatccacaggtgacaccacccgtcttcctgtcaccagcccttcctcagcatctacaggtcacaccacccctctacctgtcaccgacactccctcagcatccacaggtgacaccacccctcttcctgtcaccaatgcttcctcattatccacacgtcacgccacctctcttcatgtcaccagcccttcctcagcatccaccggtcacgccacccctcttcctgttaccgacacttccgcagcatccacaggtcacgccacccctcttcctgtcaccagcacttcctcagcatccacaggtgacaccacccctcttcctgtcaccgacacttcctcagcatccacaggtcatgccacccctcttcctgtcaccaacacttcctcagtatccacaggtcacgccacccctcttcatgtcaccagcccttcctcagcatccacaggtcacaccacccctcttcctgtcaccgacgcttcgtcagtgtccacaggtcacgccacctctcttcctgtcaccgacgcttcctcagtgtccacaggtcacgccacccctcttcctgtcaccgacgcttcctcagtgtccacaggtcacgctacccctcttcctctcaccagcctttcctcagtatccacaggtgacaccacgcctcttcctgtcaccgacacttcctcagcatccacaggtcaggccacccctcttcctgtcaccagcctttcctcagtatccacaggtgacaccacccctcttcctgtcaccgacacttcctcagcatccacaggtcacgccacctctcttcctgtcaccgacacttcctcagcatccacaggtcacgccacccctcttcatgtcaccagcccttcctcagcatccaccggtcacgccaccccgcttcctgtcaccgacacttcctcagcatccacaggtcacgccacccctcttcctgtcaccagcctttcctcagtatccacaggtgacaccacgcctcttcctgtcactagcccttcctcagcatccacaggtcacgccactcctcttcttgtcaccgacgcttcctcagcatccacaggtcaggccacccctcttcctgtcaccagcctttcctcagtatccacaggtgacaccacgcctcttcctgtcactagcccttcctcagcatccaccggtcatgccacctctcttcctgtcaccgacacttcctcagcatccacaggtgacaccacctctcttcctgtcaccgacacttcctcagcatacacaggtgacaccacctctcttcctgtcaccgacacttcctcatcatccacaggtgacaccacccctcttcttgtcaccgagacttcctcagcatccacaggtgacaccacccctgtgcctgtcaccgacacttcctcagtatccacaggtcacgccacccctcttcctgtcaccggcctttcctcagcttccacaggtgacaccacccgtcttcctgtcaccgacatttcctcggcatccacaggtcaggccacccctcttcctgtcaccaacacttcctcagtatccacaggtgacaccatgcctcttcctgtcactagcccttcctcagcatccacaggtcacgccacccctcttcctgtcaccagcacttcctcagcatccaccggtcacgccacccctgttcctgtcaccagcacttcctcagcatccacaggtcacaccacccctcttcctgtcaccagcccttcctcagcatctacaggtcacaccacccctcttcctgtcaccgacacttcctcagcatccacaggtgacaccacccctcttcctgtcaccaatgcttcctcattatccacaggacacaccacccctcttcatgtcaccatcccttcctcagcatccacaggtgacaccagcactcttcctgtcaccggcgcttcctcagcatccaccggtcacgccacccctcttcctgtcaccgacacttcctcagtatccacaggtcacgccacccctcttcctgtcaccagcttttcctcagtatccacaggtgacaccacccctcttcctgtcaccgacgcttcctcggcatccaccggtcacgccacccctcttcctgtcaccgacacttcctcagcatccacaggtgacaccacccctcttcctgtcaccgacgcttcctcggcatccacaggtcaggccacccctcttcctgtcaccagcctttcctcagtatcaacaggtgacaccacgcctcttcctgtcaccatcccttcctcagcatcctcaggtcacaccacctctcttcctgtcagcgacacttcctcagcatccacaggtcaggccacccctcttcctgtcaccagcctttcctcagtatccacaggtgacaccacccctcttcttgtcaccgacgcttcctcagtatccacaggtcacgccacccctcttcctgtcaccgacacttcctcagcatccacaggtgacaccacccgtcttcctgtcacggacacttcctcagcatccacaggtcaggccacccctcttcctgtcaccagcctttcctcagtatccacaggtgacaccacccctcttcttgtcaccaacacttcctcagtatccacaggtcacgccacctctcttcctgtcaccatcccttcctcatcatcctcaggtcacaccacccctcttcctgtcaccagcacttcctcagtatctacaggtcacgtcacccctcttcatgtcaccagcccttcctcatcatccacaggtcaggccacccctcttcctgtcaccagcacttcctcatcatccacaggtcaggccacccctcttcctgtcaccagcacttcctcagcatccacaggtcacgccacccctcttcctgtcaccgacgcttcctcagtgtccacaggtcacgccacgcctcttcctgtcaccgacacttcctcagcatccacaggtgacaccacccctcttcctgtcaccgacacttcctcagcatccacaggtcaggccacccctcttcctgtcaccagcctttcctcagtatccacaggtcacgccacccctcttgctgtcagcagtgctacctcagcttccacagtatcctcggactcccctctgaagatggaaacatcaggaatgacaacaccgtcactgaagacagacggtgggagacgcacagccacatcaccaccccccacaacctcccagaccatcatttccaccattcccagcactgccatgcacacccgctccacagctgcccccatccccatcctgcctgagagaggagtttccctcttcccctatggggcagacgccggggacctggagttcgtcaggaggaccgtggacttcacctccccactcttcaagccggcgactggcttcccccttggctcctctctccgtgattccctctacgcttcacaggccgggaccctgtggccctggtggctccgttctgggacgatgctgacttctccactggtcgggggaccacattttatcagagcaacacctaccaagccatcctctccacggacgggagcaggtcctatgccctgtttctctaccagagcggtgggatgcagtgggacgtggcccagcgctcaggcaagccggtgctcatgggcttctctagtggagatggctatttcgaaaacagcccactgatgtcccagccagtgtgggagaggtatcgccctgatagattcctgaattccaactcaggcctccaagggctgcagttctacaggctacaccgggaagaaaggcccaactaccgtctcgagtgcctgcagtggctgaagagccagcctcggtggcccagctggggctggaaccaggtctcctgcccttgttcctggcagcagggacgacgggacttacgattccaacccgtcagcataggtcgctggggcctcggcagtaggcagctgtgcagcttcacctcttggcgaggaggcgtgtgctgcagctacgggccctggggagagtttcgtgaaggctggcacgtgcagcgtccttggcagttggcccaggaactggagccacagagctggtgctgccgctggaatgacaagccctacctctgtgccctgtaccagcagaggcggccccacgtgggctgtgctacatacaggcccccacagcccgcctggatgttcggggacccccacatcaccaccttggatggtgtcagttacaccttcaatgggctgggggacttcctgctggtcggggcccaagacgggaactcctccttcctgcttcagggccgcaccgcccagactggctcagcccaggccaccaacttcatcgcctttgcggctcagtaccgctccagcagcctgggccccgtcacggtccaatggctccttgagcctcacgacgcaatccgtgtcctgctggataaccagactgtgacatttcagcctgaccatgaagacggcggaggccaggagacgttcaacgccaccggagtcctcctgagccgcaacggctctgaggtctccgccagcttcgacggctgggccaccgtctcggtgatcgcgctctccaacatcctccactcctccgccagcctcccgcccgagtaccagaaccgcacggaggggctcctgggggtctggaataacaatccagaggacgacttcaggatgcccaatggctccaccattcccccagggagccctgaggagatgcttttccactttggaatgacctggcagatcaacgggacaggcctccttggcaagaggaatgaccagctgccttccaacttcacccctgttttctactcacaactgcaaaaaaacagctcctgggctgaacatttgatctccaactgtgacggagatagctcatgcatctatgacaccctggccctgcgcaacgcaagcatcggacttcacacgagggaagtcagtaaaaactacgagcaggcgaacgccaccctcaatcagtacccgccctccatcaatggtggtcgtgtgattgaagcctacaaggggcagaccacgctgattcagtacaccagcaatgctgaggatgccaacttcacgctcagagacagctgcaccgacttggagctctttgagaatgggacgttgctgtggacacccaagtcgctggagccattcactctggagattctagcaagaagtgccaagattggcttggcatctgcactccagcccaggactgtggtctgccattgcaatgcagagagccagtgtttgtacaatcagaccagcagggtgggcaactcctccctggaggtggctggctgcaagtgtgacgggggcaccttcggccgctactgcgagggctccgaggatgcctgtgaggagccgtgcttcccgagtgtccactgcgttcctgggaagggctgcgaggcctgccctccaaacctgactggggatgggcggcactgtgcggctctggggagctctttcctgtgtcagaaccagtcctgccctgtgaattactgctacaatcaaggccactgctacatctcccagactctgggctgtcagcccatgtgcacctgccccccagccttcactgacagccgctgcttcctggctgggaacaacttcagtccaactgtcaacctagaacttcccttaagagtcatccagctcttgctcagtgaagaggaaaatgcctccatggcagaggtcaacgcctcggtggcatacagactggggaccctggacatgcgggcctttctccgcaacagccaagtggaacgaatcgattctgcagcaccggcctcgggaagccccatccaacactggatggtcatctcggagttccagtaccgccctcggggcccggtcattgacttcctgaacaaccagctgctggccgcggtggtggaggcgttcttataccacgttccacggaggagtgaggagcccaggaacgacgtggtcttccagcccatctccggggaagacgtgcgcgatgtgacagccctgaacgtgagcacgctgaaggcttacttcagatgcgatggctacaagggctacgacctggtctacagcccccagagcggcttcacctgcgtgtccccgtgcagtaggggctactgtgaccatggaggccagtgccagcacctgcccagtgggccccgctgcagctgtgtgtccttctccatctacacggcctggggcgagcactgtgagcacctgagcatgaaactcgacgcgttcttcggcatcttctttggggccctgggcggcctcttgctgctgggggtcgggacgttcgtggtcctgcgcttctggggttgctccggggccaggttctcctatttcctgaactcagctgaggccttgccttgaaggggcagctgtggcctaggctacctcaagactcacctcatccttaccgcacatttaaggcgccattgcttttgggagactggaaaagggaaggtgactgaaggctgtcaggattctt

SEQ ID NO: 155765 - DNA, 15921 bp, Homo sapiens; identical to SEQ ID NO: 155717
  Payload ID: 10597
  Gene Symbol: MUC4
  Gene Name: mucin 4, cell surface associated
  ENST ID: ENST00000628289
  CDS Start-End: 1-13211

SEQ ID NO: 155766 - DNA, 3982 bp, Homo sapiens
  Payload ID: 10597
  Gene Symbol: MUC4
  Gene Name: mucin 4, cell surface associated
  ENST ID: ENST00000626242
  CDS Start-End: 41-3571
ggagcttccccagggagccagggggacttttgccgcagccatgaagggggcacgctggaggagggtcccctgggtgtccctgagctgcctgtgtctctgcctccttccgcatgtggtcccaggaatgacaacaccgtcactgaagacagacggtgggagacgcacagccacatcaccaccccccacaacctcccagaccatcatttccaccattcccagcactgccatgcacacccgctccacagctgcccccatccccatcctgcctgagagaggagtttccctcttcccctatggggcagacgccggggacctggagttcgtcaggaggaccgtggacttcacctccccactcttcaagccggcgactggcttcccccttggctcctctctccgtgattccctctacttcacagacaatggccagatcatcttcccagagtcagactaccagattttctcctaccccaacccactcccaacaggcttcacaggccgggaccctgtggccctggtggctccgttctgggacgatgctgacttctccactggtcgggggaccacattttatcaggaatacgagacgttctatggtgaacacagcctgctagtccagcaggccgagtcttggattagaaagatgacaaacaacgggggctacaaggccaggtgggccctaaaggtcacgtgggtcaatgcccacgcctatcctgcccagtggaccctcgggagcaacacctaccaagccatcctctccacggacgggagcaggtcctatgccctgtttctctaccagagcggtgggatgcagtgggacgtggcccagcgctcaggcaacccggtgctcatgggcttctctagtggagatggctatttcgaaaacagcccactgatgtcccagccagtgtgggagaggtatcgccctgatagattcctgaattccaactcaggcctccaagggctgcagttctacaggctacaccgggaagaaaggcccaactaccgtctcgagtgcctgcagtggctgaagagccagcctcggtggcccagctggggctggaaccaggtctcctgcccttgttcctggcagcagggacgacgggacttacgattccaacccgtcagcataggtcgctggggcctcggcagtaggcagctgtgcagcttcacctcttggcgaggaggcgtgtgctgcagctacgggccctggggagagtttcgtgaaggctggcacgtgcagcgtccttggcagttggcccaggaactggagccacagagctggtgctgccgctggaatgacaagccctacctctgtgccctgtaccagcagaggcggccccacgtgggctgtgctacatacaggcccccacagcccgcctggatgttcggggacccccacatcaccaccttggatggtgtcagttacaccttcaatgggctgggggacttcctgctggtcggggcccaagacgggaactcctccttcctgcttcagggccgcaccgcccagactggctcagcccaggccaccaacttcatcgcctttgcggctcagtaccgctccagcagcctgggccccgtcacggtccaatggctccttgagcctcacgacgcaatccgtgtcctgctggataaccagactgtgacatttcagcctgaccatgaagacggcggaggccaggagacgttcaacgccaccggagtcctcctgagccgcaacggctctgaggtctcggccagcttcgacggctgggccaccgtctcggtgatcgcgctctccaacatcctccacgcctccgccagcctcccgcccgagtaccagaaccgcacggaggggctcctgggggtctggaataacaatccagaggacgacttcaggatgcccaatggctccaccattcccccagggagccctgaggagatgcttttccactttggaatgacctggcagatcaacgggacaggcctccttggcaagaggaatgaccagctgccttccaacttcacccctgttttctactcacaactgcaaaaaaacagctcctgggctgaacatttgatctccaactgtgacggagatagctcatgcatctatgacaccctggccctgcgcaacgcaagcatcggacttcacacgagggaagtcagtaaaaactacgagcaggcgaacgccaccctcaatcagtacccgccctccatcaatggtggtcgtgtgattgaagcctacaaggggcagaccacgctgattcagtacaccagcaatgctgaggatgccaacttcacgctcagagacagctgcaccgacttggagctctttgagaatgggacgttgctgtggacacccaagtcgctggagccattcactctggagattctagcaagaagtgccaagattggcttggcatctgcactccagcccaggactgtggtctgccattgcaatgcagagagccagtgtttgtacaatcagaccagcagggtgggcaactcctccctggaggtggctggctgcaagtgtgacgggggcaccttcggccgctactgcgagggctccgaggatgcctgtgaggagccgtgcttcccgagtgtccactgcgttcctgggaagggctgcgaggcctgccctccaaacctgactggggatgggcggcactgtgcggctctggggagctctttcctgtgtcagaaccagtcctgccctgtgaattactgctacaatcaaggccactgctacatctcccagactctgggctgtcagcccatgtgcacctgccccccagccttcactgacagccgctgcttcctggctgggaacaacttcagtccaactgtcaacctagaacttcccttaagagtcatccagctcttgctcagtgaagaggaaaatgcctccatggcagaagtcaacgcctcggtggcatacagactggggaccctggacatgcgggcctttctccgcaacagccaagtggaacgaatcgattctgcagcaccggcctcgggaagccccatccaacactggatggtcatctcggagttccagtaccgccctcggggcccggtcattgacttcctgaacaaccagctgctggccgcggtggtggaggcgttcttataccacgttccacggaggagtgaggagcccaggaacgacgtggtcttccagcccatctccggggaagacgtgcgcgatgtgacagccctgaacgtgagcacgctgaaggcttacttcagatgcgatggctacaagggctacgacctggtctacagcccccagagcggcttcacctgcgtgtccccgtgcagtaggggctactgtgaccatggaggccagtgccagcacctgcccagtgggccccgctgcagctgtgtgtccttctccatctacacggcctggggcgagcactgtgagcacctgagcatgaaactcgacgcgttcttcggcatcttctttggggccctgggcggcctcttgctgctgggggtcgggacgttcgtggtcctgcgcttctggggttgctccggggccaggttctcctatttcctgaactcagctgaggccttgccttgaaggggcagctgtggcctaggctacctcaagactcacctcatccttaccgcacatttaaggcgccattgcttttgggagactggaaaagggaaggtgactgaaggctgtcaggattcttcaaggagaatgaatactgggaatcaagacaagactataccttatccataggcgcaggtgcacagggggaggccataaagatcaaacatgcatggatgggtcctcacgcagacacacccacagaaggacactagcctgtgcacgcgcgcgtgcacacacacacacacacacacgagttcataatgtggtgatggccctaagttaagcaaaatgcttctgcacacaaaactctctggtttacttcaaattaactctatttaaataaagtctctctgactttttgtgtctccaaaa

SEQ ID NO: 155767 - DNA, 3754 bp, Homo sapiens
  Payload ID: 10597
  Gene Symbol: MUC4
  Gene Name: mucin 4, cell surface associated
  ENST ID: ENST00000631069
  CDS Start-End: 1-413
gaatgacaacaccgtcactgaagacagacggtgggagacgcacagccacatcaccaccccccacaacctcccagaccatcatttccaccattcccagcactgccatgcacacccgctccacagctgcccccatccccatcctgcctgagagaggagtttccctcttcccctatggggcagacgccggggacctggagttcgtcaggaggaccgtggacttcacctccccactcttcaagccggcgactggcttcccccttggctcctctctccgtgattccctctacgcttcacaggccgggaccctgtggccctggtggctccgttctgggacgatgctgacttctccactggtcgggggaccacattttatcaggaatacgagacgttctatggtgaacacagcctgctagtccagcaggccgagtcttggattagaaagatcacaaacaacgggggctacaaggccaggtgggccctaaaggtcacgtgggtcaatgcccacgcctatcctgcccagtggaccctcgggagcaacacctaccaagccatcctctccacggacgggagcaggtcctatgccctgtttctctaccagagcggtgggatgcagtgggacgtggcccagcgctcagtggagatggctatttcgaaaacagcccactgatgtcccagccagtgtgggagaggtatcgccctgatagattcctgaattccaactcaggcctccaagggctgcagttctacaggctacaccgggaagaaaggcccaactaccgtctcgagtgcctgcagtggctgaagagccagcctcggtggcccagctggggctggaaccaggtctcctgcccttgttcctggcagcagggacgacgggacttacgattccaacccgtcagcataggtcgctggggcctcggcagtaggcagctgtgcagcttcacctcttggcgaggaggcgtgtgctgcagctacgggccctggggagagtttcgtgaaggctggcacgtgcagcgtccttggcagttggcccaggaactggagccacagagctggtgctgccgctggaatgacaagccctacctctgtgccctgtaccagcagaggcggccccacgtgggctgtgctacatacaggcccccacagcccgcctggatgttcggggacccccacatcaccaccttggatggtgtcagttacaccttcaatgggctgggggacttcctgctggtcggggcccaagacgggaactcctccttcctgcttcagggccgcaccgcccagactggctcagcccaggccaccaacttcatcgcctttgcggctcagtaccgctccagcagcctgggccccgtcacggtccaatggctccttgagcctcacgacgcaatccgtgtcctgctggataaccagactgtgacatttcagcctgaccatgaagacggcggaggccaggagacgttcaacgccaccggagtcctcctgagccgcaacggctctgaggtctccgccagcttcgacggctgggccaccgtctcggtgatcgcgctctccaacatcctccactcctccgccagcctcccgcccgagtaccagaaccgcacggaggggctcctgggggtctggaataacaatccagaggacgacttcaggatgcccaatggctccaccattcccccagggagccctgaggagatgcttttccactttggaatgacctggcagatcaacgggacaggcctccttggcaagaggaatgaccagctgccttccaacttcacccctgttttctactcacaactgcaaaaaaacagctcctgggctgaacatttgatctccaactgtgacggagatagctcatgcatctatgacaccctggccctgcgcaacgcaagcatcggacttcacacgagggaagtcagtaaaaactacgagcaggcgaacgccaccctcaatcagtacccgccctccatcaatggtggtcgtgtgattgaagcctacaaggggcagaccacgctgattcagtacaccagcaatgctgaggatgccaacttcacgctcagagacagctgcaccgacttggagctctttgagaatgggacgttgctgtggacacccaagtcgctggagccattcactctggagattctagcaagaagtgccaagattggcttggcatctgcactccagcccaggactgtggtctgccattgcaatgcagagagccagtgtttgtacaatcagaccagcagggtgggcaactcctccctggaggtggctggctgcaagtgtgacgggggcaccttcggccgctactgcgagggctccgaggatgcctgtgaggagccgtgcttcccgagtgtccactgcgttcctgggaagggctgcgaggcctgccctccaaacctgactggggatgggcggcactgtgcggctctggggagctctttcctgtgtcagaaccagtcctgccctgtgaattactgctacaatcaaggccactgctacatctcccagactctgggctgtcagcccatgtgcacctgccccccagccttcactgacagccgctgcttcctggctgggaacaacttcagtccaactgtcaacctagaacttcccttaagagtcatccagctcttgctcagtgaagaggaaaatgcctccatggcagaggtcaacgcctcggtggcatacagactggggaccctggacatgcgggcctttctccgcaacagccaagtggaacgaatcgattctgcagcaccggcctcgggaagccccatccaacactggatggtcatctcggagttccagtaccgccctcggggcccggtcattgacttcctgaacaaccagctgctggccgcggtggtggaggcgttcttataccacgttccacggaggagtgaggagcccaggaacgacgtggtcttccagcccatctccggggaagacgtgcgcgatgtgacagccctgaacgtgagcacgctgaaggcttacttcagatgcgatggctacaagggctacgacctggtctacagcccccagagcggcttcacctgcgtgtccccgtgcagtaggggctactgtgaccatggaggccagtgccagcacctgcccagtgggccccgctgcagctgtgtgtccttctccatctacacggcctggggcgagcactgtgagcacctgagcatgaaactcgacgcgttcttcggcatcttctttggggccctgggcggcctcttgctgctgggggtcgggacgttcgtggtcctgcgcttctggggttgctccggggccaggttctcctatttcctgaactcagctgaggccttgccttgaaggggcagctgtggcctaggctacctcaagactcacctcatccttaccgcacatttaaggcgccattgcttttgggagactggaaaagggaaggtgactgaaggctgtcaggattcttcaaggagaatgaatactgggaatcaagacaagactataccttatccataggcgcaggtgcacagggggaggccataaagatcaaacatgcatggatgggtcctcacgcagacacacccacagaaggacactagcctgtgcacgcgcgcgtgcacacacacacacacacaagagttcataatgtggtgatggccctaagttaagcaaaatgcttctgcacacaaaactctctggtttacttcaaattaactctatttaaataaagtctctctgactttttgtgtcttcaaaa

SEQ ID NO: 155768 - DNA, 16018 bp, Homo sapiens
  Payload ID: 10597
  Gene Symbol: MUC4
  Gene Name: mucin 4, cell surface associated
  ENST ID: ENST00000630183
  CDS Start-End: 1-13256
gaaccacagaggacacattaataactggaagtaaaactgctgccccagtcacctcaacaggctcaacaacagcgacactagagggacaatcaactgcagcttcttcaaggacctctaatcaggacatatcagcttcatctcagaaccaccagactaagagcacggagaccaccagcaaagctcaaaccgacaccctcacgcagatgatgacatcaactcttttttcttccccaagtgtacacaatgtgatggagacagctcctccagatgaaatgaccacatcatttccctccagtgtcaccaacacactcatgatgacatcaaagactataacaatgacaacctccacagactccactcttggaaacacagaagagacatcaacagcaggaactgaaagttctaccccagtgacctcagcagtctcaataacagctggacaggaaggacaatcacgaacaacttcctggaggacctctatccaagacacatcagcttcttctcagaaccactggactcggagcacgcagaccaccagggaatctcaaaccagcaccctaacacacagaaccacttcaactccttctttctctccaagtgtacacaatgtgacagggactgtttctcagaagacatctccttcaggtgaaacagctacctcatccctctgtagtgtcacaaacacatccatgatgacatcagagaagataacagtgacaacctccacaggctccactcttggaaacccaggggagacatcatcagtacctgttactggaagtcttatgccagtcacctcagcagccttagtaacatttgatccagaaggacaatcaccagcaactttctcaaggacttctactcaggacacaacagctttttctaagaaccaccagactcagagcgtggagaccaccagagtatctcaaatcaacaccctcaacaccctcacaccggttacaacatcaactgttttatcctcaccaagtggattcaacccaagtggaacagtttctcaggagacattcccttctggtgaaacaaccacctcatccccttccagtgtcagcaatacattcctggtaacatcaaaggtgttcagaatgccaacctccagagactctactcttggaaacacagaggagacatcactatctgtaagtggaaccatttctgcaatcacttccaaagtttcaaccatatggtggtcagacactctgtcaacagcactctcccccagttctctacctccaaaaatatccacagctttccacacccagcagagtgaaggtgcagagaccacaggacggcctcatgagaggagctcattctctccaggtgtgtctcaagaaatatttactctacatgaaacaacaacatggccttcctcattctccagcaaaggccacacaacttggtcacaaacagaactgccctcaacatcaacaggtgctgccactaggcttgtcacaggaaatccatctacagggacagctggcactattccaagggtcccctctaaggtctcagcaataggggaaccaggagagcccaccacatactcctcccacagcacaactctcccaaaaacaacaggggcaggcgcccagacacaatggacacaagaaacggggaccactggagaggctcttctcagcagcccaagctacagtgtgactcagatgataaaaacggccacatccccatcttcttcacctatgctggatagacacacatcccaacaaattacaacggcaccatcaacaaatcattcaacaatacattccacaagcacctctcctcaggaatcaccagctgtttcccaaaggggtcacactcaagccccgcagaccacacaagaatcacaaaccacgaggtccgtctcccccatgactgacaccaagacagtcaccaccccaggttcttccttcacagccagtgggcactcgccctcagaaattgttcctcaggacgcacccaccataagtgcagcaacaacctttgccccagctcccaccggggatggtcacacaacccaggccccgaccacagcactgcaggcagcacccagcagccatgatgccaccctggggccctcaggaggcacgtcactttccaaaacaggtgcccttactctggccaactctgtagtgtcaacaccagggggcccagaaggacaatggacatcagcctctgccagcacctcacctgacacagcagcagccatgacccatacccaccaggctgagagcacagaggcctctggacaaacacagaccagcgaaccggcctcctcagggtcacgaaccacctcagcgggcacagctaccccttcctcatccggggcgagtggcacaacaccttcaggaagcgaaggaatatccacctcaggagagacgacaaggttttcatcaaacccctccagggacagtcacacaacccagtcaacaaccgaattgctgtccgcctcagccagtcatggtgccatcccagtaagcacaggaatggcgtcttcgatcgtccccggcacctttcatcccaccctctctgaggcctccactgcagggagaccgacaggacagtcaagcccaacttctcccagtgcctctcctcaggagacagccgccatttcccggatggcccagactcagaggacaagaaccagcagagggtctgacactatcagcctggcgtcccaggcaaccgacaccttctcaacagtcccacccacacctccatcgatcacatccactgggcttacatctccacaaaccgagacccacactctgtcaccttcagggtctggtaaaaccttcaccacggccctcatcagcaacgccacccctcttcctgtcacctacgcttcctcggcatccacaggtcacaccacccctcttcatgtcaccgatgcttcctcagtatccacaggtcacgccacccctcttcctgtcaccagcccttcctcagtatccacaggtcacaccacccctcttcctgtcaccgacacttcctcagaatccacaggtcacgtcacccctcttcctgtcaccagcttttcctcagcatccacaggtgacagcacccctcttcctgtcactgacacttcctcagcatccacaggtcacgtcacccctcttcctgtcaccagcctttcctcagcatccacaggtgacaccacccctcttcctgtcactgacacttcctcagcatccacaggtcacgccacctctcttcctgtcaccgacacttcctcagtatccacaggtcacaccacccctcttcctgtcaccgacacttcctcagcatccacaggtcacgccacctctcttcctgtcaccgacacttcctcagtatccacaggtcacaccacccctcttcatgtcactgatgcttcctcagcatccacaggtcaggccacccctcttcctgtcaccagcctttcctcagtatccacaggtgacaccacgcctcttcctgtcactagcccttcctcagcatccacaggtcacgccacccctcttcttgtcaccgacacttcctcagcatccacaggacacgccacccctcttcctgtcaccgacgcttcctcagtgtccacagatcacgccacctctcttcctgtaaccatcccttccgcagcatccacaggtcacaccacccctcttcctgtcaccgacacttcctcagcatccacaggtcaggccacctctcttcttgtcaccgacacttcctcagtatccacaggtgacaccacgcctcttcctgtcactagcacttcctcagcatccacaggtcacgtcactcctcttcatgtcaccagcccttcctcagcatccacaggtcacgccacccctcttcctgtcaccagcctttcctcagcatccacaggtgacaccatgcctcttcctgtcactagcccttcctcagcatccacaggtgacaccacccctcttcctgtcaccgacgcttcctcagtatccacaggtcacaccacccctcttcatgtcactgatgcttcctcagcatccacaggtcaggccacccctcttcctgtcaccagcctttcctcagtatccacaggtgacaccacgcctcttcctgtcactagcccttcctcagcatccacaggtcacgccacccctcttcttgtcaccgacacttcctcagcatccacaggacacgccacccctcttcctgtcaccgacgcttcctcagtgtccacagatcacgccacctctcttcctgtaaccatcccttccgcagcatccacaggtcacaccacccctcttcctgtcaccgacacttcctcagcatccacaggtcaggccacctctcttcttgtcaccgacacttcctcagtatccacaggtgacaccacgcctcttcctgtcactagcacttcctcagcatccacaggtcacgtcactcctcttcatgtcaccagcccttcctcagcatccacaggtcacgccacccctcttcctgtcaccagcctttcctcagcatccacaggtgacaccatgcctcttcctgtcactagcccttcctcagcatccacaggtgacaccacccctcttcctgtcaccgacgcttcctcagtatccacaggtcacaccacccctcttcctgtcaccagcccttcctcagcatctacaggtcacaccacccctcttcctgtcaccgacacttcctcagcatccaaaggtgacaccacccctcttcctgtcaccagcccttcctcagcatctacaggtcacaccacccctcttcctgtcaccgacacttcctcagcatccacaggtgacaccacccctcttcctgtcaccaatgcttcctcattatccacaggtcacgccacccctcttcatgtcaccagcccttcctcagcatccacaggtcacgccacccctcttcctgtcaccagcacttcctcagcatccaccggtcacgccacccctcttcctgtcaccggcctttcctcagctaccacagatgacaccacccgtcttcctgtcaccgacgtttcctcggcatccacaggtcaggccacccctcttcctgtcaccagcctttcctcagtatccacaggtgacaccacgcctcttcctgtcactagcccttcctcagcatccacaggtcacgccagccctcttcttgtcactgacgcttcctcagcatccacaggtcaggccacccctcttcctgtcaccgacacttcctcagtatccacagctcacgccaccccacttcctgtcaccggcctttcttcagcttccacagatgacaccacccgtcttcctgtcaccgacgtttcctcggcatccacaggtcaggccatccctcttcctgtcaccagcccttcctcagcatccacaggtgacaccacccctcttcctgtcaccgacgcttcctcagcatccacaggtgacaccacctctcttcctgtcaccatcccttcctcagcatcttcaggtcacaccacctctcttcctgtcaccgacgcttcctcagtgtccacaggtcacgccacctctcttcttgtcaccgacgcttcctcagtatccacaggtgacaccacccctcttcctgtcaccgacactaactcagcatccacaggtgacaccacccctcttcatgtcaccgacgcttcctcagtatccacaggtcacgccacctctcttcctgtcaccagcctttcctcagcatccacaggtgacaccacgcctcttcctgtcactagcccttcctcagcatcctcaggtcacaccacccctcttcctgtcaccgacgcttcctcagtacccacaggtcacgccacctctcttcctgtcaccgacgcttcctcagtgtccacaggtcacgccacccctcttcctgtcaccgacgcttcctcagtgtccacaggtcatgccacccctcttccggtcaccgacacttcctcagtatctacaggacaggccacccctcttcctgtcaccagcctttcctcagcatccacaggtgacaccacccctcttcctgtcaccgacacttcctcagcatccacaggtcacgccccccatcttcctgtcaccggcctttcctcagcttccacaggtgacaccacccgtcttcctgtcaccaacgtttcctcggcatccacaggtcatgccacccctcttcctgtcaccagcacttcctcagcatccacaggtgacaccacccctcttcctggcaccgacacttcctcagtatccacaggtcacaccacccctcttcttgtcaccgacgcttcgtcagtatccacaggtgacaccacccgtcttcctgtcaccagcccttcctcagcatctacaggtcacaccacccctcttcatgtcaccgatgcttcctcagtatccacaggtcacaccacccctcttcctgtcaccgacacttcctcagcatccacaggtcaggccacctctcttcttgtcaccgacacttcctcagtatccacaggtgacaccacgcctcttcctgtcactagcacttcctcagcatccacaggtcacgtcactcctcttcatgtcaccagcccttcctcagcatccacaggtcacgccacccctcttcctgtcaccagcctttcctcagcatccacaggtgacaccacccctcttcctgtcaccgacacttcctcagtatccacaggtcacaccacccctcttcctgtcaccagcccttcctcagcatctacaggtcacaccacccctcttcctgtcaccgacacttcctcagcatccaaaggtgacaccacccctcttcctgtcaccagcccttcctcagcatctacaggtcacaccacccctcttcctgtcaccgacacttcctcagcatccacaggtgacaccacccctcttcctgtcaccaatgcttcctcattatccacaggtcacgccacccctcttcatgtcaccagcccttcctcagcatccacaggtcacgccacccctcttcctgtcaccagcacttcctcagcatccaccggtcacgccacccctcttcctgtcaccagcacttcctcagcatccaccggtcacgccacccctcttcctgtcaccgacaattcctcagtatccacaggtcatgccacccctcttcctgtcaccggcctttcctcagctaccacagatgacaccacccgtcttcctgtcaccgacgtgtcctcggcatccacaggtcaggccacccctcttcctgtcaccagcctttcctcagtatccacaggtgacaccacgcctcttcctgtcactagcccttcctcagcatccacaggtcacgccagccctcttcttgtcactgacgcttcctcagcatccacaggtcaggccacccctcttcctgtcaccgacacttcctcagtatccacagctcacgccaccccacttcctgtcaccggcctttcctcagcttccacagatgacaccacccgtcttcctgtcaccgacgtttcctcggcatccacaggtcaggccatccctcttcctgtcaccagcccttcctcagcatccacaggtgacaccacccctcttcctgtcaccgacgcttcctcagcatccacaggtgacaccacctctcttcctgtcaccatcccttcctcagcatcttcaggtcacaccacctctcttcctgtcaccgacgcttcctcagtgtccacaggtcacgccacctctcttcttgtcaccgacgcttcctcagtatccacaggtgacaccacccctcttcctgtcaccgacactaactcagcatccacaggtgacaccacccctcttcatgtcaccgacgcttcctcagtatccacaggtcacgccacctctcttcctgtcaccagcctttcctcagcatccacaggtgacaccacgcctcttcctgtcactagcccttcctcagcatcctcaggtcacaccacctctcttcctgtcaccgacgcttcctcagtgtccacaggtcacgccacctctcttcctgtcaccatcccttcctcagcatcctcaggtcacaccacccctcttcctgtcaccgacgcttcctcagtacccacaggtcacgccacctctcttcctgtcaccgacgcttcctcagtgtccacaggtcacgccacccctcttcctgtcaccgacgcttcctcagtgtccacaggtcatgccacccctcttccggtcaccgacacttcctcagtatctacaggacaggccacccctcttcctgtcaccagcctttcctcagcatcatccactggtgacaccacgccgcttcctgtcactgatacttcctcagcatccacaggtcaggacacccctcttcctgtcaccagccttttctcagtatccacaggtgacaccacgcctcttcctgtcactagcccttcctcagcatccacaggtcacgccacccatcttcttgtcaccgacgcttcctcagtatccacaggtcacgccacctctcttcttgtcaccgacgcttcctcagtatccacaggtcacgccaccgctcttcatgtcaccgatgcttcctcattatccacaggggacaccacccctcttcctgtcaccagcccttcctcagcatccacaggtgacaccacccctcttcctgtcaccgacacttcctcagtatccacaggtcacgccacctctcttcctgtcactgacacttcctcagcatccacaggtcacgccacctctcttcctgtcaccgacacttcctcagcatccacaggtcaggccacccctcttcctgtcaccagcccttcctcagcatccacaggtcacgccatccctcttcttgtcaccgacacttcctcagcatccacaggacaggccacccctcttcctgtcaccagcctttcctcagcatccacaggtgacaccacccctcttcctgtcaccgatgcttcctcagtgtccacaggtcacgccacctctcttcctgtcaccagcctttcctcagtatccacaggtgacaccacccctcttcctgtcactagcccttcctcagcatccacaggtcacgccacccctcttcatgtcaccagcccttcctcagcatccacaggtcacgccacccctcttcctgtcaccagcctttcctcagcatccacaggtgacaccacgcctcttcctgtcactagcccttcctcagcatccacaggtcacgccacccctcttcatgtcaccgacgcttcctcagtatccacaggtgacaccacccctcttcctgtcaccagcccttcctcagcatcctcaggtcacaccacccctcttcctgtcaccgacgcttcctcagcatccacaggtgacaccacccctcttcctgtcaccgacacttcctcagcatccacaggtcacgccacccatcttcctgtcaccggcctttcctcagcttccacaggtgacaccacccgtcttcctgtcaccgacgtttcctcggcatccacaggtcatgccacccctcttcctgtcaccagcacttcctcagcatccacaggtgacaccacccctcttcctggcaccgacacttcctcagtatccacaggtcacaccacccctcttcttgtcaccgacgcttcgtcagtatccacaggtgacaccacccgtcttcctgtcaccagcccttcctcagcatctacaggtcacaccacccctctacctgtcaccgacactccctcagcatccacaggtgacaccacccctcttcctgtcaccaatgcttcctcattatccacacgtcacgccacctctcttcatgtcaccagcccttcctcagcatccaccggtcacgccacccctcttcctgttaccgacacttccgcagcatccacaggtcacgccacccctcttcctgtcaccagcacttcctcagcatccacaggtgacaccacccctcttcctgtcaccgacacttcctcagcatccacaggtcatgccacccctcttcctgtcaccaacacttcctcagtatccacaggtcacgccacccctcttcatgtcaccagcccttcctcagcatccacaggtcacaccacccctcttcctgtcaccgacgcttcgtcagtgtccacaggtcacgccacctctcttcctgtcaccgacgcttcctcagtgtccacaggtcacgccacccctcttcctgtcaccgacgcttcctcagtgtccacaggtcacgctacccctcttcctctcaccagcctttcctcagtatccacaggtgacaccacgcctcttcctgtcaccgacacttcctcagcatccacaggtcaggccacccctcttcctgtcaccagcctttcctcagtatccacaggtgacaccacccctcttcctgtcaccgacacttcctcagcatccacaggtcacgccacctctcttcctgtcaccgacacttcctcagcatccacaggtcacgccacccctcttcatgtcaccagcccttcctcagcatccaccggtcacgccaccccgcttcctgtcaccgacacttcctcagcatccacaggtcacgccacccctcttcctgtcaccagcctttcctcagtatccacaggtgacaccacgcctcttcctgtcactagcccttcctcagcatccacaggtcacgccactcctcttcttgtcaccgacgcttcctcagcatccacaggtcaggccacccctcttcctgtcaccagcctttcctcagtatccacaggtgacaccacgcctcttcctgtcactagcccttcctcagcatccaccggtcatgccacctctcttcctgtcaccgacacttcctcagcatccacaggtgacaccacctctcttcctgtcaccgacacttcctcagcatacacaggtgacaccacctctcttcctgtcaccgacacttcctcatcatccacaggtgacaccacccctcttcttgtcaccgagacttcctcagcatccacaggtgacaccacccctgtgcctgtcaccgacacttcctcagtatccacaggtcacgccacccctcttcctgtcaccggcctttcctcagcttccacaggtgacaccacccgtcttcctgtcaccgacatttcctcggcatccacaggtcaggccacccctcttcctgtcaccaacacttcctcagtatccacaggtgacaccatgcctcttcctgtcactagcccttcctcagcatccacaggtcacgccacccctcttcctgtcaccagcacttcctcagcatccaccggtcacgccacccctgttcctgtcaccagcacttcctcagcatccacaggtcacaccacccctcttcctgtcaccagcccttcctcagcatctacaggtcacaccacccctcttcctgtcaccgacacttcctcagcatccacaggtgacaccacccctcttcctgtcaccaatgcttcctcattatccacaggacacaccacccctcttcatgtcaccatcccttcctcagcatccacaggtgacaccagcactcttcctgtcaccggcgcttcctcagcatccaccggtcacgccacccctcttcctgtcaccgacacttcctcagtatccacaggtcacgccacccctcttcctgtcaccagcttttcctcagtatccacaggtgacaccacccctcttcctgtcaccgacgcttcctcggcatccaccggtcacgccacccctcttcctgtcaccgacacttcctcagcatccacaggtgacaccacccctcttcctgtcaccgacgcttcctcggcatccacaggtcaggccacccctcttcctgtcaccagcctttcctcagtatcaacaggtgacaccacgcctcttcctgtcaccatcccttcctcagcatcctcaggtcacaccacctctcttcctgtcagcgacacttcctcagcatccacaggtcaggccacccctcttcctgtcaccagcctttcctcagtatccacaggtgacaccacccctcttcttgtcaccgacgcttcctcagtatccacaggtcacgccacccctcttcctgtcaccgacacttcctcagcatccacaggtgacaccacccgtcttcctgtcacggacacttcctcagcatccacaggtcaggccacccctcttcctgtcaccagcctttcctcagtatccacaggtgacaccacccctcttcttgtcaccaacacttcctcagtatccacaggtcacgccacctctcttcctgtcaccatcccttcctcatcatcctcaggtcacaccacccctcttcctgtcaccagcacttcctcagtatctacaggtcacgtcacccctcttcatgtcaccagcccttcctcatcatccacaggtcaggccacccctcttcctgtcaccagcacttcctcatcatccacaggtcaggccacccctcttcctgtcaccagcacttcctcagcatccacaggtcacgccacccctcttcctgtcaccgacgcttcctcagtgtccacaggtcacgccacgcctcttcctgtcaccgacacttcctcagcatccacaggtgacaccacccctcttcctgtcaccgacacttcctcagcatccacaggtcaggccacccctcttcctgtcaccagcctttcctcagtatccacaggtcacgccacccctcttgctgtcagcagtgctacctcagcttccacagtatcctcggactcccctctgaagatggaaacatcaggaatgacaacaccgtcactgaagacagacggtgggagacgcacagccacatcaccaccccccacaacctcccagaccatcatttccaccattcccagcactgccatgcacacccgctccacagctgcccccatccccatcctgcctgagagaggagtttccctcttcccctatggggcagacgccggggacctggagttcgtcaggaggaccgtggacttcacctccccactcttcaagccggcgactggcttcccccttggctcctctctccgtgattccctctacgcttcacaggccgggaccctgtggccctggtggctccgttctgggacgatgctgacttctccactggtcgggggaccacattttatcagagcaacacctaccaagccatcctctccacggacgggagcaggtcctatgccctgtttctctaccagagcggtgggatgcagtgggacgtggcccagcgctcagtggagatggctatttcgaaaacagcccactgatgtcccagccagtgtgggagaggtatcgccctgatagattcctgaattccaactcaggcctccaagggctgcagttctacaggctacaccgggaagaaaggcccaactaccgtctcgagtgcctgcagtggctgaagagccagcctcggtggcccagctggggctggaaccaggtctcctgcccttgttcctggcagcagggacgacgggacttacgattccaacccgtcagcataggtcgctggggcctcggcagtaggcagctgtgcagcttcacctcttggcgaggaggcgtgtgctgcagctacgggccctggggagagtttcgtgaaggctggcacgtgcagcgtccttggcagttggcccaggaactggagccacagagctggtgctgccgctggaatgacaagccctacctctgtgccctgtaccagcagaggcggccccacgtgggctgtgctacatacaggcccccacagcccgcctggatgttcggggacccccacatcaccaccttggatggtgtcagttacaccttcaatgggctgggggacttcctgctggtcggggcccaagacgggaactcctccttcctgcttcagggccgcaccgcccagactggctcagcccaggccaccaacttcatcgcctttgcggctcagtaccgctccagcagcctgggccccgtcacggtccaatggctccttgagcctcacgacgcaatccgtgtcctgctggataaccagactgtgacatttcagcctgaccatgaagacggcggaggccaggagacgttcaacgccaccggagtcctcctgagccgcaacggctctgaggtctccgccagcttcgacggctgggccaccgtctcggtgatcgcgctctccaacatcctccactcctccgccagcctcccgcccgagtaccagaaccgcacggaggggctcctgggggtctggaataacaatccagaggacgacttcaggatgcccaatggctccaccattcccccagggagccctgaggagatgcttttccactttggaatgacctggcagatcaacgggacaggcctccttggcaagaggaatgaccagctgccttccaacttcacccctgttttctactcacaactgcaaaaaaacagctcctgggctgaacatttgatctccaactgtgacggagatagctcatgcatctatgacaccctggccctgcgcaacgcaagcatcggacttcacacgagggaagtcagtaaaaactacgagcaggcgaacgccaccctcaatcagtacccgccctccatcaatggtggtcgtgtgattgaagcctacaaggggcagaccacgctgattcagtacaccagcaatgctgaggatgccaacttcacgctcagagacagctgcaccgacttggagctctttgagaatgggacgttgctgtggacacccaagtcgctggagccattcactctggagattctagcaagaagtgccaagattggcttggcatctgcactccagcccaggactgtggtctgccattgcaatgcagagagccagtgtttgtacaatcagaccagcagggtgggcaactcctccctggaggtggctggctgcaagtgtgacgggggcaccttcggccgctactgcgagggctccgaggatgcctgtgaggagccgtgcttcccgagtgtccactgcgttcctgggaagggctgcgaggcctgccctccaaacctgactggggatgggcggcactgtgcggctctggggagctctttcctgtgtcagaaccagtcctgccctgtgaattactgctacaatcaaggccactgctacatctcccagactctgggctgtcagcccatgtgcacctgccccccagccttcactgacagccgctgcttcctggctgggaacaacttcagtccaactgtcaacctagaacttcccttaagagtcatccagctcttgctcagtgaagaggaaaatgcctccatggcagaggtcaacgcctcggtggcatacagactggggaccctggacatgcgggcctttctccgcaacagccaagtggaacgaatcgattctgcagcaccggcctcgggaagccccatccaacactggatggtcatctcggagttccagtaccgccctcggggcccggtcattgacttcctgaacaaccagctgctggccgcggtggtggaggcgttcttataccacgttccacggaggagtgaggagcccaggaacgacgtggtcttccagcccatctccggggaagacgtgcgcgatgtgacagccctgaacgtgagcacgctgaaggcttacttcagatgcgatggctacaagggctacgacctggtctacagcccccagagcggcttcacctgcgtgtccccgtgcagtaggggctactgtgaccatggaggccagtgccagcacctgcccagtgggccccgctgcagctgtgtgtccttctccatctacacggcctggggcgagcactgtgagcacctgagcatgaaactcgacgcgttcttcggcatcttctttggggccctgggcggcctcttgctgctgggggtcgggacgttcgtggtcctgcgcttctggggttgctccggggccaggttctcctatttcctgaactcagctgaggccttgccttgaaggggcagctgtggcctaggctacctcaagactcacctcatccttaccgcacatttaaggcgccattgcttttgggagactggaaaagggaaggtgactgaaggctgtcaggattctt

SEQ ID NO: 155769 - DNA, 3705 bp, Homo sapiens; identical to SEQ ID NO: 155747
  Payload ID: 10597
  Gene Symbol: MUC4
  Gene Name: mucin 4, cell surface associated
  ENST ID: ENST00000626305
  CDS Start-End: 1-3296

SEQ ID NO: 155770 - DNA, 3783 bp, Homo sapiens
  Payload ID: 10597
  Gene Symbol: MUC4
  Gene Name: mucin 4, cell surface associated
  ENST ID: ENST00000626164
  CDS Start-End: 1-503
gaatgacaacaccgtcactgaagacagacggtgggagacgcacagccacatcaccaccccccacaacctcccagaccatcatttccaccattcccagcactgccatgcacacccgctccacagctgcccccatccccatcctgcctgagagaggtgaggccatacaggagtttccctcttcccctatggggcagacgccggggacctggagttcgtcaggaggaccgtggacttcacctccccactcttcaagccggcgactggcttcccccttggctcctctctccgtgattccctctacttcacagacaatggccagatcatcttcccagagtcagactaccagattttctcctaccccaacccactcccaacaggcttcacaggccgggaccctgtggccctggtggctccgttctgggacgatgctgacttctccactggtcgggggaccacattttatcaggaatacgagacgttctatggtgaacacagcctgctagtccagcaggccgagtcttggattagaaagatcacaaacaacgggggctacaaggccaggtgggccctaaaggtcacgtgggtcaatgcccacgcctatcctgcccagtggaccctcgggagcaacacctaccaagccatcctctccacggacgggagcaggtcctatgccctgtttctctaccagagcggtgggatgcagtgggacgtggcccagcgctcaggcaagccggtgctcatgggcttctctaggcctccaagggctgcagttctacaggctacaccgggaagaaaggcccaactaccgtctcgagtgcctgcagtggctgaagagccagcctcggtggcccagctggggctggaaccaggtctcctgcccttgttcctggcagcagggacgacgggacttacgattccaacccgtcagcataggtcgctggggcctcggcagtaggcagctgtgcagcttcacctcttggcgaggaggcgtgtgctgcagctacgggccctggggagagtttcgtgaaggctggcacgtgcagcgtccttggcagttggcccaggaactggagccacagagctggtgctgccgctggaatgacaagccctacctctgtgccctgtaccagcagaggcggccccacgtgggctgtgctacatacaggcccccacagcccgcctggatgttcggggacccccacatcaccaccttggatggtgtcagttacaccttcaatgggctgggggacttcctgctggtcggggcccaagacgggaactcctccttcctgcttcagggccgcaccgcccagactggctcagcccaggccaccaacttcatcgcctttgcggctcagtaccgctccagcagcctgggccccgtcacggtccaatggctccttgagcctcacgacgcaatccgtgtcctgctggataaccagactgtgacatttcagcctgaccatgaagacggcggaggccaggagacgttcaacgccaccggagtcctcctgagccgcaacggctctgaggtctccgccagcttcgacggctgggccaccgtctcggtgatcgcgctctccaacatcctccactcctccgccagcctcccgcccgagtaccagaaccgcacggaggggctcctgggggtctggaataacaatccagaggacgacttcaggatgcccaatggctccaccattcccccagggagccctgaggagatgcttttccactttggaatgacctggcagatcaacgggacaggcctccttggcaagaggaatgaccagctgccttccaacttcacccctgttttctactcacaactgcaaaaaaacagctcctgggctgaacatttgatctccaactgtgacggagatagctcatgcatctatgacaccctggccctgcgcaacgcaagcatcggacttcacacgagggaagtcagtaaaaactacgagcaggcgaacgccaccctcaatcagtacccgccctccatcaatggtggtcgtgtgattgaagcctacaaggggcagaccacgctgattcagtacaccagcaatgctgaggatgccaacttcacgctcagagacagctgcaccgacttggagctctttgagaatgggacgttgctgtggacacccaagtcgctggagccattcactctggagattctagcaagaagtgccaagattggcttggcatctgcactccagcccaggactgtggtctgccattgcaatgcagagagccagtgtttgtacaatcagaccagcagggtgggcaactcctccctggaggtggctggctgcaagtgtgacgggggcaccttcggccgctactgcgagggctccgaggatgcctgtgaggagccgtgcttcccgagtgtccactgcgttcctgggaagggctgcgaggcctgccctccaaacctgactggggatgggcggcactgtgcggctctggggagctctttcctgtgtcagaaccagtcctgccctgtgaattactgctacaatcaaggccactgctacatctcccagactctgggctgtcagcccatgtgcacctgccccccagccttcactgacagccgctgcttcctggctgggaacaacttcagtccaactgtcaacctagaacttcccttaagagtcatccagctcttgctcagtgaagaggaaaatgcctccatggcagaggtcaacgcctcggtggcatacagactggggaccctggacatgcgggcctttctccgcaacagccaagtggaacgaatcgattctgcagcaccggcctcgggaagccccatccaacactggatggtcatctcggagttccagtaccgccctcggggcccggtcattgacttcctgaacaaccagctgctggccgcggtggtggaggcgttcttataccacgttccacggaggagtgaggagcccaggaacgacgtggtcttccagcccatctccggggaagacgtgcgcgatgtgacagccctgaacgtgagcacgctgaaggcttacttcagatgcgatggctacaagggctacgacctggtctacagcccccagagcggcttcacctgcgtgtccccgtgcagtaggggctactgtgaccatggaggccagtgccagcacctgcccagtgggccccgctgcagctgtgtgtccttctccatctacacggcctggggcgagcactgtgagcacctgagcatgaaactcgacgcgttcttcggcatcttctttggggccctgggcggcctcttgctgctgggggtcgggacgttcgtggtcctgcgcttctggggttgctccggggccaggttctcctatttcctgaactcagctgaggccttgccttgaaggggcagctgtggcctaggctacctcaagactcacctcatccttaccgcacatttaaggcgccattgcttttgggagactggaaaagggaaggtgactgaaggctgtcaggattcttcaaggagaatgaatactgggaatcaagacaagactataccttatccataggcgcaggtgcacagggggaggccataaagatcaaacatgcatggatgggtcctcacgcagacacacccacagaaggacactagcctgtgcacgcgcgcgtgcacacacacacacacacaagagttcataatgtggtgatggccctaagttaagcaaaatgcttctgcacacaaaactctctggtttacttcaaattaactctatttaaataaagtctctctgactttttgtgtcttcaaaa

SEQ ID NO: 155771 - DNA, 3921 bp, Homo sapiens
  Payload ID: 10597
  Gene Symbol: MUC4
  Gene Name: mucin 4, cell surface associated
  ENST ID: ENST00000629076
  CDS Start-End: 1-473
gaatgacaacaccgtcactgaagacagacggtgggagacgcacagccacatcaccaccccccacaacctcccagaccatcatttccaccattcccagcactgccatgcacacccgctccacagctgcccccatccccatcctgcctgagagaggtgaggccatacaggagtttccctcttcccctatggggcagacgccggggacctggagttcgtcaggaggaccgtggacttcacctccccactcttcaagccggcgactggcttcccccttggctcctctctccgtgattccctctacttcacagacaatggccagatcatcttcccagagtcagactaccagattttctcctaccccaacccactcccaacaggcttcacaggccgggaccctgtggccctggtggctccgttctgggacgatgctgacttctccactggtcgggggaccacattttatcaggctgtagggggtctgtcctaacaagagtgagtcaagagggcccgtcctgtgctcctggactgggtgaataactccaatcagaggaaatgtgatgaaagctactgcaggaagtgtggaccgtgcccctgccacggacagggcagtgtggaggctccaagaggaagagactcacgcctgttctcaagaagctgcagattaggcatggggaggaatacgagacgttctatggtgaacacagcctgctagtccagcaggccgagtcttggattagaaagatcacaaacaacgggggctacaaggccaggtgggccctaaaggtcacgtgggtcaatgcccacgcctatcctgcccagtggaccctcgggagcaacacctaccaagccatcctctccacggacgggagcaggtcctatgccctgtttctctaccagagcggtgggatgcagtgggacgtggcccagcgctcaggcaagccggtgctcatgggcttctctagtggagatggctatttcgaaaacagcccactgatgtcccagccagtgtgggagaggtatcgccctgatagattcctgaattccaactcaggcctccaagggctgcagttctacaggctacaccgggaagaaaggcccaactaccgtctcgagtgcctgcagtggctgaagagccagcctcggtggcccagctggggctggaaccaggtctcctgcccttgttcctggcagcagggacgacgggacttacgattccaacccgtcagcataggtcgctggggcctcggcagtaggcagctgtgcagcttcacctcttggcgaggaggcgtgtgctgcagctacgggccctggggagagtttcgtgaaggctggcacgtgcagcgtccttggcagttggcccaggaactggagccacagagctggtgctgccgctggaatgacaagccctacctctgtgccctgtaccagcagaggcggccccacgtgggctgtgctacatacaggcccccacagcccgcctggatgttcggggacccccacatcaccaccttggatggtgtcagttacaccttcaatgggctgggggacttcctgctggtcggggcccaagacgggaactcctccttcctgcttcagggccgcaccgcccagactggctcagcccaggccaccaacttcatcgcctttgcggctcagtaccgctccagcagcctgggccccgtcacggtccaatggctccttgagcctcacgacgcaatccgtgtcctgctggataaccagactgtgacatttcagcctgaccatgaagacggcggaggccaggagacgttcaacgccaccggagtcctcctgagccgcaacggctctgaggtctccgccagcttcgacggctgggccaccgtctcggtgatcgcgctctccaacatcctccactcctccgccagcctcccgcccgagtaccagaaccgcacggaggggctcctgggggtctggaataacaatccagaggacgacttcaggatgcccaatggctccaccattcccccagggagccctgaggagatgcttttccactttggaatgacctggcagatcaacgggacaggcctccttggcaagaggaatgaccagctgccttccaacttcacccctgttttctactcacaactgcaaaaaaacagctcctgggctgaacatttgatctccaactgtgacggagatagctcatgcatctatgacaccctggccctgcgcaacgcaagcatcggacttcacacgagggaagtcagtaaaaactacgagcaggcgaacgccaccctcaatcagtacccgccctccatcaatggtggtcgtgtgattgaagcctacaaggggcagaccacgctgattcagtacaccagcaatgctgaggatgccaacttcacgctcagagacagctgcaccgacttggagctctttgagaatgggacgttgctgtggacacccaagtcgctggagccattcactctggagattctagcaagaagtgccaagattggcttggcatctgcactccagcccaggactgtggtctgccattgcaatgcagagagccagtgtttgtacaatcagaccagcagggtgggcaactcctccctggagctctggggagctctttcctgtgtcagaaccagtcctgccctgtgaattactgctacaatcaaggccactgctacatctcccagactctgggctgtcagcccatgtgcacctgccccccagccttcactgacagccgctgcttcctggctgggaacaacttcagtccaactgtcaacctagaacttcccttaagagtcatccagctcttgctcagtgaagaggaaaatgcctccatggcagaggtcaacgcctcggtggcatacagactggggaccctggacatgcgggcctttctccgcaacagccaagtggaacgaatcgattctgcagcaccggcctcgggaagccccatccaacactggatggtcatctcggagttccagtaccgccctcggggcccggtcattgacttcctgaacaaccagctgctggccgcggtggtggaggcgttcttataccacgttccacggaggagtgaggagcccaggaacgacgtggtcttccagcccatctccggggaagacgtgcgcgatgtgacagccctgaacgtgagcacgctgaaggcttacttcagatgcgatggctacaagggctacgacctggtctacagcccccagagcggcttcacctgcgtgtccccgtgcagtaggggctactgtgaccatggaggccagtgccagcacctgcccagtgggccccgctgcagctgtgtgtccttctccatctacacggcctggggcgagcactgtgagcacctgagcatgaaactcgacgcgttcttcggcatcttctttggggccctgggcggcctcttgctgctgggggtcgggacgttcgtggtcctgcgcttctggggttgctccggggccaggttctcctatttcctgaactcagctgaggccttgccttgaaggggcagctgtggcctaggctacctcaagactcacctcatccttaccgcacatttaaggcgccattgcttttgggagactggaaaagggaaggtgactgaaggctgtcaggattcttcaaggagaatgaatactgggaatcaagacaagactataccttatccataggcgcaggtgcacagggggaggccataaagatcaaacatgcatggatgggtcctcacgcagacacacccacagaaggacactagcctgtgcacgcgcgcgtgcacacacacacacacacaagagttcataatgtggtgatggccctaagttaagcaaaatgcttctgcacacaaaactctctggtttacttcaaattaactctatttaaataaagtctctctgactttttgtgtcttcaaaa

SEQ ID NO: 155772 - DNA, 17448 bp, Homo sapiens
  Payload ID: 10598
  Gene Symbol: MUC5AC
  Gene Name: mucin 5AC, oligomeric mucus/gel-forming
  Uniprot ID: P98088
  ENST ID: ENST00000621226
  CDS Start-End: 48-17012
ctcagaggctgctgagggacagggcactcttccccgccgtccacacaatgagtgttggccggaggaagctggccctgctctgggccctggctctcgctctggcctgcacccggcatacaggccatgcccaggatggctcctccgaatccagctacaagcaccaccctgccctctctcctatcgcccgggggcccagcggggtcccgctccgtggggcgactgtcttcccatctctgaggaccatccctgtggtacgagcctccaacccggcgcacaacgggcgggtgtgcagcacctggggcagcttccactacaagaccttcgacggcgacgtcttccgcttccccggcctctgcaactacgtgttctccgagcactgcggtgccgcctacgaggattttaacatccagctacgccgcagccaggagtcagcggcccccacgctgagcagggtcctcatgaaggtggatggcgtggtcatccagctgaccaagggctccgtcctggtcaacggccacccggtcctgctgcccttcagccagtctggggtcctcattcagcagagcagcagctacaccaaggtggaggccaggctgggccttgtcctcatgtggaaccacgatgacagcctgctgctggagctggacaccaaatacgccaacaagacctgtgggctctgtggggacttcaacgggatgcccgtggtcagcgagctcctctcccacaacaccaagctgacacccatggaattcgggaacctgcagaagatggacgaccccacggaccagtgtcaggaccctgtccctgaacccccgaggaactgctccactggctttggcatctgtgaggagctcctgcacggccagctgttctctggctgcgtggccctggtggacgtcggcagctacctggaggcttgcaggcaagacctctgcttctgtgaagacaccgacctgctcagctgcgtctgccacacccttgccgagtactcccggcagtgcacccatgcaggggggttgccccaggactggcggggccctgacttctgcccccagaagtgccccaacaacatgcagtaccacgagtgccgctccccctgcgcagacacctgctccaaccaggagcactcccgggcctgtgaggaccactgtgtggccggctgcttctgccctgaggggacggtgcttgacgacatcggccagaccggctgtgtccctgtgtcaaagtgtgcctgcgtctacaacggggctgcctatgccccaggggccacctactccacagactgcaccaactgcacctgctccggaggccggtggagctgccaggaggttccatgcccgggtacctgctctgtgcttggaggtgcccacttctcaacgtttgacgggaagcaatacacggtgcacggcgactgcagctatgtgctgaccaagccctgtgacagcagtgccttcactgtactggctgagctgcgcaggtgcgggctgacggacagcgagacctgcctgaagagcgtgacactgagcctggatggggcgcagacggtggtggtgatcaaggccagtggggaagtgttcctgaaccagatctacacccagctgcccatctctgcagccaacgtcaccatcttcagaccctcaaccttcttcatcatcgcccagaccagcctgggcctgcagctgaacctgcagctggtgcccaccatgcagctgttcatgcagctggcgcccaagctccgtgggcagacctgcggtctctgtgggaacttcaacagcatccaggccgatgacttccggaccctcagtggggtggtggaggccaccgctgcggccttcttcaacaccttcaagacccaggccgcctgccccaacatcaggaacagcttcgaggacccctgctctctgagcgtggagaatgagaagtatgctcagcactggtgctcgcagctgaccgatgccgacggccccttcggccggtgccatgctgccgtgaagccgggaacctactactcgaactgcatgtttgacacctgcaactgtgagcggagcgaggactgcctgtgcgccgcgctgtcctcctacgtgcacgcctgtgccgccaagggcgtgcagctcggcggctggagggacggcgtctgcacgaagcctatgaccacttgccccaagtcaatgacgtaccactaccatgtcagcacctgccagcccacctgccgctccctgagcgagggggacatcacctgcagtgttggcttcatccccgtggatggctgcatctgtcccaagggcaccttcctggacgacacgggcaagtgtgtgcaggccagcaactgtccctgctaccacagaggctccatgatccccaatggggagtcggtgcacgacagcggggctatctgcacctgcacacatgggaagctgagctgcatcggaggccaagcccccgccccagtgtgtgctgcgcccatggtgttctttgactgccgaaatgccacgcccggggacacaggggctggctgtcagaagagctgccacacactggacatgacctgttacagcccccagtgtgtgcctggctgcgtgtgccccgacgggctggtggcggacggcgagggcggctgcatcactgcggaggactgcccctgcgtgcacaatgaggccagctaccgggccggccagaccatccgggtgggctgcaacacctgcacctgtgacagcaggatgtggcggtgcacagatgacccctgcctggccacctgcgccgtgtacggggacggccactacctcaccttcgacggacagagctacagcttcaacggagactgcgagtacacgctggtgcagaaccactgtggcgggaaagacagcacccaggactcctttcgtgttgtcaccgagaacgtcccctgcggcaccacagggaccacctgctccaaggccatcaagattttcctggggggcttcgagctgaagctaagccatgggaaggtggaggtgatcgggacggacgagagccaggaggtgccatacaccatccggcagatgggcatctacctggtggtggacaccgacattggcctggtgctgctgtgggacaagaagaccagcatcttcatcaacctcagccccgagttcaagggcagggtctgcggcctgtgtgggaacttcgacgacatcgccgttaatgactttgccacgcggagccggtctgtggtgggggacgtgctggagtttgggaacagctggaagctctccccctcctgcccagatgccctggcgcccaaggacccctgcacggccaaccccttccgcaagtcctgggcccagaagcagtgcagcatcctccacggccccaccttcgccgcctgccacgcacacgtggagccggccaggtactacgaggcctgcgtgaacgacgcgtgcgcctgcgactccgggggtgactgcgagtgcttctgcacggctgtggccgcctacgcccaggcctgccatgaagtaggcctgtgtgtgtcctggcggaccccgagcatctgccctctgttctgcgactactacaaccccgaaggccagtgcgagtggcactaccagccctgcggggtgccctgcctgcgcacctgccggaacccccgtggagactgcctgcgggacgtccggggcctggaaggctgctaccccaagtgcccaccagaggctcccatctttgatgaggacaagatgcagtgtgtggccacctgcccaaccccgcctctgccaccacggtgccacgtccatgggaagtcctaccggccaggtgcagtggtgccctcggacaagaactgccagtcctgcctttgtacggagcgcggcgtggagtgcacctacaaagctgaggcctgtgtctgcacctacaatggacagcgcttccacccaggggacgtcatctaccacacgacggatggcacgggtggctgcatctccgcccgctgcggggccaacggcaccattgagaggagggtctacccctgcagccccaccacccctgtccccccaaccaccttctccttctccacacccccgcttgtcgtgagctccacgcacacccccagcaatggcccaagcagcgcgcacacaggccctccgagcagcgcctggcccaccacagcaggcacttctcccaggacgaggctgcccacagcctctgcctcactgccgccggtctgtggggaaaagtgcctgtggtcgccatggatggatgtcagccgccctggacggggcacggacagcggtgacttcgacacactggagaacctccgcgcccatgggtaccgggtgtgcgaatcacccaggtcggtggagtgccgagctgaggacgcccccggagtgccgctccgagccctggggcagcgtgtgcagtgcagcccggatgtggggctgacctgtcgtaacagggagcaggcatcggggctctgctacaactaccagatcagggtccagtgctgcacgcccctaccctgctccacctctagcagtccagcccagaccactcctccaactacctccaagaccactgaaacccgggcctcaggctcctcagctcccagcagcacacctggcaccgtgtctctctctacagccaggacgacacctgccccaggtaccgctacctctgtcaaaaaaactttctcaactcccagccctccgccagtgccggcaacatcaacatcatccatgtcgaccacggccccggggacctctgtggtctccagcaagcccacccccacggagcccagcacatcctcctgcctgcaggagctttgcacctggaccgagtggatcgatggcagctaccctgctcctggaataaatggtggagattttgacacatttcaaaatttgagagacgaaggatacacattctgtgaaagtcctcgaagcgtgcagtgccgggcagagagcttccccaacacgccgctggcagacctggggcaggacgtcatctgcagccacacagaggggctgatttgcctgaacaagaaccagctcccacccatctgctacaactatgagatccgcatccagtgttgcgagacggtgaacgtgtgcagagacatcaccagactgccaaagaccgtcgcaacgacacggccgactccacatccaaccggagctcagacccagaccaccttcaccacacacatgccctcggcctccacagagcaacccacggcaacctccaggggtgggcccacagcaaccagcgtcacacagggcacccacaccacactagtcaccagaaactgtcatccccggtgcacctggacaaagtggttcgacgtggacttcccgtcccccggaccccatggtggagacaaggaaacctacaacaacatcatcaggagtggggaaaaaatctgccgccgacctgaggagatcaccaggctccagtgccgagccaagagccacccagaggtgagcatcgaacacctgggccaggtggtgcagtgcagccgggaagagggcctggtgtgccggaaccaggaccagcagggacccttcaagatgtgcctcaactacgaggtgcgtgtgctctgctgcgagacccccagaggctgccacatgacctccacacctggctccacctctagcagtccagcccagaccactccttcaacaacctccaagaccactgaaacccaggcctcaggctcctcagcccccagcagcacacctggcaccgtgtctctctctacagccaggacgacacctgccccaggtaccgctacctctgtcaaaaaaactttctcaactcccagccctccgccagtgccggcaacatcaacatcatccatgtcgaccacggccccggggacctctgtggtctccagcaagcccacccccacggagcccagcacatcctcctgcctgcaggagctttgcacctggaccgagtggattgatggcagctaccctgctcctggaataaatggtggagattttgacacatttcaaaatttgagagacgaaggatacacattctgtgaaagtcctcgaagcgtgcagtgccgggcagagagcttccccaacacgccgctggcagacctggggcaggacgtcatctgcagccacacagaggggctgatttgcctgaacaagaaccagctcccacccatctgctacaactatgagatccgcatccagtgttgcgagacggtgaacgtgtgcagagacatcaccagaccgccaaagaccgtcgcaacgacacggccgactccacatccaaccggagctcagacccagaccaccttcaccacacacatgccctcggcctccacagagcaacccacggcaacctccaggggtgggcccacagcaaccagcgtcacacagggcacccacaccacaccagtcaccagaaactgtcatccccggtgcacctggacaacgtggttcgacgtggacttcccgtcccccggaccccatggtggagacaaggaaacctacaacaacatcatcaggagtggggaaaaaatctgccgccgacctgaggagatcaccaggctccagtgccgagccaagagccacccagaggtgagcatcgaacacctgggccaggtggtgcagtgcagccgggaagagggcctggtgtgccggaaccaggaccagcagggacccttcaagatgtgcctcaactacgaggtgcgtgtgctctgctgcgagacccccaaaggctgccccgtgacctccacacctgtgacagctcctagcacccctagtgggagagccaccagcccaactcagagcacctcctcttggcagaaatccaggacaaccactttggtgacaaccagcacaacctccactccacagaccagtacaacctatgcccatacaaccagcacaacctctgctcctacagccagaacaacctctgctcctacaaccagaacaacctctgcctctccagccagcacaacctctggtcctggaaatactcccagccctgttcctaccaccagcacaatctctgctcctacaactagcataacctctgcccctacaaccagcacaacctctgcccctacaagcagcacaacctctggtcctggaactactcccagccctgttcctaccaccagcataacctctgcccctacaaccagcacaacctctgctcctacaaccagcacaacctctgcccgtacaagcagcacaacctctgccactaccaccagcagaatctctggtcctgaaactactcccagccctgttcctaccaccagcacaacctctgccactacaaccagcacaacctcagctcctacaaccagcacaacctctgcccctacaagcagcacaacctccagtccacagaccagcacaacctcggctcctacaaccagcacaacttctggtcctggaactaccccaagccctgttcccacgaccagcacaacctctgcccctacaacaagaacaacttctgctcctaaaagcagcacaacctctgccgctacaaccagcacaacctctggtcctgaaactactcctagacctgttcctaccaccagcacaacctcttctcctacaaccagcacaacctctgctcctacaaccagcacaacctctgcttctacaaccagcacaacctctggtgctggaactactcccagccctgttcccaccaccagcacaacctctgctcctacaaccagcacaacctctgcccctataagcagcacaacctctgccactacaaccagcacaacctctggtcctggaactactcccagccctgttcctaccacgagcacaacctctgctcctacaaccagcacaacctctggtcctggaactactcccagtgctgttcccaccaccagcataacctctgcacctacaaccagcacaaactctgcccctataagcagcacaacctctgccactacaaccagcagaatctctggtcctgaaactactcccagccctgttcctaccgccagcacaacctctgcttctacaactagcacaacctctggtcctggaactactcccagccctgttcctaccaccagcacaatctctgttcctaccaccagcacaacttctgcttctacaaccagcacaacctctgcttctacaaccagcacaacctctggtcctggaactactcccagccctgttcccaccaccagcacaacctctgctcccacaacaagcacaacctctgcccctacaaccagcacaatctcggccccaacaaccagcacaacctctgccactacaaccagcacgacctctgctcctacacccagaagaacctcagcccctacaaccagcacaatctctgcctctaccaccagcacaacctctgcgactacaaccagcacaacctctgctactacaaccagcacaatctctgcccctacaaccagcacaactttgtctcctacaaccagcacaacctctactactataaccagcacaacttctgcccctataagcagcacaacttccacaccacagaccagcacaacttcggctcctacaaccagcacaacttctggtcctggaactacttcaagccctgttcccaccaccagcacaacctctgcccctacaaccagcacaacctctgcccctacaaccagaacaacctctgtccctacaagcagcacaacctccactgctacaaccagcacaacctctggccctggaactactcccagccctgttcccaccaccagtacaacctctgctcctacaaccagaacaacctctgctcctacaaccagcacaacctctgcccctacaaccagcacaacctctgcccctacaagcagcacaacctcagctactacaaccagcacaatctctgttcctacaaccagcacaacttctgttcctggaactactcccagccctgttcctaccaccagcacaatctctgttcctaccaccagcacaacttctgcttctacaaccagcacaacctctggtcctggaactactcccagccctgttcccaccaccagcacaacctctgctcccacaacaagcacaacctctgcccctacaaccagcacaatctcggccccaacaaccagcacaccctctgcccctacaaccagcacaaccttagctcctacaaccagcacaacctctgcccctacaaccagcacaacctctacccctacaagcagcacaacctcctctccacagaccagcacaacctcggcttctaccaccagcataacttctggtcctggaactaccccaagccctgttcccaccaccagcacaacctctgctcctacaaccagcacaacctctgccgctacaaccagcacaatctcggccccaacaaccagcacaacgtctgctcctacaaccagcacaacctctgcctctacagccagcaaaacctctggtcttggaactactcccagccctattcctaccaccagcacaacctctcctcctacaaccagcacaacttctgcctctacagccagcaaaacctctggtcctggaaccactcccagccctgttcccaccaccagcacaatctttgctcctagaaccagcaccacttctgcctctacaaccagcacaacccctggtcctggaaccactcccagccccgttcccaccaccagcacagcctctgtttcaaagaccagcacaagccatgtttccatatccaagacaacccactcccaaccagtcaccagagactgtcatctccggtgcacctggaccaagtggtttgacatagacttcccatcccctggaccccacggcggggacaaggaaacctacaacaacatcatcaggagtggggaaaaaatctgccgccgacctgaggagatcaccaggctccagtgccgagccgagagccacccggaggtgagcattgaacacctgggccaggtggtgcagtgcagccgtgaagagggcctggtgtgccggaaccaggaccagcagggacccttcaagatgtgcctcaactacgaggtgcgtgtgctctgctgcgagacccctaaaggttgccccgtgacctccacacctgtgacagctcctagcacccctagtgggagagccaccagcccaactcagagcacttcctcttggcagaaatccaggacaaccactttggtgacaaccagcacaacctccactccacagaccagcacaacctctgctcctacaaccagcacaacctctgctcccacaaccagcacaacttctgcccctacaaccagcacaacctccactccacagaccagcatatcctctgcccctacaagcagcacaacctcggctcctacaagcagcacaatctctgctcgtacaaccagcataatctctgcccctacaaccagcacaacctcttcccctacaaccagcacaacctctgctactacaaccagcacaacctctgcccctacaagcagcacaacctccactccacagaccagcaaaacctcagctgctacaagcagcacaacctccggttctggaactactcccagccctgttaccaccaccagcacagcctctgtttcaaagaccagcacaagccatgtttctgtatccaagacaacccactcccaaccagtcaccagagactgtcatccccggtgcacctggaccaaatggtttgatgtggactttccatcccctggaccccacggtggggacaaggaaacctacaacaacatcatcaggagtggggaaaaaatctgccgccgacctgaggagatcaccaggctccagtgccgagccaagagccacccggaggtgagcatcgaacacctgggccaggtggtgcagtgcagccgcgaagagggcctggtgtgccggaaccaggaccagcagggacccttcaagatgtgcctcaactacgaggtgcgtgtgctttgctgcgagacccccaaaggctgccccgtgacctccacatctgtgacagctcctagcacccctagtgggagagccaccagcccaactcagagcacctcctcttggcagaaatccaggacaaccactttggtgacaagcagcataacctccactacacagaccagcacaacctctgcccctacaactagcacaacccctgcttctatacccagcacaacctctgccccaacaaccagcacaacctctgctcccacaacgagcacaacttctgcccctacaaccagcacaacctccactccacagaccaccacatcctctgcccctacaagcagcacaacctcggctcctaccaccagcacaatctctgcccctacaaccagcacaatctctgcccctacaaccagcacaacctctgctcccacagccagcacaacgtcagctcctacgagcacttcctcggctcctacaaccaacacaacctctgcccctacaactagcactacctctgctcccataaccagcacaatctctgcccctacaaccagcacaacctccactccacagaccagcacaatctcttcccctacaaccagcacaacctccactccgcagaccagcacaacctcttcccctacaactagcacaacctcagctcctacaaccagcacaacttctgcccctacaaccagcacaacctccactccacagaccagcatatcctctgcccctacaagcagcacaacctctgctcctacagccagcacaatctctgcccctacaaccagcacaacctctttccatacaaccagcacaacctctccccctacaagcagcacaagctccactccacagaccagcaaaacctcagctgctacaagcagcacaacctccggttctggaactactcccagccccgttcccaccaccagcacagcctctgtttcaaagaccagcacaagccatgtttctgtatccaagacaacccactcccaaccagtcaccagagactgtcatccccggtgcacctggaccaagtggtttgacgtggactttccatcccctggaccccacggtggggacaaggaaacctacaacaacatcatcaggagtggggaaaaaatctgccgccgacctgaggagatcaccaggctccagtgccgagccgagagccacccggaggtgagcatcgaacacctgggccaggtggtgcagtgcagccgggaagagggcctggtgtgccggaaccaggaccagcagggacccttcaagatgtgcctcaactacgaggtgcgtgtgctctgctgcgagacccccaaaggctgccccgtgacctccacacctgtgacagctcctagcacccctagtgggagagccaccagcccaactcagagcacttcctcttggcagaaatccaggacaaccactttggtgacaaccagcacaacctccactccacagaccagcacaacctctgcccctacaaccagcacaatccctgcttctacacccagcacaacctctgcccctacaaccagcacaacctctgcccctacaaccagcacgacctcagctcctacacacagaacgacttctggtcctacaaccagcacaaccttggctcctacaaccagcacaacctctgctccaacaaccagcacaaactctgctcctacaaccagcacaatctctgcctctacaaccagcacaatctctgcccctacaaccagcacaatctcttcccctacaagcagcacaacctccactccacagaccagcaaaacctcagctgctacaagcagcacaacctccggttctggaactactccaagccctgttcccaccaccagcacaacctctgcctctacaaccagcacaacttctgctcctacaaccagcacaacctctggtcctggaactactccaagccctgttcccagcaccagtacaacctctgctgctacaaccagcacaacctctgctcctacaaccagaacaacatctgctcctacaagcagcatgacctctggtcctggaactactcccagccctgttcccaccaccagcacaacctctgctcctacaactagcacaacctctggtcctggaactactcccagccctgttcccaccaccagcacaacctctgctcctataaccagcacaacctctggtcctggaagtactcccagccctgttcccaccaccagcacaacctctgctcctacaaccagcacaacctctgcctctacagccagcacaacctctggtcctggaactactcccagccctgttcccaccaccagcacaacctctgctcctacaaccagaacaacctctgcctctacagccagcacaacctctggtcctggaagtactcccagccctgttcccaccaccagcacaacctctgctcctacaaccagaacaacccctgcctctacagccagcacaacctctggtcctggaactactcccagccctgttcccaccacaagcacaacctctgcttctacaaccagcacaatctctctccctacaaccagcacaacctctgctcctataaccagcatgacctctggtcctggaactactcccagccctgttcccaccaccagcacaacctctgctcctacaaccagcacaacctctgcctctacagccagcacaacctctggtcctggaactactcccagccctgttcccaccaccagcacaacctctgctcctacaaccagcacaacctctgcctctacagccagcacaacctctggtcctggaacttctctcagccctgttcccaccacgagcacaacctctgctcctacaactagcacaacctctggtcctggaactactcccagccctgttcccaccaccagcacaacctctgctcctacaaccagcacgacctctggtcctggaactactcccagccccgttcccaccaccagcacaacccctgtttcaaagaccagcacaagccatctttctgtatccaagacaacccactcccaaccagtcaccagtgactgtcatcctctgtgcgcctggacaaagtggttcgacgtggacttcccatcccctggaccccacggcggggacaaggaaacctacaacaacatcatcaggagtggggaaaaaatctgccgccgacctgaggagatcaccaggctccagtgccgagccgagagccacccggaggtgaacattgaacacctgggtcaggtggtgcagtgcagccgtgaagagggcctggtgtgccggaaccaggaccagcagggacccttcaagatgtgcctcaactacgaggtgcgcgtgctctgctgcgagacccccagaggctgcccggtgacctctgtgaccccatatgggacttctcctaccaatgctctgtatccttccctgtctacttccatggtatccgcctccgtggcatccacctctgtggcatccagctctgtggcatccagctctgtggcttactccacccaaacctgcttctgcaacgtggctgaccggctctaccctgcaggatccaccatataccgccacagagacctcgctggccattgctattatgccctgtgtagccaggactgccaagtggtcagaggggttgacagtgactgtccgtccaccacgctgcctcctgccccagccacgtccccttcaatatccacctccgagcccgtcactgagctgggatgcccaaatgcggttccccccagaaagaaaggtgagacctgggccacacccaactgctccgaggccacctgtgagggcaacaacgtcatctccctgcgcccgcgcacgtgcccgagggtggagaagcccacttgtgccaacggctacccggctgtgaaggtggctgaccaagatggctgctgccatcactaccagtgccagtgtgtgtgcagcggctggggtgacccccactacatcaccttcgacggcacctactacaccttcctggacaactgcacgtacgtgctggtgcagcagattgtgcccgtgtatggccacttccgcgtgctcgtcgacaactacttctgcggtgcggaggacgggctctcctgcccgaggtccatcatcctggagtaccaccaggaccgcgtggtgctgacccgcaagccagtccacggggtgatgacaaacgagatcatcttcaacaacaaggtggtcagccccggcttccggaaaaacggcatcgtggtctcgcgcatcggcgtcaagatgtacgcgaccatcccggagctgggagtccaggtcatgttctccggcctcatcttctccgtggaggtgcccttcagcaagtttgccaacaacaccgagggccagtgcggcacttgcaccaacgacaggaaggatgagtgccgcacgcctagggggacggtggtcgcttcctgctccgagatgtccggcctctggaacgtgagcatacccgaccagccagcctgccaccggcctcacccgacgcccaccacggtcgggcccaccacagttgggtctaccacggtcgggcccaccacagttgggtctaccacggtcgggcccaccacaccgcctgctccgtgcctgccatcacccatctgccagctgattctgagcaaggtctttgagccgtgccacactgtgatccccccactgctgttctatgagggctgcgtctttgaccggtgccacatgacggacctggatgtggtgtgctccagcctggagctgtacgcggcactctgtgcgtcccacgacatctgcatcgattggagaggccggaccggccacatgtgcccattcacctgcccagccgacaaggtgtaccagccctgcggcccgagcaacccctcctactgctacgggaatgacagcgccagcctcggggctctgccggaggccggccccatcaccgaaggctgcttctgtccggagggcatgaccctcttcagcaccagtgcccaagtctgcgtgcccacgggctgccccaggtgtctggggccccacggagagccggtgaaggtgggccacaccgtcggcatggactgccaggagtgcacgtgtgaggcggccacgtggacgctgacctgccgacccaagctctgcccgctgccccctgcctgccccctgcccggcttcgtgcctgtgcctgcagccccacaggccggccagtgctgcccccagtacagctgcgcctgcaacaccagccgctgccccgcgcccgtgggctgtcctgagggcgcccgcgcgatcccgacctaccaggagggggcctgctgcccagtccaaaactgcagctggacagtgtgcagcatcaacgggaccctgtaccagcccggcgccgtggtctcctcgagcctgtgcgaaacctgcaggtgtgagctgccgggtggccccccatcggacgcgtttgtggtcagctgtgagacccagatctgcaacacacactgccctgtgggcttcgagtaccaggagcagagcgggcagtgctgtggcacctgtgtgcaggtcgcctgtgtcaccaacaccagcaagagccccgcccacctcttctaccccggcgagacctggtcagacgcagggaaccactgtgtgacccaccagtgtgagaagcaccaggatgggctcgtggtggtcaccacgaagaaggcgtgccccccgctcagctgttctctggacgaggcccgcatgagcaaggacggctgctgccgcttctgcccgccgcccccgcccccgtaccagaaccagtcgacctgtgctgtgtaccataggagcctgatcatccagcagcagggctgcagctcctcggagcccgtgcgcctggcttactgccgggggaactgtggggacagctcttccatgtactcgctcgagggcaacacggtggagcacaggtgccagtgctgccaggagctgcggacctcgctgaggaatgtgaccctgcactgcaccgacggctccagccgggccttcagctacaccgaggtggaagagtgcggctgcatgggccggcggtgccctgcgccgggcgacacccagcactcggaggaggcggaacccgagcccagccaggaggcagagagtgggagctgggagagaggcgtcccagtgtcccccatgcactgaccagcactgccgccctcctgacctccaaggagaacctcccatatgtcctctgagctcggcttccaaggccagtggaacttgtgcccctgtccaggcggctgcagctttgaacacactgtccacgcccgctttcttgtggagggtgtgggctatgggtcacctgctgcctggaggaggggcccttacccaccccgcctgcagccacctctcaggaccagccccggggctggccgagctcctctggccatgcatccagcctgctgttctggggacgtgagcatcacctgagggtctcaggaatgacgcttggacatggtgatcagctgcctggtggctgcaggaggaagaacctcactcctacctcagccctcagcctgcgctcccctcctcagtacacggccaatctgttgcataaatacacttgagcattttgcaa

SEQ ID NO: 155773 - DNA, 461 bp, Homo sapiens
  Payload ID: 10599
  Gene Symbol: MUC5B
  Gene Name: mucin 5B, oligomeric mucus/gel-forming
  ENST ID: ENST00000526859
  CDS Start-End: 1-461
cagcccccgccgtgcaaccgtcccggcttcgtaaccgtgaccaggccccgggccgagaacccctgctgccccgagacggtgtgcgtgtgcaacacaaccacctgcccccagagcctgcctgtgtgcccgccagggcaggagtccatctgcacccaggaggagggcgactgctgtcccaccttccgctgcagacctcagctgtgttcgtacaatggcaccttctacggggttggtgcaaccttcccaggcgcccttccctgccacatgtgtacctgcctctctggggacacccaggacccaacggtgcaatgtcaggaggatgcctgcaacaatactacctgtccccagggctttgagtacaagagagtggccgggcagtgctgtggggagtgcgtccagaccgcctgcctcacgcccgatggccagccagtccaggaagctgcgacaggcaaggcggccgc

SEQ ID NO: 155774 - DNA, 17911 bp, Homo sapiens
  Payload ID: 10599
  Gene Symbol: MUC5B
  Gene Name: mucin 5B, oligomeric mucus/gel-forming
  Uniprot ID: Q9HC84
  ENST ID: ENST00000529681
  CDS Start-End: 59-17347
acccggcccggctccctccctgcccgtccccgtccccccacccgtgccagcccccaggatgggtgccccgagcgcgtgccggacgctggtgttggctctggcggccatgctcgtggtgccgcaggcagagacccagggccctgtggagccgagctgggagaatgcagggcacaccatggatggcggtgccccgacgtcctcgcccacccggcgcgtgagctttgttccacccgtcactgtcttccccagcctgagccccctgaacccggcgcacaatgggcgggtgtgcagcacctggggtgacttccactacaagaccttcgacggcgacgtcttccgcttccctggcctttgcaactacgtgttctctgagcactgccgcgccgcctacgaggacttcaacgtccagctacgccgaggcctagtgggctccaggcctgtggtcacccgtgttgtcatcaaggcccaggggctggtgctggaggcgtccaacggctccgtcctcatcaatgggcagcgggaggagctgccttacagccgcactggcctcctggtggagcagagcggggactacatcaaggtcagcatccggctggtgctgacattcctgtggaacggagaggacagtgccctgctggagctggatcccaaatacgccaaccagacctgtggcctgtgtggggacttcaacggcctcccggccttcaacgagttctatgcccacaacgccaggctgaccccgctccagtttgggaacctgcagaagttggatgggcccacggagcagtgcccggacccgctgcccttgccggccggcaactgcacggacgaggagggcatctgccaccgcaccctgctggggccggcctttgcggagtgccacgcactggtggacagcactgcgtacctggccgcctgcgcccaggacctgtgccgctgccccacctgcccgtgtgccacctttgtggaatactcacgccagtgcgcccacgcggggggccagccgcggaactggaggtgccctgagctctgcccccggacctgccccctcaacatgcagcaccaggagtgtggctcaccctgcacggacacctgctccaacccccagcgcgcgcagctctgcgaggaccactgtgtggacggctgcttctgccccccaggcacggtgctggatgacatcacgcactctggctgcctgcccctcgggcagtgcccctgcacccacggcggccgcacctacagcccgggcacctccttcaacaccacctgcagctcctgcacctgctccggggggctatggcagtgccaggacctgccgtgccctggcacctgctctgtgcagggcggggcccacatctccacctatgatgagaaactctacgacctgcatggtgactgcagctacgttctgtccaagaaatgtgccgacagcagcttcaccgtgctggctgagctgcggaagtgcggcctgacggacaacgagaactgcctgaaagcggtgacgctcagcctggacggcggggacacggccatccgggtccaagcggacggcggcgtgttcctcaactccatctacacgcagctgcccctgtcggcagccaacatcaccctgttcacaccctcgagcttcttcatcgtggtgcagacaggcctggggctgcagctgctggtgcagctggtgccactcatgcaggtgtttgtcaggctggaccccgcccaccagggccagatgtgcggcctgtgtgggaacttcaaccagaaccaggctgacgacttcacggccctcagcggggtggtggaggccacgggcgcagccttcgccaacacctggaaggcccaggctgcctgtgccaatgccaggaacagctttgaggacccctgctccctcagtgtggagaatgagaactacgcccggcactggtgctcgcgcctgaccgatcccaacagtgccttctcgcgctgccactccatcatcaaccccaagcccttccactcgaactgcatgtttgacacctgcaactgtgagcggagcgaggactgcctgtgcgccgcgctgtcctcctatgtgcacgcctgtgccgccaagggcgtacagctcagcgactggagggacggcgtctgcaccaagtacatgcagaactgccccaagtcccagcgctacgcctacgtggtggatgcctgccagcccacttgccgcggcctgagtgaggccgacgtcacctgcagcgtttccttcgtgcctgtggacggctgcacctgccccgcgggcaccttcctcaatgacgcgggcgcctgtgtgcccgcccaggagtgcccctgctacgctcacggcaccgtgctggctcctggagaggtggtgcacgacgagggcgccgtgtgttcatgtacgggtgggaagctaagctgcctgggagcctctctgcagaaaagcacagggtgtgcagcccccatggtgtacctggactgcagcaacagctcggcgggcacccctggggccgagtgcctccggagctgccacacgctggacgtgggctgtttcagcacacactgcgtgtccggctgtgtctgtcccccggggctggtgtcggatgggagtgggggctgcattgccgaggaggactgcccctgtgtgcacaacgaggccacctacaagcctggagagaccatcagggtcgactgcaacacctgcacctgcaggaaccggaggtgggagtgcagccaccggctctgcctgggcacctgcgtggcctacggggatggccacttcatcacctttgatggcgatcgctacagctttgaaggcagctgcgagtacatcttggcccaggactactgtggggacaacaccacccacgggaccttccgcatcgtcaccgagaacatcccctgtgggaccaccggcaccacctgctccaaggccatcaagctcttcgtggagagctacgagctgatcctccaagaggggacctttaaggcggtggcgagagggccgggtggggacccaccctacaagatacgctacatggggatcttcctggtcatcgagacccacgggatggccgtgtcctgggaccggaagaccagcgtgttcatccgactgcaccaggactacaagggcagggtctgcggcctgtgcgggaacttcgacgacaatgccatcaatgactttgccacgcgtagccggtccgtggtgggggacgcactggagtttgggaacagctggaagctctccccctcctgcccggacgccctggcacccaaggacccctgcacggccaaccccttccgcaagtcctgggcccagaagcagtgcagcatcctccacggccccaccttcgccgcctgccgctcccaggttgactccaccaagtactacgaggcctgcgtgaacgacgcgtgtgcctgcgactcgggtggcgactgcgagtgtttctgcacggctgtggctgcctacgcccaggcctgccacgacgcgggcctgtgtgtgtcctggcggactccggacacctgccccttgttctgtgacttctacaacccacatgggggctgtgagtggcactaccagccctgcggggcaccctgcctaaaaacctgccggaaccccagtgggcactgcctggtggacctgcctggcctggaaggctgctacccgaagtgcccacccagccagcccttcttcaatgaggaccagatgaagtgcgtggcccagtgtggctgctacgacaaggacggaaactactatgacgtcggtgcaagggtccccacagcggagaactgccagagctgtaactgcacacccagtggcatccagtgcgctcacagccttgaggcctgcacctgcacctatgaggacaggacctacagctaccaggacgtcatctacaacaccaccgatgggcttggcgcctgcttgatcgccatctgcggaagcaacggcaccatcatcaggaaggctgtggcatgtcctggaactccagccacaacgccattcaccttcaccaccgcctgggtcccccactccacgacaagcccggccctcccggtctccaccgtgtgtgtccgcgaggtctgccgctggtccagctggtacaatgggcaccgcccagagcccggcctgggaggcggagactttgagacgtttgaaaacctgaggcagagagggtaccaggtatgccctgtgctggctgacatcgagtgccgggcggcgcagcttcccgacatgccgctggaggagctgggccagcaggtggactgtgaccgcatgcgggggctgatgtgcgccaacagccaacagagtcccccgctctgtcacgactacgagctgcgggttctctgctgcgaatacgtgccctgtggcccctccccggccccaggcaccagccctcagccctccctcagtgccagcacggagcctgctgtgcctaccccaacccagaccacagcaaccgaaaagaccaccctatgggtgaccccgagcatccggtcgacggcggccctcacctcgcagactgggtccagctcaggccccgtgacggtcaccccctcggccccaggtaccaccacctgccagccccggtgtcagtggacagagtggtttgatgaggactaccccaagtctgaacaacttggaggggacgttgagtcctacgataagatcagggccgctggagggcacttatgccagcagcctaaggacatagagtgccaggccgagagcttccccaactggaccctggcacaggtggggcagaaggtgcactgtgacgtccacttcggcctggtgtgcaggaactgggagcaggagggcgtcttcaagatgtgctacaactacaggatccgggtcctctgctgcagtgacgaccactgcaggggacgtgccacaaccccgccaccgaccacagagctggagacggccaccaccaccaccacccaggccctgttctcaacgccgcagcctacgagtagcccggggctgaccagggctcccccggccagcaccacagcagtccccaccctctcagaaggactgacatcccccagatacacaagcacccttggtacagccaccacgggaggccccacgacgcctgcaggctccacagaacccactgtcccaggggtggccacatccacccttccaacacgctcagcccttccagggacgacggggagcttgggcacatggcgcccctcacagccacccacgctggccccaacaacaatggcaacctccagagctcgcccgacaggcacagccagcaccgcttccaaagagccgctgaccacgagcctggcgccaacactcacgagcgagctgtccacctctcaggccgagaccagcacgcccaggacagagacgacaatgagccccttgactaacaccaccaccagccagggcacgacccgctgtcaaccgaagtgtgagtggacagagtggtttgacgtggacttcccaacctcaggggttgcaggcggggacatggaaacttttgaaaacatcagggctgctgggggcaagatgtgctgggcaccaaagagcatagagtgccgggcggagaactaccccgaggtaagcatcgaccaggtcgggcaggtgctgacctgcagcctggagacggggctgacctgcaagaacgaagaccagacaggcaggttcaacatgtgcttcaactacaacgtgcgtgtgctttgctgtgacgactacagccactgccccagtaccccagccaccagctccacggccacgccctcctcaactccggggacgacctggatcctcacaaagccgaccacaacagccactacgactgcgtccactggatccacggccaccccgacctccaccctgagaacagctccccctcccaaagtgctgaccaccacggccaccacacccacagtcaccagctccaaagccactccctcctccagtccagggactgcaaccgcccttccagcactgagaagcacagccaccacacccacagctaccagcgttacacccatcccctcttcctccctgggcaccacctggacccgcctatcacagaccaccacacccacggccaccatgtccacagccacaccctcctccactccagagactgcccacacctccacagtgcttaccgccacggccaccacaactggggccaccggctctgtggccaccccctcctccaccccaggaacagctcacactaccaaagtgccaactaccacaaccacgggcttcacagccaccccctcctccagcccagggacggcactcacgcctccagtgtggatcagcacaaccaccacacccacaaccagaggctccacggtgaccccctcctccatcccggggaccacccacaccgccacagtgctgaccaccaccaccacaactgtggccactggttctatggcaacaccctcctctagcacacagaccagtggtactcccccatcactgaccaccacggccactacgatcacggccaccggctccaccaccaacccctcctcaactcctgggacaactcccatccccccagtgctgaccaccaccgccaccacacctgcagccaccagcaacacagtgactccctcctctgccctagggaccacccacacacccccagtgccgaacaccatggccaccacacacgggcgatccctgccccccagcagtccccacacggtgcgcacagcctggacttcggccacctcgggcatcttgggcaccacccacatcacagagccttccacggtgacttcccacaccctagcagcaaccaccggtaccacccagcactcgactccagccctttccagccctcaccctagcagcagaaccaccgagtcacccccttctccagggacgaccaccccgggccacaccacggccacctccaggaccacagccacggccacacccagcaagacccgcacctcgaccctgctgcccagcagccccacatcggcccccataaccacggtggtgaccatgggctgtgagccccagtgtgcctggtcagagtggctggactacagctaccccatgccggggccctctggcggggactttgacacctactccaacatccgtgcggccggaggggccgtctgtgagcagcccctgggcctcgagtgccgtgcccaggcccagcctggtgtccccctgcgggagttgggccaggtcgtggaatgcagcctggactttggcctggtctgcaggaaccgtgagcaggtggggaagttcaagatgtgcttcaactatgaaatccgtgtgttctgctgcaactacggccactgccccagcaccccggccaccagctctacggccatgccctcctccactccggggacgacctggatcctcacagagctgaccacaacagccactacgactgagtccactggatccacggccaccccgtcctccaccccagggaccacctggatcctcacagagccgagcactacagccaccgtgacggtgcccaccggatccacggccaccgcctcctccacccaggcaactgctggcaccccacatgtgagcaccacggccacgacacccacagtcaccagctccaaagccactcccttctccagtccagggactgcaaccgcccttccagcactgagaagcacagccaccacacccacagctaccagctttacagccatcccctcctcctccctgggcaccacctggacccgcctatcacagaccaccacacccacggccaccatgtccacagccacaccctcctccactccagagactgtccacacctccacagtgcttaccaccacggccaccacaaccggggccaccggctctgtggccaccccctcctccaccccaggaacagctcacactaccaaagtgctgactaccacaaccacgggcttcacagccaccccctcctccagcccagggacggcacgcacgcttccagtgtggatcagcacaaccaccacacccacaaccagaggttccacggtgaccccctcctccatcccggggaccacccacacccccacagtgctgaccaccaccaccacaactgtggccactggttctatggcaacaccctcctctagcacacagaccagtggtactcccccatcactgaccaccacggccactacgatcacggccaccggctccaccaccaacccctcctcaactccagggacaacacctatccccccagtgctgaccaccaccgccaccacacctgcagccaccagcagcacagtgactccctcctctgccctagggaccacccacacacccccagtgccgaacaccacggccaccacacacgggcgatccctgtcccccagcagtccccacacggtgcgcacagcctggacttcggccacctcaggcaccttgggcaccacccacatcacagagccttccacggggacttcccacaccccagcagcaaccaccggtaccacccagcactcgactccagccctgtccagccctcaccctagcagcaggaccaccgagtcacccccttctccagggacgaccaccccgggccacaccagggccacctccaggaccacggccacggccacacccagcaagacccgcacctcgaccctgctgcccagcagccccacatcggccccaataaccacggtggtgaccatgggctgtgagccccagtgtgcctggtcagagtggctggactacagctaccccatgccggggccctctggcggggactttgacacctactccaacatccgtgcggccggaggggccgtctgtgagcagcccctgggcctcgagtgccgtgcccaggcccagcctggtgtccccctgcgggagttgggccaggtcgtggaatgcagcctggactttggcctggtctgcaggaaccgtgagcaggtggggaagttcaagatgtgcttcaactatgaaatccgtgtgttctgctgcaactacggccactgccccagcaccccggccaccagctctacggccacgccctcctccactccagggacgacctggatcctcacagagcagaccacagcagccactacgaccgcaaccactggatccacggccatcccgtcctccaccccgggaacagctccccctcccaaagtgctgaccagcacggccaccacacccacagccaccagttccaaagccacttcctcctccagtccaaggactgcaaccacccttccagtgctgacaagcacagccaccaaatccacagctaccagctttacacccatcccctccttcacccttgggaccaccgggaccctcccagaacagaccaccacacccatggccaccatgtccacaatccacccctcctccactccggagaccacccacacctccacagtgctgaccacgaaggccaccacgacaagggccaccagttccatgtccaccccctcctccactccggggacgacctggatcctcacagagctgaccacagcagccactacaactgcagccactggccccacggccaccccgtcctccaccccagggaccacctggatcctcacagagcccagcactacagccaccgtgacggtgcccaccggatccacggccaccgcctcctccacccgggcaactgctggcaccctcaaagtgctgaccagcacggccaccacacccacagtcatcagctccagagccactccctcctccagtccagggactgcaaccgcccttccagcactgagaagcacagccaccacacccacagctaccagcgttacagccatcccctcttcctccctgggcaccgcctggacccgcctatcacagaccaccacacccacggccaccatgtccacagccacaccctcctctactccagagactgtccacacctccacagtgcttaccaccacgaccaccacaaccagggccaccggctctgtggccaccccctcctccaccccaggaacagctcacactaccaaagtgccgactaccacaaccacgggcttcacagccaccccctcctccagcccagggacggcactcacgcctccagtgtggatcagcacaaccaccacacccacaaccagaggctccacggtgaccccctcctccatcccggggaccacccacaccgccacagtgctgaccaccaccaccacaactgtggccactggttctatggcaacaccctcctctagcacacagaccagtggtactcccccatcactgaccaccacggccactacgatcacagccaccggctccaccaccaacccctcctcaactccagggacaactcccatccccccagtgctgaccaccaccgccaccacacctgcagccaccagcagcacagtgactccctcctctgccctagggaccacccacacacccccagtgccgaacaccacggccaccacacacgggcggtccctgccccccagcagtccccacacggtgcgcacagcctggacttcggccacctcgggcatcttgggcaccacccacatcacagagccttccacggtgacttcccacaccccagcagcaaccaccagtaccacccagcactcgactccagccctgtccagccctcaccctagcagcaggaccaccgagtcacccccttctccagggacgaccaccccgggccacaccaggggcacctccaggaccacagccacagccacacccagcaagacccgcacctcgaccctgctgcccagcagccccacatcggcccccataaccacggtggtgaccacgggctgtgagccccagtgtgcctggtcagagtggctggactacagctaccccatgccggggccctctggcggggactttgacacctactccaacatccgtgcggccggaggggcagtctgtgagcagcccctgggcctcgagtgccgtgcccaggcccagcctggtgtccccctgcgggagttgggccaggtcgtggaatgcagcctggactttggcctggtctgcaggaaccgtgagcaggtggggaagttcaagatgtgcttcaactatgaaatccgtgtgttctgctgcaactacggccactgccccagcaccccggccaccagctctacggccacgccctcctcaactccggggacgacctggatcctcacaaagctgaccacaacagccactacgactgagtccactggatccacggccaccccgtcctccaccccagggaccacctggatcctcacagagccgagcactacagccaccgtgacggtgcccaccggatccacggccaccgcctcctccacccaggcaactgctggcaccccacatgtgagcaccacggccacgacacccacagtcaccagctccaaagccactcccttctccagtccagggactgcaaccgcccttccagcactgagaagcacagccaccacacccacagctaccagctttacagccatcccctcctcctccctgggcaccacctggacccgcctatcacagaccaccacacccacggccaccatgtccacagccacaccctcctccactccagagactgcccacacctccacagtgcttaccaccacggccaccacaaccagggccaccggctctgtggccaccccctcttccaccccaggaacagctcacactaccaaagtgccgactaccacaaccacgggcttcacagtcaccccctcctccagcccagggacggcacgcacgcctccagtgtggatcagcacaaccaccacacccacaaccagtggctccacggtgaccccctcctccgtcccggggaccacccacacccccacagtgctgaccaccaccaccacaactgtggccactggttctatggcaacaccctcctctagcacacagaccagtggtactcccccatcactgatcaccacggccactacgatcacggccaccggctccaccaccaacccctcctcaactccagggacaacacctatccccccagtgctgaccaccaccgccaccacacctgcagccaccagcagcacagtgactccctcctctgccctagggaccacccacacacccccagtgccgaacaccacggccaccacacacgggcgatccctgtcccccagcagtccccacacggtgcgcacagcctggacttcggccacctcaggcaccttgggcaccacccacatcacagagccttccacggggacttcccacaccccagcagcaaccaccggtaccacccagcactcgactccagccctgtccagccctcaccctagcagcaggaccaccgagtcacccccttccccagggacgaccaccccgggccacaccacggccacctccaggaccacggccacggccacacccagcaagacccgcacctcgaccctgctgcccagcagccccacatcggcccccataaccacggtggtgaccacgggctgtgagccccagtgtgcctggtcagagtggctggactacagctaccccatgccggggccctctggcggggactttgacacctactccaacatccgtgcggccggaggggccgtctgtgagcagcccctgggcctcgagtgccgtgcccaggcccagcctggtgtccccctgggggagttgggccaggtcgtggaatgcagcctggactttggcctggtctgcaggaaccgtgagcaggtggggaagttcaagatgtgcttcaactatgaaatccgtgtgttctgctgcaactacggccactgccccagcaccccggccaccagctctacggccatgccctcctccactccggggacgacctggatcctcacagagctgaccacaacagccactacgactgcatccactggatccacggccaccccgtcctccaccccgggaacagctccccctcccaaagtgctgaccagcccggccaccacacccacagccaccagttccaaagccacttcctcctccagtccaaggactgcaaccacccttccagtgctgacaagcacagccaccaaatccacagctaccagcgttacacccatcccctcctccacccttgggaccaccgggaccctcccagaacagaccaccacacccgtggccaccatgtccacaatccacccctcctccactccggagaccacccacacctccacagtgctgaccacgaaggccaccacgacaagggccaccagttccacgtccaccccctcctccactccggggacgacctggatcctcacagagctgaccacagcagccactacaactgcagccactggccccacggccaccccgtcctccaccccagggaccacctggatcctcacagagctgaccacaacagccactacgactgcgtccactggatccacggccaccccgtcctccaccccagggaccacctggatcctcacagagccgagcactacagccaccgtgacggtgcccaccggatccacggccaccgcctcctccacccaggcaactgctggcaccccacatgtgagcaccacggccacgacacccacagtcaccagctccaaagccactccctcctccagtccagggactgcaactgcccttccagcactgagaagcacagccaccacacccacagctaccagctttacagccatcccctcctcctccctgggcaccacctggacccgcctatcacagaccaccacacccacggccaccatgtccacagccacaccctcctccactccagagactgtccacacctccacagtgcttaccgccacggccaccacaaccggggccaccggctctgtggccaccccctcctccaccccaggaacagctcacactaccaaagtgccgactaccacaaccacgggcttcacagccaccccctcctccagcccagggacggcactcacgcctccagtgtggatcagcacaaccaccacacccacaaccaccacacccacaaccagtggctccacggtgaccccctcctccatcccggggaccacccacaccgccagagtgctgaccaccaccaccacaactgtggccactggttctatggcaacaccctcctctagcacacagaccagtggtactcccccatcactgaccaccacggccactacgatcacggccaccggctccaccaccaacccctcctcaactccagggacaacacccatcaccccagtgctgaccagcacggccaccacacccgcagccaccagctccaaagccacttcctcctccagtccaaggactgcaaccacccttccagtgctgacaagcacagccacaaaatccacagctaccagctttacacccatcccctcctccaccctgtggaccacgtggaccgtcccagcacagaccaccacacccatgtccaccatgtccacaatccacacctcctctactccagagaccacccacacctccacagtgctgaccaccacagccaccatgacaagggccaccaattccacggccacaccctcctccactctggggacgacccggatcctcactgagctgaccacaacagccactacaactgcagccactggatccacggccaccctgtcctccaccccagggaccacctggatcctcacagagccgagcactatagccaccgtgatggtgcccaccggttccacggccaccgcctcctccactctgggaacagctcacacccccaaagtggtgaccaccatggccactatgcccacagccactgcctccacggttcccagctcgtccaccgtggggaccacccgcacccctgcagtgctccccagcagcctgccaaccttcagcgtgtccactgtgtcctcctcagtcctcaccaccctgagacccactggcttccccagctcccacttctctactccctgcttctgcagggcatttggacagtttttctcgcccggggaagtcatctacaataagaccgaccgagccggctgccatttctacgcagtgtgcaatcagcactgtgacattgaccgcttccagggcgcctgtcccacctccccaccgccagtgtcctccgccccgctgtcctcgccctcccctgcccctggctgtgacaatgccatccctctccggcaggtgaatgagacctggaccctggagaactgcacggtggccaggtgcgtgggtgacaaccgtgtcgtcctgctggacccaaagcctgtggccaacgtcacctgcgtgaacaagcacctgcccatcaaagtgtcggacccgagccagccctgtgacttccactatgagtgcgagtgcatctgcagcatgtggggcggctcccactattccacctttgacggcacctcttacaccttccggggcaactgcacctatgtcctcatgagagagatccatgcacgctttgggaatctcagcctctacctggacaaccactactgcacggcctctgccactgccgctgccgcccgctgcccccgcgccctcagcatccactacaagtccatggatatcgtcctcactgtcaccatggtgcatgggaaggaggagggcctgatcctgtttgaccaaattccggtgagcagcggtttcagcaagaacggcgtgcttgtgtctgtgctggggaccaccaccatgcgtgtggacattcctgccctgggcgtgagcgtcaccttcaatggccaagtcttccaggcccggctgccctacagcctcttccacaacaacaccgagggccagtgcggcacctgcaccaacaaccagagggacgactgtctccagcgggacggaaccactgccgccagttgcaaggacatggccaagacgtggctggtccccgacagcagaaaggatggctgctgggccccgactggcacaccccccactgccagccccgcagccccggtgtctagcacacccacccccaccccatgcccaccacagccgctctgtgatctgatgctgagccaggtctttgctgagtgccacaaccttgtgcccccgggcccattcttcaacgcctgcatcagcgaccactgcaggggccgccttgaggtgccctgccagagcctggaggcttacgcagagctctgccgcgcccggggagtgtgcagtgactggcgaggtgcaaccggtggcctgtgcgacctcacctgcccacccaccaaagtgtacaagccatgcggccccatacagcctgccacctgcaactctaggaaccagagcccacagctggaggggatggcggagggctgcttctgccctgaggaccagatcctcttcaacgcacacatgggcatctgcgtgcaggcctgcccctgcgtgggacccgatgggtttcctaaatttcccggggagcggtgggtcagcaactgccagtcctgcgtgtgtgacgagggttcagtgtcggtgcagtgcaagcccctgccctgtgacgcccagggtcagcccccgccgtgcaaccgtcccggcttcgtaaccgtgaccaggccccgggccgagaacccctgctgccccgagacggtgtgcgtgtgcaacacaaccacctgcccccagagcctgcctgtgtgcccgccagggcaggagtccatctgcacccaggaggagggcgactgctgtcccaccttccgctgcagacctcagctgtgttcgtacaatggcaccttctacggggttggtgcaaccttcccaggcgcccttccctgccacatgtgtacctgcctctctggggacacccaggacccaacggtgcaatgtcaggaggatgcctgcaacaatactacctgtccccagggctttgagtacaagagagtggccgggcagtgctgtggggagtgcgtccagaccgcctgcctcacgcccgatggccagccagtccagctgaatgaaacctgggtcaacagccatgtggacaactgcaccgtgtacctctgtgaggctgagggtggagtccatttgctgaccccacagcctgcatcctgcccagatgtgtccagctgcagggggagcctcaggaaaaccggctgctgctactcctgtgaggaggactcctgtcaagtccgcatcaacacgaccatcctgtggcaccagggctgcgagaccgaggtcaacatcaccttctgcgagggctcctgccccggagcgtccaagtactcagcagaggcccaggccatgcagcaccagtgcacctgctgccaggagaggcgggtccacgaggagacggtgcccttgcactgtcctaacggctcagccatcctgcacacctacacccacgtggatgagtgtggctgcacgcccttctgtgtccctgcgcccatggctcccccacacacccgtggcttcccggcccaggaggccactgctgtctgagaacgttctgcctccatccccatgctctgtccacctggagccaggatgtgcattgtctgatcatgaaaaccttgggcctcctctgcggagccccccggcctgtgtgtggcaccccgcgctccgtgctcctgctgcccaccccgtgggtgaaaccggccccagaagggtgaggggccagcaggacccctttcgggagggcgccactcaggagtcctaccctgggagagcctgtggcccaccttggccttgcccctccctgatgtcactgggacgccctggaacaaactaagcatgtgcgggcctatgtgtccctgccacggccggagcgcccgcgcagcacggattccagctggccacgtccggccgctggggcagacaggctggtccaggcaaggccagctgctgccaggaagctgcgacaggcaaggcggccgcctgtccatgcctgctgcagggtaactcagggctgaggtcgcaacggccaggtcagagaggggtcagcatcccaaagccccctctgctcaacccagcccagttttgcaaataaaccctgagcattgagta

SEQ ID NO: 155775 - DNA, 8006 bp, Homo sapiens
  Payload ID: 10600
  Gene Symbol: MUC6
  Gene Name: mucin 6, oligomeric mucus/gel-forming
  Uniprot ID: Q6W4X9
  ENST ID: ENST00000421673
  CDS Start-End: 52-7371
ggcagcagcaggcctgccgggcccagcgcgagctcctctccactgtgcaccatggtccagcggtggctgctgctgtcctgctgcggagccctgctcagcgctggtctggctaacacctcctacaccagcccaggcctccagaggctgaaggactctccacagacagccccggacaaaggccagtgctccacgtggggggctggtcacttctccaccttcgaccaccacgtgtacgacttctcggggacgtgcaactacatcttcgcggccacctgcaaggacgccttccccaccttcagtgtccagctgcggcgaggcccagacgggagcatctcgcggatcatcgtggagctgggggcctccgtcgtcactgtgagcgaagccatcatctcagtcaaggacatcggggtcatcagcctgccctataccagcaatggactccagatcacacccttcggccagagcgtgcggctggtggccaagcagctggagctggagctggaagtcgtgtggggtcctgacagccacctcatggttctggtggagcggaagtacatgggtcagatgtgcgggctctgcgggaactttgacgggaaggtgaccaacgagtttgtcagtgaggagggcaagttcctggaaccccacaagtttgctgccctccagaagctggacgaccccggcgagatctgcaccttccaggacatccccagcacccacgtccggcaggcccagcacgcccggatctgcacccagctgctgaccctggtggcccctgagtgcagcgtgtccaaggagcccttcgtgctaagctgccaggcggacgtggccgcagccccccagccaggcccacagaacagcagttgtgccaccctgtcggagtactcccgccagtgcagcatggtgggccagccggtccgccgctggcggagccccggcctgtgctccgtgggtcagtgcccggccaaccaggtgtaccaggagtgcggctcggcctgcgtgaagacctgctccaacccgcagcacagctgctccagctcctgcaccttcgggtgcttctgcccggaaggtacggtcctgaatgacctctccaataaccacacctgcgtgcccgtcacccagtgcccctgtgtgctccacggcgccatgtatgcccccggggaggtcacaatagctgcctgccaaacctgccggtgcaccctgggccgctgggtgtgcacggagcggccgtgccccggacactgctccctggaaggtggctcctttgttaccacatttgacgccaggccctaccgcttccacggcacctgcacctacatcctcctccagagcccccagcttcccgaggacggtgccctcatggctgtgtacgacaagtccggcgtctcacactccgagacctccctggtggctgtggtctacctctccaggcaggacaaaattgtgatctctcaggacgaggtggtcaccaacaacggagaagccaagtggctgccatacaagactcgcaacatcacggtcttcaggcagacgtccacccacctccagatggccaccagcttcgggctggagctcgtggtccagctgcgccccatcttccaggcctatgtcactgttgggccccagttcagaggtcagaccagagggctctgcggcaacttcaacggggacacaacggatgacttcaccactagcatgggtatcgccgagggcaccgcctcgctgtttgtggactcctggcgggcggggaactgtccggccgctctggagcgtgagactgacccctgctccatgagccagctcaacaaggtgtgtgcagagacccactgctccatgctgctgaggacaggcacggtgttcgagaggtgccacgccacagtgaaccctgcacccttctacaagaggtgcgtgtaccaggcctgcaactacgaggagacctttccccacatctgtgccgccctgggcgactacgtacacgcctgctccttgcggggcgtcctgctctggggctggagaagcagtgtggacaactgcaccatcccctgcacgggtaacaccaccttcagctacaacagccaagcctgtgagcgcacctgcctgtcgctgtcggaccgtgccaccgagtgccaccacagcgccgtgcccgtggacggttgcaactgccccgatggcacctacctgaaccaaaagggcgagtgtgtgcgcaaggcccagtgcccgtgcatactggagggttacaagttcatcctggccgagcagtccactgtcatcaacggcatcacctgccactgcatcaacgggcggctgagttgcccgcagcggccacagatgttcctggcctcctgccaggcccctaagaccttcaagtcctgcagccagtcctccgagaacaagtttggggcagcctgtgcccccacatgccagatgctggccaccggtgttgcctgcgtgcccaccaagtgtgagcctggctgtgtctgcgccgagggcctctacgagaatgccgacgggcagtgtgtgccccccgaggagtgcccatgtgagttctcgggggtctcctaccctggaggagctgagctccacactgactgcaggacctgctcctgctcaagggggaggtgggcctgtcagcagggcacccactgcccatccacctgcaccctctacggggagggccacgtcatcaccttcgacggccagcgcttcgtattcgacggcaactgcgagtacatcctggccacggacgtctgtggtgtcaacgactcacagcccaccttcaagatcctgacagagaacgtcatctgtgggaactccggggtcacatgctcacgggccatcaagatcttcctggggggcctgtccgtggtgctggcggacagaaactacacggtcaccggggaggagccccacgtgcagctcggggtgacgccgggtgcgctgagccttgtcgtggacatcagcatccccgggaggtacaacctgacgctcatctggaacaggcacatgaccatcctcatcaggatcgcccgtgcctcccaggatcccctctgcggcttgtgtggcaacttcaacgggaacatgaaggacgacttcgagacgcgcagcaggtacgtggcatccagcgagctggagttggtgaactcgtggaaggagagcccgctgtgcggggacgtgagcttcgtgacagacccctgcagtctcaatgccttccggcgctcctgggccgagcgcaagtgcagcgtcatcaacagccagacctttgccacctgccacagcaaggtataccacctgccctactacgaggcctgcgtgcgcgacgcatgtgggtgtgacagtggcggggactgtgagtgtctgtgcgatgccgtggctgcctacgcccaagcctgtctggacaagggtgtgtgcgtggactggaggaccccggccttctgccccatctactgcggcttctacaacacgcacacgcaggacggccatggcgagtaccagtacacacaggaggccaactgcacgtggcactaccagccctgcctctgccccagccagccacagagcgtcccaggcagcaacatcgaaggctgctacaactgctcccaggatgagtacttcgaccacgaggagggggtgtgcgtgccctgcatgccgcccaccacgccgcagccacccaccacgccgcagctgcccaccacaggctcacggcccacgcaagtctggcccatgacgggaacctccaccaccatcgggcttctcagctccaccggaccctcacccagctctaatcacacccctgccagccccacccagacacccctccttccagccacgctcacatcctccaagcccacagcctcctcgggagaaccacctagaccaaccacggccgtcaccccacaagccacatcagggctgcctcccacagccacactgagatcgacagccacaaaacccacagtgacccaggccacaaccagggccacggcgtcgaccgccagcccagccacgacgtccacagctcagtccacaacacggaccacaatgacactaccaaccccagccacatcagggacaagccccacgctgccaaaatcgaccaatcaggaactgccaggaacaacggccacccagacgacaggcccacgtccaaccccagcaagcaccacaggcccaaccaccccacagccaggacaacccacgaggcccacagccacagagaccactcaaacaagaacgactactgaatacacaacgccccaaaccccacacaccacacactccccgcctacggcggggagtcccgtcccttccacaggtcctgtcactgcaacatctttccatgccaccactacctatccaaccccatcacaccctgagaccacacttcccactcacgttccacctttctccacctccttggtgactccaagtactcacacagtcatcacccctacccacgcacagatggccacatctgcctccaaccactcagcgccaacaggtaccattcctccaccaacaacgctcaaggccacagggtccacccacacagccccaccaataacgccgaccaccagtgggaccagccaagcccacagctcattcagcacaaacaaaacacctacctcgctacattcacacacttcctccacacaccatcctgaagtcaccccaacttctactaccacgattactcccaaccccactagtacacgcaccagaacccctgtggcccacaccaactcagccaccagcagcaggccaccaccacccttcaccacacactccccacctacagggagcagtcccttctcttccacaggtcccatgacggcaacatccttcaagaccaccactacctatccaaccccatcacaccctcagaccacacttcccactcacgttccacctttctccacctctttggtgactccaagtactcacacagtcatcacccctacccatgcacagatggccacttctgcctccatccactcaatgccaacaggcacgattcctccaccgacaacgctcaaggccacagggtccacccacacagcgccaacaatgacgctgaccaccagcgggaccagccaagccctgagctcattaaacacagccaaaacctctacatccctacattcacacacttcctccacacaccatgctgaagccacctcaacttctaccaccaacatcacccccaaccccaccagtacaggaaccccaccaatgacagtgaccaccagtgggaccagccaatcccgaagctcatttagcacggccaaaacctctacatccctacattcacacacttcctccacacaccatcctgaagtcacctcaacttctaccaccagcatcacccccaaccacaccagtacaggcaccagaacccctgtggcccacaccacgtcggccaccagcagcaggctacccacacccttcaccacacactccccacctacagggaccactcccatctcttccacaggtcctgtcactgcaacatccttccagaccaccactacctatccaaccccatcacaccctcacaccacacttcccactcacgttccatctttctccacctccttggtgactccaagtactcacacggtcatcatccctacccacacacagatggccacttctgcctccatccactcaatgccaacaggcaccattcctccaccgaccacgatcaaggccacagggtccacccacacagccccaccaatgacaccgaccaccagtgggaccagccaatccccaagctcatttagcacggccaaaacttctacatccctaccttaccacacttcctcaacacaccatcctgaagtcaccccaacttctaccaccaacatcacccccaaacacaccagtacaggcaccagaacccctgtggcccacaccacctcggccagcagcagcaggctacccacacccttcaccacacactccccacctacagggagcagtcccttctcttccacaggtcctatgactgcaacatccttccagaccaccactacctatccaaccccatcacaccctcagaccacacttcccactcacgttccacctttctccacctccttggtgactccaagtactcacacagtcatcatcactacccacacacagatggccacttctgcctccatccactcaacgccaacaggcaccgttcctccaccaacaacgctcaaggccacagggtccacccacacagccccaccaatgacagtgaccaccagtgggaccagccaaacccacagctcattcagcacagctacagcctcttcttccttcatatcctcctcgtcttggctgcctcagaactctagctcaaggccaccgtcatcacctatcaccacacaactcccccacttgagttctgcaaccactcctgtttccacaactaatcagctgtcctcctcattttctcccagtccttctgccccctctactgtttcttcttatgtgccctcctcccactcctctccccagacttcatcgccttctgttggcacatcttcctctttcgtgtccgcccccgtgcactccacaaccctgagctcggggtcacactcctcattgtccactcatcccacgactgcatcagtgtctgcatctcctctttttccttcttctccagctgcctctactaccattagggccactctcccccacactatctcctctcctttcaccctctctgctctactccccatatccactgttaccgtgtctcccaccccatccagccacctagcctccagcaccattgcatttccgtccacgcccaggaccacggccagcacccacaccgcccctgccttctcctctcagtccaccacctcgcggtccacttctctcaccacccgagttcccacatcaggctttgtgtcactcacctcgggggtgacgggtatccccacctctccagtcaccaaccttaccaccaggcaccctggtcccaccttgtcgcctaccacacggttcctgaccagctccctcactgcccatggaagcacccctgcttctgccccggtatcttctctcgggacacctacgcccacctcacccggggtctgcagtgtgcgggagcagcaggaggagatcacgttcaaggggtgcatggcgaacgtgacggtaacccgctgtgagggcgcctgcatttccgctgccagcttcaacatcatcacccagcaggtggatgcccgctgcagctgctgccgccccctccactcctatgagcagcagctggagctgccctgccccgatcccagcacgcctggccggcggctcgtactcaccctgcaggtgttcagccactgcgtgtgcagctctgtggcctgtggagactagcagggtcgctgcctgctctcctggggctgaaggactgcagatgacagacaggaaaacacccaccagcccccttcccgcttgtgccagcagctgctttcctggtcaccaggcctggcccccaagtgccctgggccgtggctccctggggcaccggttggagaggggctgccaagcaggggctcagactaccacactcctgcagaccctgagccagcagagagggactgaggcggacagtggtcacggacctcccaggcacacagggcactcccgaccacccctgcccaccgtccaacacctcccagcccctgaacttggccccagccctgctgggcccagaaccctgcagatgaagccacagagcaggcgctcgaccagacccatcaggggcgaggagggcacggaaacctgtgccgagatgggggcaagaggcccaggcagccaccagcacagagaagaggagatccccagagtcagggagggcagagggtggcagcgagggcagggcagccgcccccgctcccagccaggcagaaggcccccaccagcaccacacccatccccagcagcctgtccttgggagagggcgtcacccggtcagagactccaaataaaccggttcttgtcaaggcaca

SEQ ID NO: 155776 - DNA, 656 bp, Homo sapiens
  Payload ID: 10600
  Gene Symbol: MUC6
  Gene Name: mucin 6, oligomeric mucus/gel-forming
  ENST ID: ENST00000532016
  CDS Start-End: 1-656
ctcctctcctttcaccctctctgctctactccccatatccactgttaccgtgtctcccaccccatccagccacctagcctccagcaccattgcatttccgtccacgcccaggaccacggccagcacccacaccgcccctgccttctcctctcagtccaccacctcgcggtccacttctctcaccacccgagttcccacatcaggctttgtgtcactcacctcgggggtgacgggtatccccacctctccagtcaccaaccttaccaccaggcaccctggtcccaccttgtcgcctaccacacggttcctgaccagctccctcactgcccatggaagcacccctgcttctgccccggtatcttctctcgggacacctacgcccacctcacccggtgagtccacaggtgggaggcctgccccacgtccaccaaggtgctcacaaccccaccccagagaggttcgggcaccccacccaggcgcctgctgccccatcagcttcaacatcatcacccagcaggtggatgcccgctgcagctgctgccgccccctccactcctatgagcagcagctggagctgccctgccccgatcccagcacgcctggccggcggctcgtactcaccctgcaggtgttcagccactgcgtgtgcagctctg

SEQ ID NO: 155777 - DNA, 553 bp, Homo sapiens
  Payload ID: 10600
  Gene Symbol: MUC6
  Gene Name: mucin 6, oligomeric mucus/gel-forming
  ENST ID: ENST00000525923
  CDS Start-End: 11-553
cccacgggccatggacacttctcgcacgccgagtgtgtgcagggaaacgggcggagcagccctgagcagaggtgagcggcgccctcagggacgacggggtagccccacaccgactgcgggtcccgtccacacaggtctggctaacacctcctacaccagcccaggcctccagaggctgaaggactctccacagacagccccggacaaaggccagtgctccacgtggggggctggtcacttctccaccttcgaccaccacgtgtacgacttctcggggacgtgcaactacatcttcgcggccacctgcaaggacgccttccccaccttcagtgtccagctgcggcgaggcccagacgggagcatctcgcggatcatcgtggagctgggggcctccgtcgtcactgtgagcgaagccatcatctcagtcaaggacatcggggtcatcagcctgccctataccagcaatggactccagatcacacccttcggccagagcgtgcggctggtggccaagcagctggagctggagctggaagtcgtgtggggtcctgac

SEQ ID NO: 155778 - DNA, 404 bp, Homo sapiens
  Payload ID: 10600
  Gene Symbol: MUC6
  Gene Name: mucin 6, oligomeric mucus/gel-forming
  ENST ID: ENST00000527242
  CDS Start-End: 1-347
tgccgcccaccacgccgcagccacccaccacgccgcagctgcccaccacaggctcacggcccacgcaagtctggcccatgacgggaacctccaccaccatcgggcttctcagctccaccggaccctcacccagctctaatcacacccctgccagccccacccagacacccctccttccagccacgctcacatcctccaagcccacagcctcctcgggaggtaaggagcctccagctgagcccatggagagggcagctgcaggaggtcctaggtacacctctggggtgggcttagggatggccctgcttcctggctcacatctgccactaagcagattcccagcgtagaacttcctatgcttgggagccaaactggggatttttcggaaaaacttttaaagacaa

SEQ ID NO: 155779 - DNA, 8003 bp, Homo sapiens
  Payload ID: 10600
  Gene Symbol: MUC6
  Gene Name: mucin 6, oligomeric mucus/gel-forming
  ENST ID: ENST00000619759
  CDS Start-End: 52-7371
ggcagcagcaggcctgccgggcccagcgcgagctcctctccactgtgcaccatggtccagcggtggctgctgctgtcctgctgcggagccctgctcagcgctggtctggctaacacctcctacaccagcccaggcctccagaggctgaaggactctccacagacagccccggacaaaggccagtgctccacgtggggggctggtcacttctccaccttcgaccaccacgtgtacgacttctcggggacgtgcaactacatcttcgcggccacctgcaaggacgccttccccaccttcagtgtccagctgcggcgaggcccagacgggagcatctcgcggatcatcgtggagctgggggcctccgtcgtcactgtgagcgaagccatcatctcagtcaaggacatcggggtcatcagcctgccctataccagcaatggactccagatcacacccttcggccagagcgtgcggctggtggccaagcagctggagctggagctggaagtcgtgtggggtcctgacagccacctcatggttctggtggagcggaagtacatgggtcagatgtgcgggctctgcgggaactttgacgggaaggtgaccaacgagtttgtcagtgaggagggcaagttcctggaaccccacaagtttgctgccctccagaagctggacgaccccggcgagatctgcaccttccaggacatccccagcacccacgtccggcaggcccagcacgcccggatctgcacccagctgctgaccctggtggcccctgagtgcagcgtgtccaaggagcccttcgtgctaagctgccaggcggacgtggccgcagccccccagccaggcccacagaacagcagttgtgccaccctgtcggagtactcccgccagtgcagcatggtgggccagccggtccgccgctggcggagccccggcctgtgctccgtgggtcagtgcccggccaaccaggtgtaccaggagtgcggctcggcctgcgtgaagacctgctccaacccgcagcacagctgctccagctcctgcaccttcgggtgcttctgcccggaaggtacggtcctgaatgacctctccaataaccacacctgcgtgcccgtcacccagtgcccctgtgtgctccacggcgccatgtatgcccccggggaggtcacaatagctgcctgccaaacctgccggtgcaccctgggccgctgggtgtgcacggagcggccgtgccccggacactgctccctggaaggtggctcctttgttaccacatttgacgccaggccctaccgcttccacggcacctgcacctacatcctcctccagagcccccagcttcccgaggacggtgccctcatggctgtgtacgacaagtccggcgtctcacactccgagacctccctggtggctgtggtctacctctccaggcaggacaaaattgtgatctctcaggacgaggtggtcaccaacaacggagaagccaagtggctgccatacaagactcgcaacatcacggtcttcaggcagacgtccacccacctccagatggccaccagcttcgggctggagctcgtggtccagctgcgccccatcttccaggcctatgtcactgttgggccccagttcagaggtcagaccagagggctctgcggcaacttcaacggggacacaacggatgacttcaccactagcatgggtatcgccgagggcaccgcctcgctgtttgtggactcctggcgggcggggaactgtccggccgctctggagcgtgagactgacccctgctccatgagccagctcaacaaggtgtgtgcagagacccactgctccatgctgctgaggacaggcacggtgttcgagaggtgccacgccacagtgaaccctgcacccttctacaagaggtgcgtgtaccaggcctgcaactacgaggagacctttccccacatctgtgccgccctgggcgactacgtacacgcctgctccttgcggggcgtcctgctctggggctggagaagcagtgtggacaactgcaccatcccctgcacgggtaacaccaccttcagctacaacagccaagcctgtgagcgcacctgcctgtcgctgtcggaccgtgccaccgagtgccaccacagcgccgtgcccgtggacggttgcaactgccccgatggcacctacctgaaccaaaagggcgagtgtgtgcgcaaggcccagtgcccgtgcatactggagggttacaagttcatcctggccgagcagtccactgtcatcaacggcatcacctgccactgcatcaacgggcggctgagttgcccgcagcggccacagatgttcctggcctcctgccaggcccctaagaccttcaagtcctgcagccagtcctccgagaacaagtttggggcagcctgtgcccccacatgccagatgctggccaccggtgttgcctgcgtgcccaccaagtgtgagcctggctgtgtctgcgccgagggcctctacgagaatgccgacgggcagtgtgtgccccccgaggagtgcccatgtgagttctcgggggtctcctaccctggaggagctgagctccacactgactgcaggacctgctcctgctcaagggggaggtgggcctgtcagcagggcacccactgcccatccacctgcaccctctacggggagggccacgtcatcaccttcgacggccagcgcttcgtattcgacggcaactgcgagtacatcctggccacggacgtctgtggtgtcaacgactcacagcccaccttcaagatcctgacagagaacgtcatctgtgggaactccggggtcacatgctcacgggccatcaagatcttcctggggggcctgtccgtggtgctggcggacagaaactacacggtcaccggggaggagccccacgtgcagctcggggtgacgccgggtgcgctgagccttgtcgtggacatcagcatccccgggaggtacaacctgacgctcatctggaacaggcacatgaccatcctcatcaggatcgcccgtgcctcccaggatcccctctgcggcttgtgtggcaacttcaacgggaacatgaaggacgacttcgagacgcgcagcaggtacgtggcatccagcgagctggagttggtgaactcgtggaaggagagcccgctgtgcggggacgtgagcttcgtgacagacccctgcagtctcaatgccttccggcgctcctgggccgagcgcaagtgcagcgtcatcaacagccagacctttgccacctgccacagcaaggtataccacctgccctactacgaggcctgcgtgcgcgacgcatgtgggtgtgacagtggcggggactgtgagtgtctgtgcgatgccgtggctgcctacgcccaagcctgtctggacaagggtgtgtgcgtggactggaggaccccggccttctgccccatctactgcggcttctacaacacgcacacgcaggacggccatggcgagtaccagtacacacaggaggccaactgcacgtggcactaccagccctgcctctgccccagccagccacagagcgtcccaggcagcaacatcgaaggctgctacaactgctcccaggatgagtacttcgaccacgaggagggggtgtgcgtgccctgcatgccgcccaccacgccgcagccacccaccacgccgcagctgcccaccacaggctcacggcccacgcaagtctggcccatgacgggaacctccaccaccatcgggcttctcagctccaccggaccctcacccagctctaatcacacccctgccagccccacccagacacccctccttccagccacgctcacatcctccaagcccacagcctcctcgggagaaccacctagaccaaccacggccgtcaccccacaagccacatcagggctgcctcccacagccacactgagatcgacagccacaaaacccacagtgacccaggccacaaccagggccacggcatcgaccgccagcccagccacgacgtccacagctcagtccacaacacggaccacaatgacactaccaaccccagccacatcagggacaagccccacgctgccaaaatcgaccaatcaggaactgccaggaacaacggccacccagacgacaggcccacgtccaaccccagcaagcaccacaggcccaaccaccccacagccaggacaacccacgaggcccacagccacagagaccactcaaacaagaacgactactgaatacacaacgccccaaaccccacacaccacacactccccgcctacggcggggagtcccgtcccttccacaggtcctgtcactgcaacatctttccatgccaccactacctatccaaccccatcacaccctgagaccacacttcccactcacgttccacctttctccacctccttggtgactccaagtactcacacagtcatcacccctacccacgcacagatggccacatctgcctccaaccactcagcgccaacaggtaccattcctccaccaacaacgctcaaggccacagggtccacccacacagccccaccaataacgccgaccaccagtgggaccagccaagcccacagctcattcagcacaaacaaaacacctacctcgctacattcacacacttcctccacacaccatcctgaagtcaccccaacttctactaccacgattactcccaaccccactagtacacgcaccagaacccctgtggcccacaccaactcagccaccagcagcaggccaccaccacccttcaccacacactccccacctacagggagcagtcccttctcttccacaggtcccatgacggcaacatccttcaagaccaccactacctatccaaccccatcacaccctcagaccacacttcccactcacgttccacctttctccacctccttggtgactccaagtactcacacagtcatcacccctacccatgcacagatggccacttctgcctccatccactcaatgccaacaggcacgattcctccaccgacaacgctcaaggccacagggtccacccacacagcgccaacaatgacgccgaccaccagtgggaccagccaagccctgagctcattaaacacagccaaaacctctacatccctacattcacacacttcctccacacaccatgctgaagccacctcaacttctaccaccaacatcacccccaaccccaccagtacaggaaccccaccaatgacagtgaccaccagtgggaccagccaatcccgaagctcatttagcacggccaaaacctctacatccctacattcacacacttcctccacacaccatcctgaagtcacctcaacttctaccaccagcatcacccccaaccacaccagtacaggcaccagaacccctgtggcccacaccacgtcggccaccagcagcaggctacccacacccttcaccacacactccccacctacagggaccactcccatctcttccacaggtcctgtcactgcaacatccttccagaccaccactacctatccaaccccatcacaccctcacaccacacttcccactcacgttccatctttctccacctccttggtgactccaagtactcacacggtcatcatccctacccacacacagatggccacttctgcctccatccactcaatgccaacaggcaccattcctccaccgaccacgatcaaggccacagggtccacccacacagccccaccaatgacaccgaccaccagtgggaccagccaatccccaagctcatttagcacggccaaaacttctacatccctaccttaccacacttcctcaacacaccatcctgaagtcaccccaacttctaccaccaacatcacccccaaacacaccagtacaggcaccagaacccctgtggcccacaccacctcggccagcagcagcaggctacccacacccttcaccacacactccccacctacagggagcagtcccttctcttccacaggtcctatgactgcaacatccttccagaccaccactacctatccaaccccatcacaccctcagaccacacttcccactcacgttccacctttctccacctccttggtgactccaagtactcacacagtcatcatcactacccacacacagatggccacttctgcctccatccactcaacgccaacaggcaccgttcctccaccaacaacgctcaaggccacagggtccacccacacagccccaccaatgacagtgaccaccagtgggaccagccaaacccacagctcattcagcacagctacagcctcttcttccttcatatcctcctcgtcttggctgcctcagaactctagctcaaggccaccgtcatcacctatcaccacacaactcccccacttgagttctgcaaccactcctgtttccacaactaatcagctgtcctcctcattttctcccagtccttctgccccctctactgtttcttcttatgtgccctcctcccactcctctccccagacttcatcgccttctgttggcacatcttcctctttcgtgtccgcccccgtgcactccacaaccctgagctcggggtcacactcctcattgtccactcatcccacgactgcatcagtgtctgcatctcctctttttccttcttctccagctgcctctactaccattagggccactctcccccacactatctcctctcctttcaccctctctgctctactccccatatccactgttaccgtgtctcccaccccatccagccacctagcctccagcaccattgcatttccgtccacgcccaggaccacggccagcacccacaccgcccctgccttctcctctcagtccaccacctcgcggtccacttctctcaccacccgagttcccacatcaggctttgtgtcactcacctcgggggtgacgggtatccccacctctccagtcaccaaccttaccaccaggcaccctggtcccaccttgtcgcctaccacacggttcctgaccagctccctcactgcccatggaagcacccctgcttctgccccggtatcttctctcgggacacctacgcccacctcacccggggtctgcagtgtgcgggagcagcaggaggagatcacgttcaaggggtgcatggcgaacgtgacggtaacccgctgtgagggcgcctgcatttccgctgccagcttcaacatcatcacccagcaggtggatgcccgctgcagctgctgccgccccctccactcctatgagcagcagctggagctgccctgccccgatcccagcacgcctggccggcggctcgtactcaccctgcaggtgttcagccactgcgtgtgcagctctgtggcctgtggagactagcagggtcgctgcctgctctcctggggctgaaggactgcagatgacagacaggaaaacacccaccagcccccttcccgcttgtgccagcagctgctttcctggtcaccaggcctggcccccaagtgccctgggccgtggctccctggggcaccggttggagaggggctgccaagcaggggctcagactaccacactcctgcagaccctgagccagcagagagggactgaggcggacagtggtcacggacctcccaggcacacagggcactcccgaccacccctgcccaccgtccaacacctcccagcccctgaacttggccccagccctgctgggcccagaaccctgcagatgaagccacagagcaggcgctcgaccagacccatcaggggcgaggagggcacggaaacctgtgccgagatgggggcaagaggcccaggcagccaccagcacagagaagaggagatccccagagtcagggagggcagagggtggcagcgagggcagggcagccgcccccgctcccagccaggcagaaggcccccaccagcaccacacccatccccagcagcctgtccttgggagagggcgtcacccggtcagagactccaaataaaccggttcttgtcaaggc

SEQ ID NO: 155780 - DNA, 8003 bp, Homo sapiens
  Payload ID: 10600
  Gene Symbol: MUC6
  Gene Name: mucin 6, oligomeric mucus/gel-forming
  ENST ID: ENST00000621433
  CDS Start-End: 52-7371
ggcagcagcaggcctgccgggcccagcgcgagctcctctccactgtgcaccatggtccagcggtggctgctgctgtcctgctgcggagccctgctcagcgctggtctggctaacacctcctacaccagcccaggcctccagaggctgaaggactctccacagacagccccggacaaaggccagtgctccacgtggggggctggtcacttctccaccttcgaccaccacgtgtacgacttctcggggacgtgcaactacatcttcgcggccacctgcaaggacgccttccccaccttcagtgtccagctgcggcgaggcccagacgggagcatctcgcggatcatcgtggagctgggggcctccgtcgtcactgtgagcgaagccatcatctcagtcaaggacatcggggtcatcagcctgccctataccagcaatggactccagatcacacccttcggccagagcgtgcggctggtggccaagcagctggagctggagctggaagtcgtgtggggtcctgacagccacctcatggttctggtggagcggaagtacatgggtcagatgtgcgggctctgcgggaactttgacgggaaggtgaccaacgagtttgtcagtgaggagggcaagttcctggaaccccacaagtttgctgccctccagaagctggacgaccccggcgagatctgcaccttccaggacatccccagcacccacgtccggcaggcccagcacgcccggatctgcacccagctgctgaccctggtggcccctgagtgcagcgtgtccaaggagcccttcgtgctaagctgccaggcggacgtggccgcagccccccagccaggcccacagaacagcagttgtgccaccctgtcggagtactcccgccagtgcagcatggtgggccagccggtccgccgctggcggagccccggcctgtgctccgtgggtcagtgcccggccaaccaggtgtaccaggagtgcggctcggcctgcgtgaagacctgctccaacccgcagcacagctgctccagctcctgcaccttcgggtgcttctgcccggaaggtacggtcctgaatgacctctccaataaccacacctgcgtgcccgtcacccagtgcccctgtgtgctccacggcgccatgtatgcccccggggaggtcacaatagctgcctgccaaacctgccggtgcaccctgggccgctgggtgtgcacggagcggccgtgccccggacactgctccctggaaggtggctcctttgttaccacatttgacgccaggccctaccgcttccacggcacctgcacctacatcctcctccagagcccccagcttcccgaggacggtgccctcatggctgtgtacgacaagtccggcgtctcacactccgagacctccctggtggctgtggtctacctctccaggcaggacaaaattgtgatctctcaggacgaggtggtcaccaacaacggagaagccaagtggctgccatacaagactcgcaacatcacggtcttcaggcagacgtccacccacctccagatggccaccagcttcgggctggagctcgtggtccagctgcgccccatcttccaggcctatgtcactgttgggccccagttcagaggtcagaccagagggctctgcggcaacttcaacggggacacaacggatgacttcaccactagcatgggtatcgccgagggcaccgcctcgctgtttgtggactcctggcgggcggggaactgtccggccgctctggagcgtgagactgacccctgctccatgagccagctcaacaaggtgtgtgcagagacccactgctccatgctgctgaggacaggcacggtgttcgagaggtgccacgccacagtgaaccctgcacccttctacaagaggtgcatgtaccaggcctgcaactacgaggagacctttccccacatctgtgccgccctgggcgactacgtacacgcctgctccttgcggggcgtcctgctctggggctggagaagcagtgtggacaactgcaccatcccctgcacgggtaacaccaccttcagctacaacagccaagcctgtgagcgcacctgcctgtcgctgtcggaccgtgccaccgagtgccaccacagcgccgtgcccgtggacggttgcaactgccccgatggcacctacctgaaccaaaagggcgagtgtgtgcgcaaggcccagtgcccgtgcatactggagggttacaagttcatcctggccgagcagtccactgtcatcaacggcatcacctgccactgcatcaacgggcggctgagttgcccgcagcggccacagatgttcctggcctcctgccaggcccctaagaccttcaagtcctgcagccagtcctccgagaacaagtttggggcagcctgtgcccccacatgccagatgctggccaccggtgttgcctgcgtgcccaccaagtgtgagcctggctgtgtctgcgccgagggcctctacgagaatgccgacgggcagtgtgtgccccccgaggagtgcccatgtgagttctcgggggtctcctaccctggaggagctgagctccacactgactgcaggacctgctcctgctcaagggggaggtgggcctgtcagcagggcacccactgcccatccacctgcaccctctacggggagggccacgtcatcaccttcgacggccagcgcttcgtattcgacggcaactgcgagtacatcctggccacggacgtctgtggtgtcaacgactcacagcccaccttcaagatcctgacagagaacgtcatctgtgggaactccggggtcacatgctcacgggccatcaagatcttcctggggggcctgtccgtggtgctggcggacagaaactacacggtcaccggggaggagccccacgtgcagctcggggtgacgccgggtgcgctgagccttgtcgtggacatcagcatccccgggaggtacaacctgacgctcatctggaacaggcacatgaccatcctcatcaggatcgcccgtgcctcccaggatcccctctgcggcttgtgtggcaacttcaacgggaacatgaaggacgacttcgagacgcgcagcaggtacgtggcatccagcgagctggagttggtgaactcgtggaaggagagcccgctgtgcggggacgtgagcttcgtgacagacccctgcagtctcaatgccttccggcgctcctgggccgagcgcaagtgcagcgtcatcaacagccagacctttgccacctgccacagcaaggtataccacctgccctactacgaggcctgcgtgcgcgacgcatgtgggtgtgacagtggcggggactgtgagtgtctgtgcgatgccgtggctgcctacgcccaagcctgtctggacaagggtgtgtgcgtggactggaggaccccggccttctgccccatctactgcggcttctacaacacgcacacgcaggacggccatggcgagtaccagtacacacaggaggccaactgcacgtggcactaccagccctgcctctgccccagccagccacagagcgtcccaggcagcaacatcgaaggctgctacaactgctcccaggatgagtacttcgaccacgaggagggggtgtgcgtgccctgcatgccgcccaccacgccgcagccacccaccacgccgcagctgcccaccacaggctcacggcccacgcaagtctggcccatgacgggaacctccaccaccatcgggcttctcagctccaccggaccctcacccagctctaatcacacccctgccagccccacccagacacccctccttccagccacgctcacatcctccaagcccacagcctcctcgggagaaccacctagaccaaccacggccgtcaccccacaagccacatcagggctgcctcccacagccacactgagatcgacagccacaaaacccacagtgacccaggccacaaccagggccacggcatcgaccgccagcccagccacgacgtccacagctcagtccacaacacggaccacaatgacactaccaaccccagccacatcagggacaagccccacgctgccaaaatcgaccaatcaggaactgccaggaacaacggccacccagacgacaggcccacgtccaaccccagcaagcaccacaggcccaaccaccccacagccaggacaacccacgaggcccacagccacagagaccactcaaacaagaacgactactgaatacacaacgccccaaaccccacacaccacacactccccgcctacggcggggagtcccgtcccttccacaggtcctgtcactgcaacatctttccatgccaccactacctatccaaccccatcacaccctgagaccacacttcccactcacgttccacctttctccacctccttggtgactccaagtactcacacagtcatcacccctacccacgcacagatggccacatctgcctccatccactcagcgccaacaggtaccattcctccaccaacaacgctcaaggccacagggtccacccacacagccccaccaataacgccgaccaccagtgggaccagccaagcccacagctcattcagcacaaacaaaacacctacctcgctacattcacacacttcctccacacaccatcctgaagtcaccccaacttctactaccacgattactcccaaccccactagtacacgcaccagaacccctgtggcccacaccaactcagccaccagcagcaggccaccaccacccttcaccacacactccccacctacagggagcagtcccttctcttccacaggtcccatgacggcaacatccttcaagaccaccactacctatccaaccccatcacaccctcagaccacacttcccactcacgttccacctttctccacctctttggtgactccaagtactcacacagtcatcacccctacccatgcacagatggccacttctgcctccatccactcaatgccaacaggcacgattcctccaccgacaacgctcaaggccacagggtccacccacacagcgccaacaatgacgctgaccaccagcgggaccagccaagccctgagctcattaaacacagccaaaacctctacatccctacattcacacacttcctccacacaccatgctgaagccacctcaacttctaccaccaacatcacccccaaccccaccagtacaggaaccccaccaatgacagtgaccaccagtgggaccagccaatcccgaagctcatttagcacggccaaaacctctacatccctacattcacacacttcctccacacaccatcctgaagtcacctcaacttctaccaccagcatcacccccaaccacaccagtacaggcaccagaacccctgtggcccacaccacgtcggccaccagcagcaggctacccacacccttcaccacacactccccacctacagggaccactcccatctcttccacaggtcctgtcactgcaacatccttccagaccaccactacctatccaaccccatcacaccctcacaccacacttcccactcacgttccatctttctccacctccttggtgactccaagtactcacacggtcatcatccctacccacacacagatggccacttctgcctccatccactcaatgccaacaggcaccattcctccaccgaccacgatcaaggccacagggtccacccacacagccccaccaatgacaccgaccaccagtgggaccagccaatccccaagctcatttagcacggccaaaacttctacatccctaccttaccacacttcctcaacacaccatcctgaagtcaccccaacttctaccaccaacatcacccccaaacacaccagtacaggcaccagaacccctgtggcccacaccacctcggccagcagcagcaggctacccacacccttcaccacacactccccacctacagggagcagtcccttctcttccacaggtcctatgactgcaacatccttccagaccaccactacctatccaaccccatcacaccctcagaccacacttcccactcacgttccacctttctccacctccttggtgactccaagtactcacacagtcatcatcactacccacacacagatggccacttctgcctccatccactcaacgccaacaggcaccgttcctccaccaacaacgctcaaggccacagggtccacccacacagccccaccaatgacagtgaccaccagtgggaccagccaaacccacagctcattcagcacagctacagcctcttcttccttcatatcctcctcgtcttggctgcctcagaactctagctcaaggccaccgtcatcacctatcaccacacaactcccccacttgagttctgcaaccactcctgtttccacaactaatcagctgtcctcctcattttctcccagtccttctgccccctctactgtttcttcttatgtgccctcctcccactcctctccccagacttcatcgccttctgttggcacatcttcctctttcgtgtccgcccccgtgcactccacaaccctgagctcggggtcacactcctcattgtccactcatcccacgactgcatcagtgtctgcatctcctctttttccttcttctccagctgcctctactaccattagggccactctcccccacactatctcctctcctttcaccctctctgctctactccccatatccactgttaccgtgtctcccaccccatccagccacctagcctccagcaccattgcatttccgtccacgcccaggaccacggccagcacccacaccgcccctgccttctcctctcagtccaccacctcgcggtccacttctctcaccacccgagttcccacatcaggctttgtgtcactcacctcgggggtgacgggtatccccacctctccagtcaccaaccttaccaccaggcaccctggtcccaccttgtcgcctaccacacggttcctgaccagctccctcactgcccatggaagcacccctgcttctgccccggtatcttctctcgggacacctacgcccacctcacccggggtctgcagtgtgcgggagcagcaggaggagatcacgttcaaggggtgcatggcgaacgtgacggtaacccgctgtgagggcgcctgcatttccgctgccagcttcaacatcatcacccagcaggtggatgcccgctgcagctgctgccgccccctccactcctatgagcagcagctggagctgccctgccccgatcccagcacgcctggccggcggctcgtactcaccctgcaggtgttcagccactgcgtgtgcagctctgtggcctgtggagactagcagggtcgctgcctgctctcctggggctgaaggactgcagatgacagacaggaaaacacccaccagcccccttcccgcttgtgccagcagctgctttcctggtcaccaggcctggcccccaagtgccctgggccgtggctccctggggcaccggttggagaggggctgccaagcaggggctcagactaccacactcctgcagaccctgagccagcagagagggactgaggcggacagtggtcacggacctcccaggcacacagggcactcccgaccacccctgcccactgtccaacacctcccagcccctgaacttggccccagccctgctgggcccagaaccctgcagatgaagccacagagcaggcgctcgaccagacccatcaggggcgaggagggcacggaaacctgtgccgagatgggggcaagaggcccaggcagccaccagcacagagaagaggagatccccagagtcagggagggcagagggtggcagcgagggcagggcagccgcccccgctcccagccaggcagaaggcccccaccagcaccacacccatccccagcagcctgtccttgggagagggcgtcacccggtcagagactccaaataaaccggttcttgtcaaggc

SEQ ID NO: 155781 - DNA, 12809 bp, Homo sapiens
  Payload ID: 10600
  Gene Symbol: MUC6
  Gene Name: mucin 6, oligomeric mucus/gel-forming
  ENST ID: ENST00000627926
  CDS Start-End: 52-12174
ggcagcagcaggcctgccgggcccagcgcgagctcctctccactgtgcaccatggtccagcggtggctgctgctgtcctgctgcggagccctgctcagcgctggtctggctaacacctcctacaccagcccaggcctccagaggctgaaggactctccacagacagccccggacaaaggccagtgctccacgtggggggctggtcacttctccaccttcgaccaccacgtgtacgacttctcggggacgtgcaactacatcttcgcggccacctgcaaggacgccttccccaccttcagtgtccagctgcggcgaggcccagacgggagcatctcgcggatcatcgtggagctgggggcctccgtcgtcactgtgagcgaagccatcatctcagtcaaggacatcggggtcatcagcctgccctataccagcaatggactccagatcacacccttcggccagagcgtgcggctggtggccaagcagctggagctggagctggaagtcgtgtggggtcctgacagccacctcatggttctggtggagcggaagtacatgggtcagatgtgcgggctctgcgggaactttgacgggaaggtgaccaacgagtttgtcagtgaggagggcaagttcctggaaccccacaagtttgctgccctccagaagctggacgaccccggcgagatctgcaccttccaggacatccccagcacccacgtccggcaggcccagcacgcccggatctgcacccagctgctgaccctggtggcccctgagtgcagcgtgtccaaggagcccttcgtgctaagctgccaggcggacgtggccgcagccccccagccaggcccacagaacagcagttgtgccaccctgtcggagtactcccgccagtgcagcatggtgggccagccggtccgccgctggcggagccccggcctgtgctccgtgggtcagtgcccggccaaccaggtgtaccaggagtgcggctcggcctgcgtgaagacctgctccaacccgcagcacagctgctccagctcctgcaccttcgggtgcttctgcccggaaggtacggtcctgaatgacctctccaataaccacacctgcgtgcccgtcacccagtgcccctgtgtgctccacggcgccatgtatgcccccggggaggtcacaatagctgcctgccaaacctgccggtgcaccctgggccgctgggtgtgcacggagcggccgtgccccggacactgctccctggaaggtggctcctttgttaccacatttgacgccaggccctaccgcttccacggcacctgcacctacatcctcctccagagcccccagcttcccgaggacggtgccctcatggctgtgtacgacaagtccggcgtctcacactccgagacctccctggtggctgtggtctacctctccaggcaggacaaaattgtgatctctcaggacgaggtggtcaccaacaacggagaagccaagtggctgccatacaagactcgcaacatcacggtcttcaggcagacgtccacccacctccagatggccaccagcttcgggctggagctcgtggtccagctgcgccccatcttccaggcctatgtcactgttgggccccagttcagaggtcagaccagagggctctgcggcaacttcaacggggacacaacggatgacttcaccactagcatgggtatcgccgagggcaccgcctcgctgtttgtggactcctggcgggcggggaactgtccggccgctctggagcgtgagactgacccctgctccatgagccagctcaacaaggtgtgtgcagagacccactgctccatgctgctgaggacaggcacggtgttcgagaggtgccacgccacagtgaaccctgcacccttctacaagaggtgcgtgtaccaggcctgcaactacgaggagacctttccccacatctgtgccgccctgggcgactacgtacacgcctgctccttgcggggcgtcctgctctggggctggagaagcagtgtggacaactgcaccatcccctgcacgggtaacaccaccttcagctacaacagccaagcctgtgagcgcacctgcctgtcgctgtcggaccgtgccaccgagtgccaccacagcgccgtgcccgtggacggttgcaactgccccgatggcacctacctgaaccaaaagggcgagtgtgtgcgcaaggcccagtgcccgtgcatactggagggttacaagttcatcctggccgagcagtccactgtcatcaacggcatcacctgccactgcatcaacgggcggctgagttgcccgcagcggccacagatgttcctggcctcctgccaggcccctaagaccttcaagtcctgcagccagtcctccgagaacaagtttggggcagcctgtgcccccacatgccagatgctggccaccggtgttgcctgcgtgcccaccaagtgtgagcctggctgtgtctgcgccgagggcctctacgagaatgccgacgggcagtgtgtgccccccgaggagtgcccatgtgagttctcgggggtctcctaccctggaggagctgagctccacactgactgcaggacctgctcctgctcaagggggaggtgggcctgtcagcagggcacccactgcccatccacctgcaccctctacggggagggccacgtcatcaccttcgacggccagcgcttcgtattcgacggcaactgcgagtacatcctggccacggacgtctgtggtgtcaacgactcacagcccaccttcaagatcctgacagagaacgtcatctgtgggaactccggggtcacatgctcacgggccatcaagatcttcctggggggcctgtccgtggtgctggcggacagaaactacacggtcaccggggaggagccccacgtgcagctcggggtgacgccgggtgcgctgagccttgtcgtggacatcagcatccccgggaggtacaacctgacgctcatctggaacaggcacatgaccatcctcatcaggatcgcccgtgcctcccaggatcccctctgcggcttgtgtggcaacttcaacgggaacatgaaggacgacttcgagacgcgcagcaggtacgtggcatccagcgagctggagttggtgaactcgtggaaggagagcccgctgtgcggggacgtgagcttcgtgacagacccctgcagtctcaatgccttccggcgctcctgggccgagcgcaagtgcagcgtcatcaacagccagacctttgccacctgccacagcaaggtataccacctgccctactacgaggcctgcgtgcgcgacgcatgtgggtgtgacagtggcggggactgtgagtgtctgtgcgatgccgtggctgcctacgcccaagcctgtctggacaagggtgtgtgcgtggactggaggaccccggccttctgccccatctactgcggcttctacaacacgcacacgcaggacggccatggcgagtaccagtacacacaggaggccaactgcacgtggcactaccagccctgcctctgccccagccagccacagagcgtcccaggcagcaacatcgaaggctgctacaactgctcccaggatgagtacttcgaccacgaggagggggtgtgcgtgccctgcatgccgcccaccacgccgcagccacccaccacgccgcagctgcccaccacaggctcacggcccacgcaagtctggcccatgacgggaacctccaccaccatcgggcttctcagctccaccggaccctcacccagctctaatcacacccctgccagccccacccagacacccctccttccagccacgctcacatcctccaagcccacagcctcctcgggagaaccacctagaccaaccacggccgtcaccccacaagccacatcagggctgcctcccacagccacactgagatcgacagccacaaaacccacagtgacccaggccacaaccagggccacggcatcgaccgccagcccagccacgacgtccacagctcagtccacaacacggaccacaatgacactaccaaccccagccacatcagggacaagccccacgctgccaaaatcgaccaatcaggaactgccaggaacaacggccacccagacgacaggcccacgtccaaccccagcaagcaccacaggcccaaccaccccacagccaggacaacccacgaggcccacagccacagagaccactcaaacaagaacgactactgaatacacaacgccccaaaccccacacaccacacactccccgcctacggcggggagtcccgtcccttccacaggtcctgtcactgcaacatctttccatgccaccactacctatccaaccccatcacaccctgagaccacacttcccactcacgttccacctttctccacctccttggtgactccaagtactcacacagtcatcacccctacccacgcacagatggccacatctgcctccaaccactcagcgccaacaggtaccattcctccaccaacaacgctcaaggccacagggtccacccacacagccccaccaataacgccgaccaccagtgggaccagccaagcccacagctcattcagcacaaacaaaacacctacctcgctacattcacacacttcctccacacaccatcctgaagtcaccccaacttctactaccacgattactcccaaccccactagtacacgcaccagaacccctgtggcccacaccaactcagccaccagcagcaggccaccaccacccttcaccacacactccccacctacagggagcagtcccttctcttccacaggtcccatgacggcaacatccttcaagaccaccactacctatccaaccccatcactccctcagaccactcttctcactcacgttccacctttctcaacctctttggtgactccaattactcacacagtcatcacccctacccacccacagatgtccacttctgcctatatccactcaacgccaacaggcacgattgctccaccaacaacagttaaggccacaaggtccacctacacagccccactaatgacggcaaccaccagtaggatcagccaagcccacagctcaatcagcacagccaaaacctctacatccctccactcacatgcttcctccacacaccatcctgaagtcaccccaacttctaccaccaacgtgactcccaagtccaccagtagaggcaccagcacccctgtgacccacaccacctcggccaccagtagcaggccacccacacccatcacaacacactcttcacctaccaggagcagtcccctctcttccacaggtcgtatgactgcaacatctctcaagaccaccactacctatccaaccccatcacaagctcacatcacacttcccattcatgttccacctttctccacctcatcggtgactccaagtactcacacagtcatcaccccaacccacccacagatgtccacttctgcctccaaccactcaacgtcaacaggcaccattcctccactgacaacgctcaccaccacccttcaccacacactccccacctacagagagcagtcccctctctcccacaggtcctatgactccaacatccttcaagaccaccactacctatccaaccacatcacaccctcagaccacacttcccactcacgttccacctttctccagctcgtcagtgactccaagtactcacacagtcatcacccctacccatgcacagatgtccacttctgcctcgatccactcaacgccaacaggtaccattcctccactgacaacgctcacggccacagggtccacacacacagcctcaccaatgacggggacaaccattcggaccacccaagcccacagctcattcagcatagccaaaacctctacatccatcctctcacatgcttcctccacacaccatccggaaaccacaccaacttctaccaccaacattactcccaagtccactagtgcaggaaccagcacccctgtggcccacaccaccttggccaccagcagcaggccacccacacccttcaccacacactccccacctacagggagcagtcccatctcttccacaggtcctatgactgcaacatccatcaagaccaccacgacctatccaaccccatcacaccctcagaccacacttaccactcatgttccacctttctccacctcatcagtcactccaagtactcacacagtcatcacccctacccacgcacagatgtccacttcctccacacactatcctgaagtcaccccaacttctaccaccaccatcacccccaaccacaccagtacaggcaccagaacccctgtggcccacaccacctcggccaccagcagcaggctacccatacccttcaccacacattccccacctacagggagcagtcccatctcttccacaggtcctatgactgcaacatcctttcagaccaccactacctatccaaccccatcacaccctcagaccacacttcccactcaccttccacctttctccacctccttggtgactccaagtactcacacagtcatcatcactacccacacacagatggccacttctgcctccatccactcaacgccaacaggcaccgttcttccaccaacaacgctcaaggccacagggtccacccacacagcgccaacaatgacgccgaccaccagcgggacgagccaagccctgagctcattcaacacagccaaaacctctacatccctacattcacaaacttcctccacacaccttcctgaagtcaccccaacttctaccgccatcacccccaatcccaccagtacaggaaccggcacccctgtggcccacaccacctcagccaccagcagcaggctaaccacacccttcaccacacactccccacctacagggagcagtcccttctcttccacaggtcctatgactgcaacatccttccagaccaccactacctatccaacaccatcacaccctcagaccacacatcccactcacgttacatctttctccacctccttggtgactccaagtactcacacagtcatcacccctacccacgcacagatggccacttatgcgtccatccactcaacgccaacaggcaccatttctccaccaacaacgctcaaggccacagggtccttcccctcagccccaccaatgacgtcgaccaccagtgggaccagccaatcccgaagctcatttagcacggccaaaacctctacatccctacattcacacacttcctcaacacatcatcctgaagtcacctcaacttctaccaccagcatcacccccaaccacaccagtacaggcaccagaacccctgtggcccacaccacgtcggccaccagcagcaggctacccatacccttcaccacacactccccacctacagggagcagtcccatctcttccacaggtcctatgactgcaaacatccttccagaccaccactaccgatccaaccccatcacaccctcacaccacacttcccactcacgttccatctttctccacctccttggggactccaagtactcacatagtcatcacccctacccacgcacagatggccacttctgcctccatccactcaatgccaacaggcactattcctccaccgaccacgatcaaggccacagggtccacccacacagccccaccaatgacggcaaccaccagtgggaccagccaatccccaagctcatttagcacggccaaaacttctacatccctacattcacacatttcctcaacacatcatcctgaagtcaccccaacttctaccaccaccatcacccccaaccacaccagtacaggcaccagaacccctgtggcccacaccacctcggccaccagcagcaggctacccatacccttcaccacacattccccacctacagggagcagtcccatctcttccacaggtcctatgactgcaacatcctttcagaccaccactacctatccaaccccatcacaccctcacaccacacttcccactcacgttccatctttctccacctccttggtgactccaagtactcacatagtcatcacccctacccacgcacagatggccacttctgcctccatccactcaatgccaacaggcactattcctccaccgaccacgatcaaggccacagggtccacccacacagccccaccaatgacggcaaccaccagtgggaccagccaatccccaagctcatttagcacggcactgggcttctacatccctacattcacacattcctccacctacaacggtaaaggccacaggcacagggtccacgcacacagcaccacgaatgacagtgaccaccagcgggaccagccaagcgcacagctctttcagcacagccaaaacctccacatccctacactcacatgcttcttcaacactccatcctgaagtcaccccaacttctaccaccaccatcacccccaaccccaccaatacaggcatcagaacgcctgtggcaaacaccacctcagccaccagcagcaggctaaccacacccttcaccacacactccccacctacagggagcagtcccatctcttccacaggtcctatgactgcaacatccttccagaccaccactacatatccaaccccatcacaccctcagaccacacttcccactcacgttccacctttctccacctccttggtgactccaagtactcacacagtcatcacccctacccacgcacagatggccacttccgcctccatccattcaacgccaacaggcaccattcctccaccgacaacgctgaaggccacagggtccacccacacagccccaccaatgatgccaaccaccagtgggaccagccaagcctcaagctcattcaacacagccaaaacctctacatccctacattcacacacttcctccacacaccatcctgaagtcaccccaacttctatcaccaacatcaccctcaaccccaccagtataggaacctggacacccgtggcccacacaacctcagccaccagcagcaggctaaccacacccttcaccacacactccccacctacagggaccactcccatctcttccacaggacctgtcactgcaacatccttccatgccaccactacctatccaacaccatcacaccctcagaccacacttcccactcacgttccatctttctccacctccttggtgactccaagtactcacatagtcatcacccctacccacgcacagatggccacttctgcctccatccactcaatgcaaacaggcaccattcctccaccgaccacgatcaaggccacagggtccacccacacagccccaccaatgacaccgaccaccagtgggaccagccaatccctaagctcatttagcacggccaaaacttctacatccctaccttaccacacttcctccacacaccatcctgaagtcaccccaacttctaccaccaacatcacccccaaacacaccagtacaggcaccagaacccctgtggcccacaccacctcggccaccagcagcagactacccacacccttcaccacacattccccacctacagggagcagtcccatctcttccacaggtcctatgactgcaccatcctttcagaccaccactacctatccaaccccatcacaccctcagaccacacttcccactcacgttccacctttctccacctccttggtgactccaagtactcacacagtcatcacccctacccatgcacagatggccacttctgcctccatccactcaatgccaacaggcacgattcctccaccgacaacgctcaaggccacagggtccacccacacagcgccaacaatgacgccgaccaccagtgggaccagccaagccctgagctcattaaacacagccaaaacctctacatccctacattcacacacttcctccacacaccatgctgaagccacctcaacttctaccaccaacatcacccccaaccccaccagtacaggaaccccaccaatgacagtgaccaccagtgggaccagccaatcccgaagctcatttagcacggccaaaacctctacatccctacattcacacacttcctccacacaccatcctgaagtcacctcaacttctaccaccagcatcacccccaaccacaccagtacaggcaccagaacccctgtggcccacaccacgtcggccaccagcagcaggctacccacacccttcaccacacactccccacctacagggaccactcccatctcttccacaggtcctgtcactgcaacatccttccagaccaccactacctatccaaccccatcacaccctcacaccacacttcccactcacgttccatctttctccacctccttggtgactccaagtactcacacggtcatcatccctacccacacacagatggccacttctgcctccatccactcaatgccaacaggcaccattcctccaccgaccacgatcaaggccacagggtccacccacacagccccaccaatgacaccgaccaccagtgggaccagccaatccccaagctcatttagcacggccaaaacttctacatccctaccttaccacacttcctcaacacaccatcctgaagtcaccccaacttctaccaccaacatcacccccaaacacaccagtacaggcaccagaacccctgtggcccacaccacctcggccagcagcagcaggctacccacacccttcaccacacactccccacctacagggagcagtcccttctcttccacaggtcctatgactgcaacatccttccagaccaccactacctatccaaccccatcacaccctcagaccacacttcccactcacgttccacctttctccacctccttggtgactccaagtactcacacagtcatcatcactacccacacacagatggccacttctgcctccatccactcaacgccaacaggcaccgttcctccaccaacaacgctcaaggccacagggtccacccacacagccccaccaatgacagtgaccaccagtgggaccagccaaacccacagctcattcagcacagctacagcctcttcttccttcatatcctcctcgtcttggctgcctcagaactctagctcaaggccaccgtcatcacctatcaccacacaactcccccacttgagttctgcaaccactcctgtttccacaactaatcagctgtcctcctcattttctcccagtccttctgccccctctactgtttcttcttatgtgccctcctcccactcctctccccagacttcatcgccttctgttggcacatcttcctctttcgtgtccgcccccgtgcactccacaaccctgagctcggggtcacactcctcattgtccactcatcccacgactgcatcagtgtctgcatctcctctttttccttcttctccagctgcctctactaccattagggccactctcccccacactatctcctctcctttcaccctctctgctctactccccatatccactgttaccgtgtctcccaccccatccagccacctagcctccagcaccattgcatttccgtccacgcccaggaccacggccagcacccacaccgcccctgccttctcctctcagtccaccacctcgcggtccacttctctcaccacccgagttcccacatcaggctttgtgtcactcacctcgggggtgacgggtatccccacctctccagtcaccaaccttaccaccaggcaccctggtcccaccttgtcgcctaccacacggttcctgaccagctccctcactgcccatggaagcacccctgcttctgccccggtatcttctctcgggacacctacgcccacctcacccggggtctgcagtgtgcgggagcagcaggaggagatcacgttcaaggggtgcatggcgaacgtgacggtaacccgctgtgagggcgcctgcatttccgctgccagcttcaacatcatcacccagcaggtggatgcccgctgcagctgctgccgccccctccactcctatgagcagcagctggagctgccctgccccgatcccagcacgcctggccggcggctcgtactcaccctgcaggtgttcagccactgcgtgtgcagctctgtggcctgtggagactagcagggtcgctgcctgctctcctggggctgaaggactgcagatgacagacaggaaaacacccaccagcccccttcccgcttgtgccagcagctgctttcctggtcaccaggcctggcccccaagtgccctgggccgtggctccctggggcaccggttggagaggggctgccaagcaggggctcagactaccacactcctgcagaccctgagccagcagagagggactgaggcggacagtggtcacggacctcccaggcacacagggcactcccgaccacccctgcccaccgtccaacacctcccagcccctgaacttggccccagccctgctgggcccagaaccctgcagatgaagccacagagcaggcgctcgaccagacccatcaggggcgaggagggcacggaaacctgtgccgagatgggggcaagaggcccaggcagccaccagcacagagaagaggagatccccagagtcagggagggcagagggtggcagcgagggcagggcagccgcccccgctcccagccaggcagaaggcccccaccagcaccacacccatccccagcagcctgtccttgggagagggcgtcacccggtcagagactccaaataaaccggttcttgtcaaggcaca

SEQ ID NO: 155782 - DNA, 14829 bp, Homo sapiens
  Payload ID: 10600
  Gene Symbol: MUC6
  Gene Name: mucin 6, oligomeric mucus/gel-forming
  ENST ID: ENST00000627256
  CDS Start-End: 52-14194
ggcagcagcaggcctgccgggcccagcgcgagctcctctccactgtgcaccatggtccagcggtggctgctgctgtcctgctgcggagccctgctcagcgctggtctggctaacacctcctacaccagcccaggcctccagaggctgaaggactctccacagacagccccggacaaaggccagtgctccacgtggggggctggtcacttctccaccttcgaccaccacgtgtacgacttctcggggacgtgcaactacatcttcgcggccacctgcaaggacgccttccccaccttcagtgtccagctgcggcgaggcccagacgggagcatctcgcggatcatcgtggagctgggggcctccgtcgtcactgtgagcgaagccatcatctcagtcaaggacatcggggtcatcagcctgccctataccagcaatggactccagatcacacccttcggccagagcgtgcggctggtggccaagcagctggagctggagctggaagtcgtgtggggtcctgacagccacctcatggttctggtggagcggaagtacatgggtcagatgtgcgggctctgcgggaactttgacgggaaggtgaccaacgagtttgtcagtgaggagggcaagttcctggaaccccacaagtttgctgccctccagaagctggacgaccccggcgagatctgcaccttccaggacatccccagcacccacgtccggcaggcccagcacgcccggatctgcacccagctgctgaccctggtggcccctgagtgcagcgtgtccaaggagcccttcgtgctaagctgccaggcggacgtggccgcagccccccagccaggcccacagaacagcagttgtgccaccctgtcggagtactcccgccagtgcagcatggtgggccagccggtccgccgctggcggagccccggcctgtgctccgtgggtcagtgcccggccaaccaggtgtaccaggagtgcggctcggcctgcgtgaagacctgctccaacccgcagcacagctgctccagctcctgcaccttcgggtgcttctgcccggaaggtacggtcctgaatgacctctccaataaccacacctgcgtgcccgtcacccagtgcccctgtgtgctccacggcgccatgtatgcccccggggaggtcacaatagctgcctgccaaacctgccggtgcaccctgggccgctgggtgtgcacggagcggccgtgccccggacactgctccctggaaggtggctcctttgttaccacatttgacgccaggccctaccgcttccacggcacctgcacctacatcctcctccagagcccccagcttcccgaggacggtgccctcatggctgtgtacgacaagtccggcgtctcacactccgagacctccctggtggctgtggtctacctctccaggcaggacaaaattgtgatctctcaggacgaggtggtcaccaacaacggagaagccaagtggctgccatacaagactcgcaacatcacggtcttcaggcagacgtccacccacctccagatggccaccagcttcgggctggagctcgtggtccagctgcgccccatcttccaggcctatgtcactgttgggccccagttcagaggtcagaccagagggctctgcggcaacttcaacggggacacaacggatgacttcaccactagcatgggtatcgccgagggcaccgcctcgctgtttgtggactcctggcgggcggggaactgtccggccgctctggagcgtgagactgacccctgctccatgagccagctcaacaaggtgtgtgcagagacccactgctccatgctgctgaggacaggcacggtgttcgagaggtgccacgccacagtgaaccctgcacccttctacaagaggtgcatgtaccaggcctgcaactacgaggagacctttccccacatctgtgccgccctgggcgactacgtacacgcctgctccttgcggggcgtcctgctctggggctggagaagcagtgtggacaactgcaccatcccctgcacgggtaacaccaccttcagctacaacagccaagcctgtgagcgcacctgcctgtcgctgtcggaccgtgccaccgagtgccaccacagcgccgtgcccgtggacggttgcaactgccccgatggcacctacctgaaccaaaagggcgagtgtgtgcgcaaggcccagtgcccgtgcatactggagggttacaagttcatcctggccgagcagtccactgtcatcaacggcatcacctgccactgcatcaacgggcggctgagttgcccgcagcggccacagatgttcctggcctcctgccaggcccctaagaccttcaagtcctgcagccagtcctccgagaacaagtttggggcagcctgtgcccccacatgccagatgctggccaccggtgttgcctgcgtgcccaccaagtgtgagcctggctgtgtctgcgccgagggcctctacgagaatgccgacgggcagtgtgtgccccccgaggagtgcccatgtgagttctcgggggtctcctaccctggaggagctgagctccacactgactgcaggacctgctcctgctcaagggggaggtgggcctgtcagcagggcacccactgcccatccacctgcaccctctacggggagggccacgtcatcaccttcgacggccagcgcttcgtattcgacggcaactgcgagtacatcctggccacggacgtctgtggtgtcaacgactcacagcccaccttcaagatcctgacagagaacgtcatctgtgggaactccggggtcacatgctcacgggccatcaagatcttcctggggggcctgtccgtggtgctggcggacagaaactacacggtcaccggggaggagccccacgtgcagctcggggtgacgccgggtgcgctgagccttgtcgtggacatcagcatccccgggaggtacaacctgacgctcatctggaacaggcacatgaccatcctcatcaggatcgcccgtgcctcccaggatcccctctgcggcttgtgtggcaacttcaacgggaacatgaaggacgacttcgagacgcgcagcaggtacgtggcatccagcgagctggagttggtgaactcgtggaaggagagcccgctgtgcggggacgtgagcttcgtgacagacccctgcagtctcaatgccttccggcgctcctgggccgagcgcaagtgcagcgtcatcaacagccagacctttgccacctgccacagcaaggtataccacctgccctactacgaggcctgcgtgcgcgacgcatgtgggtgtgacagtggcggggactgtgagtgtctgtgcgatgccgtggctgcctacgcccaagcctgtctggacaagggtgtgtgcgtggactggaggaccccggccttctgccccatctactgcggcttctacaacacgcacacgcaggacggccatggcgagtaccagtacacacaggaggccaactgcacgtggcactaccagccctgcctctgccccagccagccacagagcgtcccaggcagcaacatcgaaggctgctacaactgctcccaggatgagtacttcgaccacgaggagggggtgtgcgtgccctgcatgccgcccaccacgccgcagccacccaccacgccgcagctgcccaccacaggctcacggcccacgcaagtctggcccatgacgggaacctccaccaccatcgggcttctcagctccaccggaccctcacccagctctaatcacacccctgccagccccacccagacacccctccttccagccacgctcacatcctccaagcccacagcctcctcgggagaaccacctagaccaaccacggccgtcaccccacaagccacatcagggctgcctcccacagccacactgagatcgacagccacaaaacccacagtgacccaggccacaaccagggccacggcatcgaccgccagcccagccacgacgtccacagctcagtccacaacacggaccacaatgacactaccaaccccagccacatcagggacaagccccacgctgccaaaatcgaccaatcaggaactgccaggaacaacggccacccagacgacaggcccacgtccaaccccagcaagcaccacaggcccaaccaccccacagccaggacaacccacgaggcccacagccacagagaccactcaaacaagaacgactactgaatacacaacgccccaaaccccacacaccacacactccccgcctacggcggggagtcccgtcccttccacaggtcctgtcactgcaacatctttccatgccaccactacctatccaaccccatcacaccctgagaccacacttcccactcacgttccacctttctccacctccttggtgactccaagtactcacacagtcatcacccctacccacgcacagatggccacatctgcctccatccactcagcgccaacaggtaccattcctccaccaacaacgctcaaggccacagggtccacccacacagccccaccaataacgccgaccaccagtgggaccagccaagcccacagctcattcagcacaaacaaaacacctacctcgctacattcacacacttcctccacacaccatcctgaagtcaccccaacttctactaccacgattactcccaaccccactagtacacgcaccagaacccctgtggcccacaccaactcagccaccagcagcaggccaccaccacccttcaccacacactccccacctacagggagcagtcccttctcttccacaggtcccatgacggcaacatccttcaagaccaccactacctatccaaccccatcactccctcagaccactcttctcactcacgttccacctttctcaacctctttggtgactccaattactcacacagtcatcacccctacccacccacagatgtccacttctgcctatatccactcaacgccaacaggcacgattgctccaccaacaacagttaaggccacaaggtccacctacacagccccactaatgacggcaaccaccagtaggatcagccaagcccacagctcaatcagcacagccaaaacctctacatccctccactcacatgcttcctccacacaccatcctgaagtcaccccaacttctaccaccaacgtgactcccaagtctaccagtagaggcaccagcacccctgtgacccacaccacctcggccaccagtagcaggccacccacacccatcacaacacactcttcacctaccaggagcagtcccctctcttccacaggtcgtatgactgcaacatctctcaagaccaccactacctatccaaccccatcacaagctcacatcacacttcccattcatgttccacctttctccacctcatcggtgactccaagtactcacacagtcatcaccccaacccacccacagatgtccacttctgcctccaaccactcaacgtcaacaggcaccattcctccactgacaacgctcatggccacagggtccacacacacagccccactaataacagtgaccaccagtaggaccagccaagtccacagctccttcagcacagccaaaacctctacatccctcctctcccatgcttcctccacacaccatccagaaatcaccacaaattctaccaccaccattactcccaaccccactagtacaggcaccggaacccctgtggcccacaccacctcagccaccagcagcaggccaccaccacccttcaccacacactccccacctacagagagcagtcccctctctcccacaggtcctatgactccaacatccttcaagaccaccactacctatccaaccacatcacaccctcagaccacacttcccactcacgttccacctttctccagctcgtcagtgactccaagtactcacacagtcatcacccctacccatgcacagatgtccacttctgcctcgatccactcaacgccaacaggtaccattcctccactgacaacgctcacggccacagggtccacacacacagcctcaccaatgacggggaccaccattcggaccacccaagcccacagctcattcagcatagccaaaacctctacatccatcctctcacatgcttcctccacacaccatccggaaaccacaccaacttctaccaccaacattactcccaagtccactagtgcaggaaccagcacccctgtggcccacaccaccttggccaccagcagcaggccacccacacccttcaccacacactccccacctacagggagcagtcccatctcttccacaggtcctatgactgcaacatccatcaagaccaccacgacctatccaaccccatcacaccctcagaccacacttaccactcatgttccacctttctccacctcatcagtcactccaagtactcacacagtcatcacccctacccacgcacaaatgtccacttctgcttcgatccactcaacgccaacaggcaccgttcctccactgacaacgcgcatgcccacagggtcgacacacacaggcccaccaatgacggggaccattattcagacaagcaaagctcacaactcattcagcacagccaaaacttctacatctctccactcacatgcttcctccacacaccatcctgaaaccacaccaacttctaccaccaacattactcccaagcccactagtgcaggaaccagcacccctgtggcccacactaccttggccaccagcagcaggctacctacaaccttcaccacacacttcccatctacagggagcagtcctgtctcttccacaggtcctatgactgcaacatcctcccagaccaccactacctatccaaccccatcacaccctcagaccactcttcccactcacattccacctttctccacctccttggtgactccaagtactcacacagtcatcacccctacccgcgcacaaatgtccacttctgcctccatccactcaacgccaacaggcaccattcctccacctacaacgctaaaggccacaggcaccacccacacgcacacaacaaggacaatgacagtgaccaccaccagccaagccctgaggtcattatatatcggcacagcctctacatccatacctttacactcacatgcttcatcccatctccgaacctgacgtcacttctactactaacatcaccatcacccccaaccccaccagtacaggaaccccaccaatgacagtgaccaccagtgggaccagccaatcccgaagctcatttagcacggccaaaacctctacatccctacattcacacacttcctccacacaccatcctgaagtcacctcaacttctaccaccagcatcacccccaaccacaccagtacaggcaccagaacccctgtggcccacaccacgtcggccaccagcagcaggctacccacacccttcaccacacactccccacctacagggaccactcccatctcttccacaggtcctgtcactgcaacatccttccagaccaccactaccgatccaaccccatcacaccctcacaccacacttcccactcacgttccatctttctccacctccttggtgactccaagtactcacatagtcatcacccctacccacgcacagatggccacttctgcctccatccactcaatgccaacaggcactattcctccaccgaccacgatcaaggccacagggtccacccacacagccccaccaatgacggcaaccaccagtgggaccagccaatccccaagctcatttagcacggccaaaacttctacatccctacattcacacatttcctcaacacatcatcctgaagtcaccccaacttctaccaccaccatcacccccaaccacaccagtacaggcaccagaacccctgtggcccacaccacctcggccaccagcagcaggctacccatacccttcaccacacattccccacctacagggagcagtcccatctcttccacaggtcctatgactgcaacatcctttcagaccaccactacctatccaaccccatcacaccctcagaccacacttcccactcacattccacctttctccacctccttggtgactccaagtactcacacagtcatcatcactacccacacacagatggccacttctgcctccatccactcaacgccaacaggcaccgttcctccaccaacaacgctcaaggccacagggtccacccacacagcgccaacaatgacgccgaccaccagcgggacgagccaagccctgagctcattcaacacagccaaaacctctacatccctacattcacaaacttcctccacacaccttcctgaagtcaccccaacttctaccgccatcacccccaatcccaccagtccaggaaccggcacccctgtggcccacaccacctcagccaccagcagcaggctaaccacacccttcaccacacactcctcacctacagggagcagtcccttctcttccacaggtcctatgactgcaacatccttccagaccaccactacctatccaaccccatcacaccctcagaccacacttcccactcacgttccacctttctccacctctttggtgactccaagtactcacacagtcatcacccctacccatgcacagatggccacttctgcctccatccactcaatgccaacaggcacgattcctccaccgacaacgctcaaggccacagggtccacccacacagcgccaacaatgacgctgaccaccagcgggaccagccaagccctgagctcattaaacacagccaaaacctctacatccctacattcacacacttcctccacacaccatgctgaagccacctcaacttctaccaccaacatcacccccaaccccaccagtacaggaactggggcgcgtgtggcccacaccacctcagccaccagcagcaggctaaccccgcccttcaccacacactccccacctacagggtaacaacgctcaaggccacagggtccatccacacagccccaccaatgacgccgaccaccagtgggaccagccaatccccaagctcatttagcatggccaaaacttctacatccctaccttaccacacttcctccacacaccatcctgaagtcaccccaacttctaccaccaacatcacccccaaacacaccagtacaggcacaagaacccctgtggcccacaccacctcggccaccagcagcaagctacccacacccttcaccacacactccccacctacaggaagcagtcccatctcttccacaggtcctgtcactgcaacatccttccagaccaccactacctatccaaccccatcacactctcacaccacacttcccactcacgttccaccttcctccacctccttggtgactccaaatactcacacagtcatcacccatacccatgcacagatgtccacttctgcctccatccactcaacgccaacaggcaccattcctccaccgacaacgctcaaggccacagggtccacccacacagccccaccaatgacgccgaccaccagtgggaccaggcaagccccaagctcattcagcacagccaaaacttctacatccctacattcacacacttcctccacacaccatcctgcagtcaccccaacttctaccaccaccatcacccccaaccacaccagtacaggcaccaggacccctgtggcccacaccacttcggccaccagcagcaggctacccacacccttcaccacacactccccaccgacagggagcagtcccatctcttccacagctccctgtcactgcaacatccttccagaccaccactaccctatccaacccacatcacagtctcagtaccacacttcccactcacattccacctttctccacctccttggtgactccaagtacacacacagtcatcaccccaacttctaccaccatcacccccaatcccaccagtacagaaaccgtcacccctgtggcccacaccacctcagccaccagcagcaggctaaccacacccttcaccacacactccccacctacagggagcagtcccatctcttccacaggtcctgtcactgcaacatccttccatgccaccactacctatccaacaccatcacaccctcagaccacacttcccactcacgttccatctttctccacctccttggtgactccaagtactcacacagtcatcacccctacccacgcacagatgaccacttctgcctccatccactcaatgccaacaggcaccattcctccaccgacaacgctgaaggccacagggtccacccacacagccccaccaatgatgccaaccaccagtgggaccagccaagcctcaagctcattcaacacagccaaaacctctacatccctacattcacacacttcctccacacaccatcctgaagtcaccccaacttctatcaccaacatcaccctcaaccccaccagtataggaacctggacacccgtggcccacaccacctcagccaccagcagcaggctaaccacacccttcaccacacactccccacctacagggaccactcccatctcttccacaggtcctgtcactgcaacatccttccatgccaccactacctatccaacaccatcacaccctcagaccacacttcccactcacgttccatctttctccacctccttggtgactccaagtactcacatagtcatcacccctacccacgcacagatggccacttctgcctccatccactcaatgcaaacaggcaccattcctccaccgaccacgatcaaggccacagggtccacccacacagccccaccaatgacaccgaccaccagtgggaccagccaatccctaagctcatttagcacggccaaaacttctacatccctaccttaccacacttcctccacacaccatcctgaagtcaccccaacttctaccaccaacatcacccccaaacacaccagtacaggcaccagaacccctgtggcccacaccacctcggccaccagcagcagactacccacacccttcaccacacattccccacctacagggagcagtcccatctcttccacaggtcctatgactgcaccatcctttcagaccaccactacctatccaaccccatcacaccctcagaccacacttcccactcacattccacctttctccacctccttggtgactccaagtactcacaaggtcatcacccctacccatgcacagatgtccacttctgcctccatccactcaacgccaacaggcaccattcctccactaacaacgctcaaggtcacagggtccacccacacagccccaccaatcacagtgaccaccagtgggaccagcccatccgcaagctcatttagcacaggcaaaacctctacatccttacattcacacacttcctccacacactatcctgaagtcaccccaacttctaccaccaccatcacccccaaccacaccagtacaggcaccagaacccctgtggcccacaccacctcggccaccagcagcaggctacccatacccttcaccacacattccccacctacagggagcagtcccatctcttccacaggtcctatgactgcaacatccttccagaccaccactacctatccaaccccatcacaccctcagaccacacttcccactcacgttccacctttctccacctctttggtgactccaagtactcacacagtcatcacccctacccatgcacagatggccacttctgcctccatccactcaatgccaacaggcacgattcctccaccgacaacgctcaaggccacagggtccacccacacagcgccaacaatgacgctgaccaccagcgggaccagccaagccctgagctcattaaacacagccaaaacctctacatccctacattcacacacttcctccacacaccatgctgaagccacctcaacttctaccaccaacatcacccccaaccccaccagtacaggaaccccaccaatgacagtgaccaccagtgggaccagccaatcccgaagctcatttagcacggccaaaacctctacatccctacattcacacacttcctccacacaccatcctgaagtcacctcaacttctaccaccagcatcacccccaaccacaccagtacaggcaccagaacccctgtggcccacaccacgtcggccaccagcagcaggctacccacacccttcaccacacactccccacctacagggaccactcccatctcttccacaggtcctgtcactgcaacatccttccagaccaccactacctatccaaccccatcacaccctcacaccacacttcccactcacgttccatctttctccacctccttggtgactccaagtactcacacggtcatcatccctacccacacacagatggccacttctgcctccatccactcaatgccaacaggcaccattcctccaccgaccacgatcaaggccacagggtccacccacacagccccaccaatgacaccgaccaccagtgggaccagccaatccccaagctcatttagcacggccaaaacttctacatccctaccttaccacacttcctcaacacaccatcctgaagtcaccccaacttctaccaccaacatcacccccaaacacaccagtacaggcaccagaacccctgtggcccacaccacctcggccagcagcagcaggctacccacacccttcaccacacactccccacctacagggagcagtcccttctcttccacaggtcctatgactgcaacatccttccagaccaccactacctatccaaccccatcacaccctcagaccacacttcccactcacgttccacctttctccacctccttggtgactccaagtactcacacagtcatcatcactacccacacacagatggccacttctgcctccatccactcaacgccaacaggcaccgttcctccaccaacaacgctcaaggccacagggtccacccacacagccccaccaatgacagtgaccaccagtgggaccagccaaacccacagctcattcagcacagctacagcctcttcttccttcatatcctcctcgtcttggctgcctcagaactctagctcaaggccaccgtcatcacctatcaccacacaactcccccacttgagttctgcaaccactcctgtttccacaactaatcagctgtcctcctcattttctcccagtccttctgccccctctactgtttcttcttatgtgccctcctcccactcctctccccagacttcatcgccttctgttggcacatcttcctctttcgtgtccgcccccgtgcactccacaaccctgagctcggggtcacactcctcattgtccactcatcccacgactgcatcagtgtctgcatctcctctttttccttcttctccagctgcctctactaccattagggccactctcccccacactatctcctctcctttcaccctctctgctctactccccatatccactgttaccgtgtctcccaccccatccagccacctagcctccagcaccattgcatttccgtccacgcccaggaccacggccagcacccacaccgcccctgccttctcctctcagtccaccacctcgcggtccacttctctcaccacccgagttcccacatcaggctttgtgtcactcacctcgggggtgacgggtatccccacctctccagtcaccaaccttaccaccaggcaccctggtcccaccttgtcgcctaccacacggttcctgaccagctccctcactgcccatggaagcacccctgcttctgccccggtatcttctctcgggacacctacgcccacctcacccggggtctgcagtgtgcgggagcagcaggaggagatcacgttcaaggggtgcatggcgaacgtgacggtaacccgctgtgagggcgcctgcatttccgctgccagcttcaacatcatcacccagcaggtggatgcccgctgcagctgctgccgccccctccactcctatgagcagcagctggagctgccctgccccgatcccagcacgcctggccggcggctcgtactcaccctgcaggtgttcagccactgcgtgtgcagctctgtggcctgtggagactagcagggtcgctgcctgctctcctggggctgaaggactgcagatgacagacaggaaaacacccaccagcccccttcccgcttgtgccagcagctgctttcctggtcaccaggcctggcccccaagtgccctgggccgtggctccctggggcaccggttggagaggggctgccaagcaggggctcagactaccacactcctgcagaccctgagccagcagagagggactgaggcggacagtggtcacggacctcccaggcacacagggcactcccgaccacccctgcccactgtccaacacctcccagcccctgaacttggccccagccctgctgggcccagaaccctgcagatgaagccacagagcaggcgctcgaccagacccatcaggggcgaggagggcacggaaacctgtgccgagatgggggcaagaggcccaggcagccaccagcacagagaagaggagatccccagagtcagggagggcagagggtggcagcgagggcagggcagccgcccccgctcccagccaggcagaaggcccccaccagcaccacacccatccccagcagcctgtccttgggagagggcgtcacccggtcagagactccaaataaaccggttcttgtcaaggcaca

SEQ ID NO: 155783 - DNA, 2443 bp, Homo sapiens
  Payload ID: 10601
  Gene Symbol: MUC7
  Gene Name: mucin 7, secreted
  Uniprot ID: Q8TAX7
  ENST ID: ENST00000304887
  CDS Start-End: 191-1324
ttatcttaaatctaatagatttcctatttccaaaaagctcgactggagtgttataaaacctgaaaattctcttgtgctttctcttcttttgcttctagttaccatcctcaaaggattggctaaaagcaagcaactggattgaacaccctaagaagaaagattcacactgcaccaggagacatcagaaagaatgaaaactctgccgctgtttgtgtgcatctgtgcactgagtgcttgcttctcgttcagtgaaggtcgagaaagggatcatgaactacgtcacagaaggcatcatcaccaatcacccaaatctcactttgaattaccacattatcctggactgctagctcaccagaagccgttcattagaaagtcctataaatgtctgcacaaacgctgtaggcctaagcttccaccttcacctaataacccccccaaattcccaaatcctcaccagccacctaaacatccagataaaaatagcagtgtggtcaaccctaccttagtggctacaacccaaattccatctgtgactttcccatcagcttccaccaaaattactacccttccaaatgtgacttttcttccccagaatgccaccaccatatcttcaagagaaaatgttaacacaagctcttctgtagctacattagcaccagtgaattccccagctccacaagacaccacagctgccccacccacaccttctgcaactacaccagctccaccatcttcctcagctccaccagagaccacagctgccccacccacaccttctgcaactacacaagctccaccatcttcctcagctccaccagagaccacagctgccccacccacacctcctgcaactacaccagctccaccatcttcctcagctccaccagagaccacagctgccccacccacaccttctgcaactacaccagctccactatcttcctcagctccaccagagaccacagctgtcccacccacaccttctgcaactaccctagacccatcatccgcctcagctccaccagagaccacagctgccccacccacaccttctgcaactacaccagctccaccgtcttccccagctccacaagagaccacagctgccccaattaccacacctaattcttccccaactactcttgcacctgacacttctgaaacttcagctgcacccacacaccagactactacttcggtcactactcaaactactactactaaacaaccaacttcagctcctggccaaaataaaatttctcgatttcttttatatatgaagaatctactaaacagaattattgacgacatggtggagcaatagtatattgtatgttgtaaagtgttctgtcatttacaagatgtgattcatgagtgcagaactaccacctttcttttagcaccaatcccaacatgaaattatattactcagatttaaagcactatcattaatctttcaatctaattattcaccaccacaagacctattaacaagacaaaatgcctctatcccacaagccagatgcaggtctggggttcaaaataactctttggatcctacagagatagcctactgagggcaaagaaagtccttagataaagagagaatattgtatgggccatcaaccatttacttttccctgaatgttagaaactacaaaaccactaccttgtacccccatcaaaatcccacctgaaccatctaatcctataaacataaaggggtaaaattggaactctccagatgaacaaagacatctaaatatctgtagatagaaacatttatctatctaaatatattgatagacctgtcattgtattgattaatgacaaaaccctttagataattatcttccattttaaataaaattttatttcacaaatatgagccaagaaagaggaaagttgatttgaagtgaggattagaagtgaatgacaataaagtctgtcagccaagcacgaaccaagactggcactatttttcttagtgtatataattgtttaaactgcaaggttgacatttattgtgttgtgtctaagttaatttcgatctaatgtacctgattctagcctctgtgaacaacaagaatatgtttgtgtatgttcacatggtgcttataatatttcactatcaattcaattaattcacataaattccatgtgaaatgtattcaacaatggaatattttctaaaacatttagtatacatttgaatgtattttaaaccatgccaaactactgctttaatgtcaagtttgcagaattgtctctgaaaataaaaaccctgactttagttgtaaaacaataaaagttagctacttggtatacggagatgttaatttgggatatggaggcatttttatcttctgtcactactacttaaaactctgatgattatgttagatttttttgctaactaataaagatttcaaatggcaattta

SEQ ID NO: 155784 - DNA, 2479 bp, Homo sapiens
  Payload ID: 10601
  Gene Symbol: MUC7
  Gene Name: mucin 7, secreted
  Uniprot ID: Q8TAX7
  ENST ID: ENST00000456088
  CDS Start-End: 228-1361
actgttccactactcatcaagcacataagttactcattgagaacctctgatcgtcactgtgctcatcaggaagaaattgatgcacaaagaactactgtcaatctcagcaaaccacaactattcttttctttaaaattaccatcctcaaaggattggctaaaagcaagcaactggattgaacaccctaagaagaaagattcacactgcaccaggagacatcagaaagaatgaaaactctgccgctgtttgtgtgcatctgtgcactgagtgcttgcttctcgttcagtgaaggtcgagaaagggatcatgaactacgtcacagaaggcatcatcaccaatcacccaaatctcactttgaattaccacattatcctggactgctagctcaccagaagccgttcattagaaagtcctataaatgtctgcacaaacgctgtaggcctaagcttccaccttcacctaataacccccccaaattcccaaatcctcaccagccacctaaacatccagataaaaatagcagtgtggtcaaccctaccttagtggctacaacccaaattccatctgtgactttcccatcagcttccaccaaaattactacccttccaaatgtgacttttcttccccagaatgccaccaccatatcttcaagagaaaatgttaacacaagctcttctgtagctacattagcaccagtgaattccccagctccacaagacaccacagctgccccacccacaccttctgcaactacaccagctccaccatcttcctcagctccaccagagaccacagctgccccacccacaccttctgcaactacacaagctccaccatcttcctcagctccaccagagaccacagctgccccacccacacctcctgcaactacaccagctccaccatcttcctcagctccaccagagaccacagctgccccacccacaccttctgcaactacaccagctccactatcttcctcagctccaccagagaccacagctgtcccacccacaccttctgcaactaccctagacccatcatccgcctcagctccaccagagaccacagctgccccacccacaccttctgcaactacaccagctccaccgtcttccccagctccacaagagaccacagctgccccaattaccacacctaattcttccccaactactcttgcacctgacacttctgaaacttcagctgcacccacacaccagactactacttcggtcactactcaaactactactactaaacaaccaacttcagctcctggccaaaataaaatttctcgatttcttttatatatgaagaatctactaaacagaattattgacgacatggtggagcaatagtatattgtatgttgtaaagtgttctgtcatttacaagatgtgattcatgagtgcagaactaccacctttcttttagcaccaatcccaacatgaaattatattactcagatttaaagcactatcattaatctttcaatctaattattcaccaccacaagacctattaacaagacaaaatgcctctatcccacaagccagatgcaggtctggggttcaaaataactctttggatcctacagagatagcctactgagggcaaagaaagtccttagataaagagagaatattgtatgggccatcaaccatttacttttccctgaatgttagaaactacaaaaccactaccttgtacccccatcaaaatcccacctgaaccatctaatcctataaacataaaggggtaaaattggaactctccagatgaacaaagacatctaaatatctgtagatagaaacatttatctatctaaatatattgatagacctgtcattgtattgattaatgacaaaaccctttagataattatcttccattttaaataaaattttatttcacaaatatgagccaagaaagaggaaagttgatttgaagtgaggattagaagtgaatgacaataaagtctgtcagccaagcacgaaccaagactggcactatttttcttagtgtatataattgtttaaactgcaaggttgacatttattgtgttgtgtctaagttaatttcgatctaatgtacctgattctagcctctgtgaacaacaagaatatgtttgtgtatgttcacatggtgcttataatatttcactatcaattcaattaattcacataaattccatgtgaaatgtattcaacaatggaatattttctaaaacatttagtatacatttgaatgtattttaaaccatgccaaactactgctttaatgtcaagtttgcagaattgtctctgaaaataaaaaccctgactttagttgtaaaacaataaaagttagctacttggtatacggagatgttaatttgggatatggaggcatttttatcttctgtcactactacttaaaactctgatgattatgttagatttttttgctaactaataaagatttcaaatggcaattt

SEQ ID NO: 155785 - DNA, 2540 bp, Homo sapiens
  Payload ID: 10601
  Gene Symbol: MUC7
  Gene Name: mucin 7, secreted
  Uniprot ID: Q8TAX7
  ENST ID: ENST00000413702
  CDS Start-End: 289-1422
actcaattacagtatttcctattcctaaaagaatctagtaggaaggctataagaaatgttctcttactgatccttcttatttgccaccttagattttaagttgcttcttggctaccaaaatgcctagacacagtaactaacaagaattcaactgacaagtagtttgaccagacttggaggaaggattccttcaaagttaccatcctcaaaggattggctaaaagcaagcaactggattgaacaccctaagaagaaagattcacactgcaccaggagacatcagaaagaatgaaaactctgccgctgtttgtgtgcatctgtgcactgagtgcttgcttctcgttcagtgaaggtcgagaaagggatcatgaactacgtcacagaaggcatcatcaccaatcacccaaatctcactttgaattaccacattatcctggactgctagctcaccagaagccgttcattagaaagtcctataaatgtctgcacaaacgctgtaggcctaagcttccaccttcacctaataacccccccaaattcccaaatcctcaccagccacctaaacatccagataaaaatagcagtgtggtcaaccctaccttagtggctacaacccaaattccatctgtgactttcccatcagcttccaccaaaattactacccttccaaatgtgacttttcttccccagaatgccaccaccatatcttcaagagaaaatgttaacacaagctcttctgtagctacattagcaccagtgaattccccagctccacaagacaccacagctgccccacccacaccttctgcaactacaccagctccaccatcttcctcagctccaccagagaccacagctgccccacccacaccttctgcaactacacaagctccaccatcttcctcagctccaccagagaccacagctgccccacccacacctcctgcaactacaccagctccaccatcttcctcagctccaccagagaccacagctgccccacccacaccttctgcaactacaccagctccactatcttcctcagctccaccagagaccacagctgtcccacccacaccttctgcaactaccctagacccatcatccgcctcagctccaccagagaccacagctgccccacccacaccttctgcaactacaccagctccaccgtcttccccagctccacaagagaccacagctgccccaattaccacacctaattcttccccaactactcttgcacctgacacttctgaaacttcagctgcacccacacaccagactactacttcggtcactactcaaactactactactaaacaaccaacttcagctcctggccaaaataaaatttctcgatttcttttatatatgaagaatctactaaacagaattattgacgacatggtggagcaatagtatattgtatgttgtaaagtgttctgtcatttacaagatgtgattcatgagtgcagaactaccacctttcttttagcaccaatcccaacatgaaattatattactcagatttaaagcactatcattaatctttcaatctaattattcaccaccacaagacctattaacaagacaaaatgcctctatcccacaagccagatgcaggtctggggttcaaaataactctttggatcctacagagatagcctactgagggcaaagaaagtccttagataaagagagaatattgtatgggccatcaaccatttacttttccctgaatgttagaaactacaaaaccactaccttgtacccccatcaaaatcccacctgaaccatctaatcctataaacataaaggggtaaaattggaactctccagatgaacaaagacatctaaatatctgtagatagaaacatttatctatctaaatatattgatagacctgtcattgtattgattaatgacaaaaccctttagataattatcttccattttaaataaaattttatttcacaaatatgagccaagaaagaggaaagttgatttgaagtgaggattagaagtgaatgacaataaagtctgtcagccaagcacgaaccaagactggcactatttttcttagtgtatataattgtttaaactgcaaggttgacatttattgtgttgtgtctaagttaatttcgatctaatgtacctgattctagcctctgtgaacaacaagaatatgtttgtgtatgttcacatggtgcttataatatttcactatcaattcaattaattcacataaattccatgtgaaatgtattcaacaatggaatattttctaaaacatttagtatacatttgaatgtattttaaaccatgccaaactactgctttaatgtcaagtttgcagaattgtctctgaaaataaaaaccctgactttagttgtaaaacaataaaagttagctacttggtatacggagatgttaatttgggatatggaggcatttttatcttctgtcactactacttaaaactctgatgattatgttagatttttttgctaactaataaagatttcaaatggcaattt

SEQ ID NO: 155786 - DNA, 635 bp, Homo sapiens
  Payload ID: 10601
  Gene Symbol: MUC7
  Gene Name: mucin 7, secreted
  ENST ID: ENST00000505411
  CDS Start-End: 228-635
actgttccactactcatcaagcacataagttactcattgagaacctctgatcgtcactgtgctcatcaggaagaaattgatgcacaaagaactactgtcaatctcagcaaaccacaactattcttttctttaaaattaccatcctcaaaggattggctaaaagcaagcaactggattgaacaccctaagaagaaagattcacactgcaccaggagacatcagaaagaatgaaaactctgccgctgtttgtgtgcatctgtgcactgagtgcttgcttctcgttcagtgaaggtcgagaaagggatcatgaactacgtcacagaaggcatcatcaccaatcacccaaatctcactttgaattaccacattatcctggactgctagctcaccagaagccgttcattagaaagtcctataaatgtctgcacaaacgctgtaggcctaagcttccaccttcacctaataacccccccaaattcccaaatcctcaccagccacctaaacatccagataaaaatagcagtgtggtcaaccctaccttagtggctacaacccaaattccatctgtgactttcccatcagcttccaccaaaattactacccttccaaatgtgacttttcttccccagaatgcc

SEQ ID NO: 155787 - DNA, 470 bp, Homo sapiens
  Payload ID: 10602
  Gene Symbol: MUCL1
  Gene Name: mucin-like 1
  Uniprot ID: Q96DR8
  ENST ID: ENST00000308796
  CDS Start-End: 47-319
ctttgaagcatttttgtctgtgctccctgatcttcaggtcaccaccatgaagttcttagcagtcctggtactcttgggagtttccatctttctggtctctgcccagaatccgacaacagctgctccagctgacacgtatccagctactggtcctgctgatgatgaagcccctgatgctgaaaccactgctgctgcaaccactgcaaccactgctgctcctaccactgcaaccaccgctgcttctaccactgctcgtaaagacattccagttttacccaaatgggttggggatctcccgaatggtagagtgtgtccctgagatggaatcagcttgagtcttctgcaattggtcacaactattcatgcttcctgtgatttcatccaactacttaccttgcctacgatatcccctttatctctaatcagtttattttctttcaaataaaaaataactatgagcaacataaaaa

SEQ ID NO: 155788 - DNA, 439 bp, Homo sapiens
  Payload ID: 10602
  Gene Symbol: MUCL1
  Gene Name: mucin-like 1
  ENST ID: ENST00000546809
  CDS Start-End: 37-294
atttactggattgaacagttcaggcttctggccagtatgggaggtgaccatgggtatcaactggcagtgactaaagcagagaatccgacaacagctgctccagctgacacgtatccagctactggtcctgctgatgatgaagcccctgatgctgaaaccactgctgctgcaaccactgcaaccactgctgctcctaccactgcaaccaccgctgcttctaccactgctcgtaaagacattccagttttacccaaatgggttggggatctcccgaatggtagagtgtgtccctgagatggaatcagcttgagtcttctgcaattggtcacaactattcatgcttcctgtgatttcatccaactacttaccttgcctacgatatcccctttatctctaatcagtttattttctttcaaataaaaaataactatgagcaaca

SEQ ID NO: 155789 - DNA, 243 bp, Homo sapiens
  Payload ID: 10602
  Gene Symbol: MUCL1
  Gene Name: mucin-like 1
  ENST ID: ENST00000619042
  CDS Start-End: 1-243
atgaagttcttagcagtcctggtactcttgggagtttccatctttctggtctctgcccagaatccgacaacagctgctccagctgacacgtatccagctactggtcctgctgatgatgaagcccctgatgctgaaaccactcctaccactgcaaccaccgctgcttctaccactgctcgtaaagacattccagttttacccaaatgggttggggatctcccgaatggtagagtgtgtccctga

SEQ ID NO: 155790 - DNA, 2082 bp, Homo sapiens
  Payload ID: 10603
  Gene Symbol: MCOLN1
  Gene Name: mucolipin 1
  Uniprot ID: Q9GZU1
  ENST ID: ENST00000264079
  CDS Start-End: 126-1868
agatcagctgatgccggagggtttgaagccgcgccgcgagggagcgaggtcgcagtgacagcggcgggcgatcggacccaggctgccccgccgtacccgcctgcgtcccgcgctcccgccccagcatgacagccccggcgggtccgcgcggctcagagaccgagcggcttctgacccccaaccccgggtatgggacccaggcggggccttcaccggcccctccgacacccccagaagaggaagaccttcgccgtcgtctcaaatactttttcatgagtccctgcgacaagtttcgagccaagggccgcaagccctgcaagctgatgctgcaagtggtcaagatcctggtggtcacggtgcagctcatcctgtttgggctcagtaatcagctggctgtgacattccgggaagagaacaccatcgccttccgacacctcttcctgctgggctactcggacggagcggatgacaccttcgcagcctacacgcgggagcagctgtaccaggccatcttccatgctgtggaccagtacctggcgttgcctgacgtgtcactgggccggtatgcgtatgtccgtggtgggggtgacccttggaccaatggctcagggcttgctctctgccagcggtactaccaccgaggccacgtggacccggccaacgacacatttgacattgatccgatggtggttactgactgcatccaggtggatccccccgagcggccccctccgccccccagcgacgatctcaccctcttggaaagcagctccagttacaagaacctcacgctcaaattccacaagctggtcaatgtcaccatccacttccggctgaagaccattaacctccagagcctcatcaataatgagatcccggactgctataccttcagcgtcctgatcacgtttgacaacaaagcacacagtgggcggatccccatcagcctggagacccaggcccacatccaggagtgtaagcaccccagtgtcttccagcacggagacaacagcttccggctcctgtttgacgtggtggtcatcctcacctgctccctgtccttcctcctctgcgcccgctcactccttcgaggcttcctgctgcagaacgagtttgtggggttcatgtggcggcagcggggacgggtcatcagcctgtgggagcggctggaatttgtcaatggctggtacatcctgctcgtcaccagcgatgtgctcaccatctcgggcaccatcatgaagatcggcatcgaggccaagaacttggcgagctacgacgtctgcagcatcctcctgggcacctcgacgctgctggtgtgggtgggcgtgatccgctacctgaccttcttccacaactacaatatcctcatcgccacactgcgggtggccctgcccagcgtcatgcgcttctgctgctgcgtggctgtcatctacctgggctactgcttctgtggctggatcgtgctggggccctatcatgtgaagttccgctcactctccatggtgtctgagtgcctgttctcgctcatcaatggggacgacatgtttgtgacgttcgccgccatgcaggcgcagcagggccgcagcagcctggtgtggctcttctcccagctctacctttactccttcatcagcctcttcatctacatggtgctcagcctcttcatcgcgctcatcaccggcgcctacgacaccatcaagcatcccggcggcgcaggcgcagaggagagcgagctgcaggcctacatcgcacagtgccaggacagccccacctccggcaagttccgccgcgggagcggctcggcctgcagccttctctgctgctgcggaagggacccctcggaggagcattcgctgctggtgaattgattcgacctgactgccgttggaccgtaggccctggactgcagagacccccgcccccgaccccgcttatttatttgtagggtttgcttttaaggatcggctccctgtcgcgcccgaggagggcctggacctttcgtgtcggacccttgggggcggggagactgggtggggagggtgttgaataaaagggaaaataaatgtgtcgttttcattttta

SEQ ID NO: 155791 - DNA, 666 bp, Homo sapiens
  Payload ID: 10603
  Gene Symbol: MCOLN1
  Gene Name: mucolipin 1
  ENST ID: ENST00000601003
  CDS Start-End: 65-666
cggcgggcgatcggacccaggctgccccgccgtacccgcctgcgtcccgcgctcccgccccagcatgacagccccggcgggtccgcgcggctcagagaccgagcggcttctgacccccaaccccgggtatgggacccaggcggggccttcaccggcccctccgacacccccagaagaggaagaccttcgccgtcgtctcaaatactttttcatgagtccctgcgacaagtttcgagccaagggccgcaagccctgcaagctgatgctgcaagtggtcaagatcctggtggtcacggtgcagctcatcctgtttgggctcagtaatcagctggctgtgacattccgggaagagaacaccatcgccttccgacacctcttcctgctgggctactcggacggagcggatgacaccttcgcagcctacacgcgggagcagctgtaccaggccatcttccatgctgtggaccagtacctggcgttgcctgacgtgtcactgggccggtatgcgtatgtccgtggtgggggtgacccttggaccaatggctcagggcttgctctctgccagcggtactaccaccgaggccacgtggacccggccaacgacacatttgacattgatccgatggtggttactggctggtcaatgtcaccatccacttccggctg

SEQ ID NO: 155792 - DNA, 666 bp, Homo sapiens
  Payload ID: 10603
  Gene Symbol: MCOLN1
  Gene Name: mucolipin 1
  ENST ID: ENST00000599334
  CDS Start-End: 1-548
tcgaggccaagaacttggcgagctacgacgtctgcagcatcctcctgggcacctcgacgctgctggtgtgggtgggcgtgatccgctacctgaccttcttccacaactacaatatcctcatcgccacactgcgggtggccctgcccagcgtcatgcgcttctgctgctgcgtggctgtcatctacctgggctactgcttctgtggctggatcgtgctggggccctatcatgtgaagcctcttcatctacatggtgctcagcctcttcatcgcgctcatcaccggcgcctacgacaccatcaagcatcccggcggcgcaggcgcagaggagagcgagctgcaggcctacatcgcacagtgccaggacagccccacctccggcaagttccgccgcgggagcggctcggcctgcagccttctctgctgctgcggaagggacccctcggaggagcattcgctgctggtgaattgattcgacctgactgccgttggaccgtaggccctggactgcagagacccccgcccccgaccccgcttatttatttgtagggtttgcttttaaggatcggctccctgtcgcgcccgaggagggcctggacctttcgtgtcggacccttgggggcggggagactgggtggggagggtgttgaataaaagggaaaataaa

SEQ ID NO: 155793 - DNA, 1729 bp, Homo sapiens
  Payload ID: 10604
  Gene Symbol: MCOLN2
  Gene Name: mucolipin 2
  Uniprot ID: Q8IZK6
  ENST ID: ENST00000284027
  CDS Start-End: 113-1729
cacagagccgcctttcagccgcccgagaactgcccgccgcactccacgactgcggcgcctgctctcgggccggggtctgcgcgcaccacgcggccggcagaaaggaaatgcaatggcacatcgtgattctgagatgaaagaagaatgtctaagggaagacctgaagttttacttcatgagcccttgtgaaaaataccgagccagacgccagattccgtggaaactgggtttgcagattttgaagatagtcatggtcaccacacagcttgttcgttttggtttaagtaaccagctggtggttgctttcaaagaagataacactgttgcttttaagcacttgtttttgaaaggatattctggtacagatgaagatgactacagctgcagtgtatatactcaagaggatgcctatgagagcatcttttttgctattaatcagtatcatcagctaaaggacattaccctggggacccttggttatggagaaaatgaagacaatagaattggcttaaaagtctgtaagcagcattacaagaaagggaccatgtttccttctaatgagacactgaatattgacaacgacgttgagctcgattgtgttcaattagaccttcaggacctctccaagaagcctccggactggaagaactcatcattcttcagactggaattttatcggctcttacaggttgaaatctcctttcatcttaaaggcattgacctacagacaattcattcccgtgagttaccagactgttatgtctttcagaatacgattatctttgacaataaagctcacagtggcaaaatcaaaatctattttgacagtgatgccaaaattgaagaatgtaaagacttgaacatatttggatctactcagaaaaatgctcagtatgtcctggtgtttgatgcatttgtcattgtgatttgcttggcatctcttattctgtgtacaagatccattgttcttgctctaaggttacggaagagatttctaaatttcttcctggagaagtacaagcggcctgtgtgtgacaccgaccagtgggagttcatcaacggctggtatgtcctggtgattatcagcgacctaatgacaatcattggctccatattaaaaatggaaatcaaagcaaagaatctcacaaactatgatctctgcagcatttttcttggaacctctacgctcttggtttgggttggagtcatcagatacctgggttatttccaggcatataatgtgctgattttaacaatgcaggcctcactgccaaaagttcttcggttttgtgcttgtgctggtatgatttatctgggttacacattctgtggctggattgtcttaggaccataccatgacaagtttgaaaatctgaacacagttgctgagtgtctgttttctctggtcaacggtgatgacatgtttgcaacctttgcccaaatccagcagaagagcatcttggtgtggctgttcagtcgtctgtatttatattccttcatcagcctttttatatatatgattctcagtctttttattgcacttattacagattcttatgacaccattaagaaattccaacagaatgggtttcctgaaacggatttgcaggaattcctgaaggaatgcagtagcaaagaagagtatcagaaagagtcctcagccttcctgtcctgcatctgctgtcggaggaggaaaagaagtgatgatcacttgatacctattagctaa

SEQ ID NO: 155794 - DNA, 2871 bp, Homo sapiens
  Payload ID: 10604
  Gene Symbol: MCOLN2
  Gene Name: mucolipin 2
  Uniprot ID: Q8IZK6
  ENST ID: ENST00000370608
  CDS Start-End: 69-1769
gagtcggccgtgaacggtgtttcctgttccgaatcccgagagccctggaaagttttgaaggaggaggcatggcccggcagccttatcgttttccccaggcaaggattccggagagaggatcaggtgttttcaggttaaccgtcagaaatgcaatggcacatcgtgattctgagatgaaagaagaatgtctaagggaagacctgaagttttacttcatgagcccttgtgaaaaataccgagccagacgccagattccgtggaaactgggtttgcagattttgaagatagtcatggtcaccacacagcttgttcgttttggtttaagtaaccagctggtggttgctttcaaagaagataacactgttgcttttaagcacttgtttttgaaaggatattctggtacagatgaagatgactacagctgcagtgtatatactcaagaggatgcctatgagagcatcttttttgctattaatcagtatcatcagctaaaggacattaccctggggacccttggttatggagaaaatgaagacaatagaattggcttaaaagtctgtaagcagcattacaagaaagggaccatgtttccttctaatgagacactgaatattgacaacgacgttgagctcgattgtgttcaattagaccttcaggacctctccaagaagcctccggactggaagaactcatcattcttcagactggaattttatcggctcttacaggttgaaatctcctttcatcttaaaggcattgacctacagacaattcattcccgtgagttaccagactgttatgtctttcagaatacgattatctttgacaataaagctcacagtggcaaaatcaaaatctattttgacagtgatgccaaaattgaagaatgtaaagacttgaacatatttggatctactcagaaaaatgctcagtatgtcctggtgtttgatgcatttgtcattgtgatttgcttggcatctcttattctgtgtacaagatccattgttcttgctctaaggttacggaagagatttctaaatttcttcctggagaagtacaagcggcctgtgtgtgacaccgaccagtgggagttcatcaacggctggtatgtcctggtgattatcagcgacctaatgacaatcattggctccatattaaaaatggaaatcaaagcaaagaatctcacaaactatgatctctgcagcatttttcttggaacctctacgctcttggtttgggttggagtcatcagatacctgggttatttccaggcatataatgtgctgattttaacaatgcaggcctcactgccaaaagttcttcggttttgtgcttgtgctggtatgatttatctgggttacacattctgtggctggattgtcttaggaccataccatgacaagtttgaaaatctgaacacagttgctgagtgtctgttttctctggtcaacggtgatgacatgtttgcaacctttgcccaaatccagcagaagagcatcttggtgtggctgttcagtcgtctgtatttatattccttcatcagcctttttatatatatgattctcagtctttttattgcacttattacagattcttatgacaccattaagaaattccaacagaatgggtttcctgaaacggatttgcaggaattcctgaaggaatgcagtagcaaagaagagtatcagaaagagtcctcagccttcctgtcctgcatctgctgtcggaggaggaaaagaagtgatgatcacttgatacctattagctaaagttctgctaaagatgattaaagttcaggcatccttatccagcggctgagcagaggaaccccaaatgacttggacaagcagttccaaaatgactctcttatttaattgtggagtgggaaagaggactcacagttagccagctgaccatgactgaagttccagctttactttttataaacttgaatgataaagaatagaccatgggctactactgggcattagtgcaatataacagcgataataaaattctctattagtctgttaatttatgacatgatctcggaatggaaaaagatcatttcagagtgtgcgaaataatagtctttaaccatgtaattaaatatgtgtgtttattgtcaaataaggatttgttttaaaggtgattcttgggtttgaagacatttgttaattcatggtctgtacagaaatgaagctggttgcaataccaatctagagagtccaagctggtgaactattaagctgtttaaagatcacccttggcctggcacagtggttcacacctgtaatcccagcactttgggaggcctaggcaggcagactgagctcaggagcttgagaccagcctgggcaacatggcaaaaacccacctctacaaaaagtacaaaaattagtcgggcgtgatggcaggcatctgtagtcccagctacttgggaagctgaagtgggaggatcacctgagctctggaggtggaggctgccatgagccatgatcgtgccactacactccagcctgggtgacagagtgagatcctgtctcaaaaaaaaaaaaaaatcacccttaaatcaacaaaaagacctcatgctcatgcagtggacatttcttggcctgttttcctgtgggttttcttcagcatgatatgaagcaactgttggcatagccagtgggataaataagaaatggaatcatttggctgcctcgtcacttgtgctaatggtcagttgtacacacatgacatgtggaagtgacctgtagcagcggtcactcattttaacaattgaactctgctgggttgggtatttacctttgtctagaaaagaaatatgatatattttctctaaataaatttattttcatcattcca

SEQ ID NO: 155795 - DNA, 2403 bp, Homo sapiens
  Payload ID: 10604
  Gene Symbol: MCOLN2
  Gene Name: mucolipin 2
  ENST ID: ENST00000463065
  CDS Start-End: 242-991
acacagagccgcctttcagccgcccgagaactgcccgccgcactccacgactgcggcgcctgctctcgggccggggtctgcgcgcaccacgcggccggcagaaagggtaagagaagggaaccccgctttgcagggctccaacttcggcggacgcgttacggcgagggcgaaatgagtcggccgtgaacggtgtttcctgttccgaatcccgagagccctggaaagttttgaaggaggaggcatggcccggcagccttatcgttttccccaggcaaggattccggagagaggatcaggtgttttcaggttaaccgtcagaaatgcaatggcacatcgtgattctgagatgaaagaagaatgtctaagggaagacctgaagttttacttcatgagcccttgtgaaaaataccgagccagacgccagattccgtggaaactgggtttgcagattttgaagatagtcatggtcaccacacagcttgttcgttttggtttaagtaaccagctggtggttgctttcaaagaagataacactgttgcttttaagcacttgtttttgaaaggatattctggtacagatgaagatgactacagctgcagtgtatatactcaagaggatgcctatgagagcatcttttttgctattaatcagtatcatcagctaaaggacattaccctggggacccttggttatggagaaaatgaagacaatagaattggcttaaaagtctgtaagcagcattacaagaaagggaccatgtttccttctaatgagacactgaatattgacaacgacgttgagctcgattgtgttcaattagaccttcaggacctctccaagaagcctccggactggaagaactcatcattcttcagactggaattttatcggctcttacaggttgaaatctcctttcatcttaaaggcattgacctacagacaattcattcccgtgagttaccagactgttatgtctttcagaatacgtgatgccaaaattgaagaatgtaaagacttgaacatatttggatctaaatctcacaaactatgatctctgcagcatttttcttggaacctctacgctcttggtttgggttggagtcatcagatacctgggttatttccaggcatataatgtgctgattttaacaatgcaggcctcactgccaaaagttcttcggttttgtgcttgtgctggtatgatttatctgggttacacattctgtggctggattgtcttaggaccataccatgacaagtttgaaaatctgaacacagttgctgagtgtctgttttctctggtcaacggtgatgacatgtttgcaacctttgcccaaatccagcagaagagcatcttggtgtggctgttcagtcgtctgtatttatattccttcatcagcctttttatatatatgattctcagtctttttattgcacttattacagattcttatgacaccattaagaaattccaacagaatgggtttcctgaaacggatttgcaggaattcctgaaggaatgcagtagcaaagaagagtatcagaaagagtcctcagccttcctgtcctgcatctgctgtcggaggaggaaaagaagtgatgatcacttgatacctattagctaaagttctgctaaagatgattaaagttcaggcatccttatccagcggctgagcagaggaaccccaaatgacttggacaagcagttccaaaatgactctcttatttaattgtggagtgggaaagaggactcacagttagccagctgaccatgactgaagttccagctttactttttataaacttgaatgataaagaatagaccatgggctactactgggcattagtgcaatataacagcgataataaaattctctattagtctgttaatttatgacatgatctcggaatggaaaaagatcatttcagagtgtgcgaaataatagtctttaaccatgtaattaaatatgtgtgtttattgtcaaataaggatttgttttaaaggtgattcttgggtttgaagacatttgttaattcatggtctgtacagaaatgaagctggttgcaataccaatctagagagtccaagctggtgaactattaagctgtttaaagatcacccttggcctggcacagtggttcacacctgtaatcccagcactttgggaggcctaggcaggcagactgagctcaggagcttgagaccagcctgggcaacatggcaaaaacccacctctacaaaaagtacaaaaattagtcgggcgtgatggcaggcatctgtagtcccagctacttgggaagctgaagtgggaggatcacctgagctctggaggtggaggctgccatgagccatgatcgtgccactacactccagcctgggtgacagagtgagatcctgtctc

SEQ ID NO: 155796 - DNA, 1762 bp, Homo sapiens
  Payload ID: 10605
  Gene Symbol: MCOLN3
  Gene Name: mucolipin 3
  Uniprot ID: Q8TDD5
  ENST ID: ENST00000341115
  CDS Start-End: 54-1547
gcgccctcgccgcggacaccggagctgcggccgctccccgctgtcccccagagatggcagatcctgaggtagttgtgagtagctgcagctctcatgaagaggaaaatcgctgcaattttaaccagcaaacatctccatctgaggagcttctattagaagaccagatgaggcgaaaactcaaattttttttcatgaatccctgtgagaagttctgggctcgaggtagaaaaccatggaaacttgccatacaaattctaaaaattgcaatggtgactatccagtacttgcagctatacaatgtctccgttgggaatcatgcttatgagaacaaaggtaccaagcaatctgctatggcaatctgtcagcacttctacaagcgaggaaacatctaccctggaaatgatacctttgacatcgatccagaaattgaaactgagtgtttctttgtggagccagatgaaccttttcacattgggacaccagcagaaaataaactgaacttaacactggacttccacagactcctaacagtggagcttcagtttaaactgaaagccattaatctgcagacagttcgtcatcaagaactccctgactgttatgactttactctgactataacatttgacaacaaggcccatagtggaagaattaaaataagtttagataatgacatttccatcagagaatgtaaagactggcatgtatctggatcaattcagaagaacactcattacatgatgatctttgatgcctttgtcattctgacttgcttggtttcattaatcctctgcattagatctgtgattagaggacttcagcttcagcaggagtttgtcaattttttcctcctccattataagaaggaagtttctgtttctgatcaaatggaatttgtcaatggatggtacattatgattattattagtgacatattgacaatcattggatcaattctaaaaatggaaatccaagctaagagtctaactagttatgatgtctgtagcatacttcttgggacttctaccatgctcgtgtggcttggagtcatccgatacctcggtttctttgcaaagtacaacctcctcattttgacccttcaggcagcgctgcccaatgtcatcaggttctgctgctgtgcagctatgatttacttaggttactgcttctgtggatggatcgtgctggggccttaccatgacaagtttcgttctctgaacatggtctctgagtgccttttctctctgataaatggagatgatatgtttgccacgtttgcaaaaatgcagcaaaaaagttacttagtctggctgtttagtagaatttacctctactcattcatcagcctctttatatatatgattttaagtcttttcattgcactgatcactgatacatacgaaacaattaagcaataccaacaagatggcttcccagagactgaacttcgtacatttatatcagaatgcaaagatctacccaactctggaaaatacagattagaagatgaccctccagtatctttattctgctgttgtaaaaagtagctatcaggtttatctgtactttagaggaaaatataatgtgtagctgagttggaacactgtggatattctgagatcagatgtagtatgtttgaagactgttattttgagctaattgagacctataattcaccaataactgtttatatttttaaaagcaatatttaatgtctttgcaactttatgctgggattgtttttaaaaaaactttaatgagg

SEQ ID NO: 155797 - DNA, 2953 bp, Homo sapiens
  Payload ID: 10605
  Gene Symbol: MCOLN3
  Gene Name: mucolipin 3
  ENST ID: ENST00000370587
  CDS Start-End: 378-1343
tggagtcgctcgctgactcgccctgcgccctcgccgcggacaccggagctgcggccgctccccgctgtcccccagcttactccaatcaagcctctgcccgccaggaacaggtaacctgtgtgtgtccgtttgctccttctaagagcatgcctgatagatacttcggtagcctctccggatggccccttcgtcgggtagcctctcctgatggggtccttcgcccaccctgcctcccgcgccggcgctccgggtgaatgtcaagggtggctggctgcgaatacctccttcagctgctggggttcccgacagtttgcagtttttaaaagtgcaccctcggaagggcttttcagactgggtaaacctgacttttccaagagatggcagatcctgaggtagttgtgagtagctgcagctctcatgaagaggaaaatcgctgcaattttaaccagcaaacatctccatctgaggagcttctattagaagaccagatgaggcgaaaactcaaattttttttcatgaatccctgtgagaagttctgggctcgaggtagaaaaccatggaaacttgccatacaaattctaaaaattgcaatggtgactatccagctggtcttatttgggctaagtaaccagatggtggtagctttcaaggaagagaatactatagcattcaaacaccttttcctaaaaggatatatggaccgaatggatgacacatatgcagtgtacacacaaagtgacgtgtatgatcagttaatcttcgcagtaaaccagtacttgcagctatacaatgtctccgttgggaatcatgcttatgagaacaaaggtaccaagcaatctgctatggcaatctgtcagcacttctacaagcgaggaaacatctaccctggaaatgatacctttgacatcgatccagaaattgaaactgagtgtttctttgtggagccagatgaaccttttcacattgggacaccagcagaaaataaactgaacttaacactggacttccacagactcctaacagtggagcttcagtttaaactgaaagccattaatctgcagacagttcgtcatcaagaactccctgactgttatgactttactctgactataacatttgacaacaaggcccatagtggaagaattaaaataagtttagataatgacatttccatcagagaatgtaaagactggcatgtatctggatcaattcagaagaacactcattacatgatgatctttgatgcctttgtcattctgacttgcttggtttcattaatcctctgcattagatctgtgattagaggacttcagcttcagcaggtagggaacgttgctttctaggaatgctactgacattttgattgacagagacattcactgtgcctcccctcttttccctaaaggagtttgtcaattttttcctcctccattataagaaggaagtttctgtttctgatcaaatggaatttgtcaatggatggtacattatgattattattagtgacatattgacaatcattggatcaattctaaaaatggaaatccaagctaaggtaatttttttcctaatcatgctattgttagtgtcagatttgcactaatggtaatgtatttttccagaatgtaagaattttcagaatgaattgtttcttccaaactgtatatcaagtagacttgaaattggtaatggtaattttcttaaatctagtcaggaggtctcttaggcagagtttttcaaagtgtgatccacaaaccattgcatcagaatcattgggtgcctggtaaagtgtaccatgttagacctactgaattcagactcttcggcggggcctgtgaattcttacacacaccaaaattcatacacaaccaaggtaactaaggtaagagttttttttttttttttaatcttacaagaaatgctcgaatctttaacaaaaatgagtggggctataggggaaagtgaggtcaaggcactatggtgtgcatgcttgcatttgtttcctccgtccattcaaagtgagaatgctcccattttcttactttaccattgatgtgctacaagcttatttattttaagactaacctagcctaaaaatcaactgtccccacaaaataaaaatcacattaaaaaaactaatagtgttcagactaatcttgctcaaacttatgtttccctagtcttgatgcaactgattgagtcacctggggagttggttataaacctgggcagagaccccaaatgcaatggctcagagaagataggagcttatttctgtcttatgcaatagtcagaatgggttttacagactggtgagtagctcaacatctcacagtcattcaggcacccatgttcctcccattttgtttctctgccaccccttaaggacttgccctgactgcatgattattgccgtgttgcctcaaacaggttgcagcttatgggaagcaaaaacacggtatggtagaagctctcccatagactgatggcttggctcaagagtggccgactttatttctgtacatatcccactggatagaatttagtcaatcctaactgcagagggagccagggaacacagcccaggcatgtgcctaggaaggggagaatgggtttaggttgacacttagcagctgccactatatgtggctatagtatgtatcattggaatagatgtttaactttagggacaaataaaaaaccaaaacaaaaaaaggagtaaggggagagatttgcagcaaatctttatttttaccaacctcaactatcattaatttcagtgaaccctaaatggtatccaacaaaatatctttctagaccattcaccgtctctgcctcatagatgatcatatcatgttttcttctcttctgaaacctctaatacccttgtcctatcctcattctaagctgatgaccttacttcctatttcacaaaaataatagaaaaaaaaaa

SEQ ID NO: 155798 - DNA, 2756 bp, Homo sapiens
  Payload ID: 10605
  Gene Symbol: MCOLN3
  Gene Name: mucolipin 3
  Uniprot ID: Q8TDD5
  ENST ID: ENST00000370589
  CDS Start-End: 54-1715
gcgccctcgccgcggacaccggagctgcggccgctccccgctgtcccccagagatggcagatcctgaggtagttgtgagtagctgcagctctcatgaagaggaaaatcgctgcaattttaaccagcaaacatctccatctgaggagcttctattagaagaccagatgaggcgaaaactcaaattttttttcatgaatccctgtgagaagttctgggctcgaggtagaaaaccatggaaacttgccatacaaattctaaaaattgcaatggtgactatccagctggtcttatttgggctaagtaaccagatggtggtagctttcaaggaagagaatactatagcattcaaacaccttttcctaaaaggatatatggaccgaatggatgacacatatgcagtgtacacacaaagtgacgtgtatgatcagttaatcttcgcagtaaaccagtacttgcagctatacaatgtctccgttgggaatcatgcttatgagaacaaaggtaccaagcaatctgctatggcaatctgtcagcacttctacaagcgaggaaacatctaccctggaaatgatacctttgacatcgatccagaaattgaaactgagtgtttctttgtggagccagatgaaccttttcacattgggacaccagcagaaaataaactgaacttaacactggacttccacagactcctaacagtggagcttcagtttaaactgaaagccattaatctgcagacagttcgtcatcaagaactccctgactgttatgactttactctgactataacatttgacaacaaggcccatagtggaagaattaaaataagtttagataatgacatttccatcagagaatgtaaagactggcatgtatctggatcaattcagaagaacactcattacatgatgatctttgatgcctttgtcattctgacttgcttggtttcattaatcctctgcattagatctgtgattagaggacttcagcttcagcaggagtttgtcaattttttcctcctccattataagaaggaagtttctgtttctgatcaaatggaatttgtcaatggatggtacattatgattattattagtgacatattgacaatcattggatcaattctaaaaatggaaatccaagctaagagtctaactagttatgatgtctgtagcatacttcttgggacttctaccatgctcgtgtggcttggagtcatccgatacctcggtttctttgcaaagtacaacctcctcattttgacccttcaggcagcgctgcccaatgtcatcaggttctgctgctgtgcagctatgatttacttaggttactgcttctgtggatggatcgtgctggggccttaccatgacaagtttcgttctctgaacatggtctctgagtgccttttctctctgataaatggagatgatatgtttgccacgtttgcaaaaatgcagcaaaaaagttacttagtctggctgtttagtagaatttacctctactcattcatcagcctctttatatatatgattttaagtcttttcattgcactgatcactgatacatacgaaacaattaagcaataccaacaagatggcttcccagagactgaacttcgtacatttatatcagaatgcaaagatctacccaactctggaaaatacagattagaagatgaccctccagtatctttattctgctgttgtaaaaagtagctatcaggtttatctgtactttagaggaaaatataatgtgtagctgagttggaacactgtggatattctgagatcagatgtagtatgtttgaagactgttattttgagctaattgagacctataattcaccaataactgtttatatttttaaaagcaatatttaatgtctttgcaactttatgctgggattgtttttaaaaaaactttaatgaggaaagctattggattattattatttcttgtttattttgccatggctttagaatgtattctgtatgcctctcttttgctctgatactgttgctcctgctattctgattgtgcagactgtgtaattagtggaaaacaatccttggtctgactgtgactttggacaactcagtaaccctggcttggaccactctcaggagtccatccttgagagagtgggtgtagttatcatttatacagtaatcattgcattttaaaatcttctcttgaaaggaagaataagagtgcaccagaataagagcgcaccagaataagagcgcaccagctaacaatgtgatacggccatatgtcacttaaggatggagatatgttctgagaaatgtgtcattaggcgattttgtcattaaacatcatagcatgtacttccacaaacctagatggtatagcctactacacacctaggctatttggtatagcctgttggtcctggggtacaaatctgtacaacatgttactgtattgaatacagtaggcaattgtaacacaatggtaagtatctaaacatagaaaagggacagtaaaaatatggttttataatcttctgggaccaccattgtatatgcggtacatcattgaccaaaacatcgttatccagcatatgactgtatttggttatgaaagccaactgttacttgattctgcttttagttcttaagaggatcaggcttttaaatactcatttacaagttttctatcctccttcagtgttaaagtagaaagtaaaaagagtatcttatacatgcatgaaattaaagcatataccaaatgca

SEQ ID NO: 155799 - DNA, 2777 bp, Homo sapiens
  Payload ID: 10605
  Gene Symbol: MCOLN3
  Gene Name: mucolipin 3
  ENST ID: ENST00000490600
  CDS Start-End: 142-567
actctgggcggagcggggctcgaggctgctggagtcgctcgctgactcgccctgcgccctcgccgcggacaccggagctgcggccgctccccgctgtcccccagcttactccaatcaagcctctgcccgccaggaacagagatggcagatcctgaggtagttgtgagtagctgcagctctcatgaagaggaaaatcgctgcaattttaaccagcaaacatctccatctgaggagcttctattagaagaccagatgaggcgaaaactcaaattttttttcatgaatccctgtgagaagttctgggctcgaggtagaaaaccatggaaacttgccatacaaattctaaaaattgcaatggtgactatccagctggtcttatttgggctaagtaaccagatggtggtagctttcaaggaagagaatactatagcattcaaacaccttttcctaaaaggatatatggaccgaatggatgacacatatgcagtgtacacacaaagtgacgtgtatgatcagttaatcttcgcagtaaaccagggtaatgataagtgctatgaagaaaaataaactagcataaggcaataacagtagtctcggagtggtcagaaaatgcctttctgaagacttgaaatcttggggagaatatttcaagctgaaggcgtggcaacagaaggccctgaagctggaaagcgtttgtacttgcagctatacaatgtctccgttgggaatcatgcttatgagaacaaaggtaccaagcaatctgctatggcaatctgtcagcacttctacaagcgaggaaacatctaccctggaaatgatacctttgacatcgatccagaaattgaaactgagtgtttctttgtggagccagatgaaccttttcacattgggacaccagcagaaaataaactgaacttaacactggacttccacagactcctaacagtggagcttcagtttaaactgaaagccattaatctgcagacagttcgtcatcaagaactccctgactgttatgactttactctgactataacatttgacaacaaggcccatagtggaagaattaaaataagtttagataatgacatttccatcagagaatgtaaagactggcatgtatctggatcaattcagaagaacactcattacatgatgatctttgatgcctttgtcattctgacttgcttggtttcattaatcctctgcattagatctgtgattagaggacttcagcttcagcaggagtttgtcaattttttcctcctccattataagaaggaagtttctgtttctgatcaaatggaatttgtcaatggatggtacattatgattattattagtgacatattgacaatcattggatcaattctaaaaatggaaatccaagctaaggtaatttttttcctaatcatgctattgttagtgtcagatttgcactaatggtaatgtatttttccagaatgtaagaattttcagaatgaattgtttcttccaaactgtatatcaagtagacttgaaattggtaatggtaattttcttaaatctagtcaggaggtctcttaggcagagtttttcaaagtgtgatccacaaaccattgcatcagaatcattgggtgcctggtaaagtgtaccatgttagacctactgaattcagactcttcggcggggcctgtgaattcttacacacaccaaaattcatacacaaccaaggtaactaaggtaagagttttttttttttttttaatcttacaagaaatgctcgaatctttaacaaaaatgagtggggctataggggaaagtgaggtcaaggcactatggtgtgcatgcttgcatttgtttcctccgtccattcaaagtgagaatgctcccattttcttactttaccattgatgtgctacaagcttatttattttaagactaacctagcctaaaaatcaactgtccccacaaaataaaaatcacattaaaaaaactaatagtgttcagactaatcttgctcaaacttatgtttccctagtcttgatgcaactgattgagtcacctggggagttggttataaacctgggcagagaccccaaatgcaatggctcagagaagataggagcttatttctgtcttatgcaatagtcagaatgggttttacagactggtgagtagctcaacatctcacagtcattcaggcacccatgttcctcccattttgtttctctgccaccccttaaggacttgccctgactgcatgattattgccgtgttgcctcaaacaggttgcagcttatgggaagcaaaaacacggtatggtagaagctctcccatagactgatggcttggctcaagagtggccgactttatttctgtacatatcccactggatagaatttagtcaatcctaactgcagagggagccagggaacacagcccaggcatgtgcctaggaaggggagaatgggtttaggttgacacttagcagctgccactatatgtggctatagtatgtatcattggaatagatgtttaactttagggacaaataaaaaaccaaaacaaaaaaaggagtaaggggagagatttgcagcaaatctttatttttaccaacctcaactatcattaatttcagtgaaccctaaatggtatccaacaaaatatctttctagaccattcaccgtctctgcctcatagatgatcatatcatgttttcttctcttctgaaacctctaatacccttgtcctatcctcattctaagctgatgaccttacttcctatttcacaaaaa

SEQ ID NO: 155800 - DNA, 1572 bp, Homo sapiens
  Payload ID: 10606
  Gene Symbol: MADCAM1
  Gene Name: mucosal vascular addressin cell adhesion molecule 1
  Uniprot ID: Q13477
  ENST ID: ENST00000215637
  CDS Start-End: 47-1195
ctatttaagcggcttccccgcggcctcgggacagaggggactgagcatggatttcggactggccctcctgctggcggggcttctggggctcctcctcggccagtccctccaggtgaagcccctgcaggtggagcccccggagccggtggtggccgtggccttgggcgcctcgcgccagctcacctgccgcctggcctgcgcggaccgcggggcctcggtgcagtggcggggcctggacaccagcctgggcgcggtgcagtcggacacgggccgcagcgtcctcaccgtgcgcaacgcctcgctgtcggcggccgggacccgcgtgtgcgtgggctcctgcgggggccgcaccttccagcacaccgtgcagctccttgtgtacgccttcccggaccagctgaccgtctccccagcagccctggtgcctggtgacccggaggtggcctgtacggcccacaaagtcacgcccgtggaccccaacgcgctctccttctccctgctcgtcgggggccaggaactggagggggcgcaagccctgggcccggaggtgcaggaggaggaggaggagccccagggggacgaggacgtgctgttcagggtgacagagcgctggcggctgccgcccctggggacccctgtcccgcccgccctctactgccaggccacgatgaggctgcctggcttggagctcagccaccgccaggccatccccgtcctgcacagcccgacctccccggagcctcccgacaccacctccccggagtctcccgacaccacctccccggagtctcccgacaccacctcccaggagcctcccgacaccacctccccggagcctcccgacaagacctccccggagcccgccccccagcagggctccacacacacccccaggagcccaggctccaccaggactcgccgccctgagatctcccaggctgggcccacgcagggagaagtgatcccaacaggctcgtccaaacctgcgggtgaccagctgcccgcggctctgtggaccagcagtgcggtgctgggactgctgctcctggccttgcccacctatcacctctggaaacgctgccggcacctggctgaggacgacacccacccaccagcttctctgaggcttctgccccaggtgtcggcctgggctgggttaagggggaccggccaggtcgggatcagcccctcctgagtggccagcctttccccctgtgaaagcaaaatagcttggaccccttcaagttgagaactggtcagggcaaacctgcctcccattctactcaaagtcatccctctgttcacagagatggatgcatgttctgattgcctctttggagaagctcatcagaaactcaaaagaaggccactgtttgtctcacctacccatgacctgaagcccctccctgagtggtccccacctttctggacggaaccacgtactttttacatacattgattcatgtctcacgtctccctaaaaatgcgtaagaccaagctgtgccctgaccaccctgggcccctgtcgtcaggacctcctgaggctttggcaaataaacctcctaaaatgat

SEQ ID NO: 155801 - DNA, 1309 bp, Homo sapiens
  Payload ID: 10606
  Gene Symbol: MADCAM1
  Gene Name: mucosal vascular addressin cell adhesion molecule 1
  Uniprot ID: Q13477
  ENST ID: ENST00000346144
  CDS Start-End: 47-934
ctatttaagcggcttccccgcggcctcgggacagaggggactgagcatggatttcggactggccctcctgctggcggggcttctggggctcctcctcggccagtccctccaggtgaagcccctgcaggtggagcccccggagccggtggtggccgtggccttgggcgcctcgcgccagctcacctgccgcctggcctgcgcggaccgcggggcctcggtgcagtggcggggcctggacaccagcctgggcgcggtgcagtcggacacgggccgcagcgtcctcaccgtgcgcaacgcctcgctgtcggcggccgggacccgcgtgtgcgtgggctcctgcgggggccgcaccttccagcacaccgtgcagctccttgtgtacgccttcccggaccagctgaccgtctccccagcagccctggtgcctggtgacccggaggtggcctgtacggcccacaaagtcacgcccgtggaccccaacgcgctctccttctccctgctcgtcgggggccaggaactggagggggcgcaagccctgggcccggaggtgcaggaggaggaggaggagccccagggggacgaggacgtgctgttcagggtgacagagcgctggcggctgccgcccctggggacccctgtcccgcccgccctctactgccaggccacgatgaggctgcctggcttggagctcagccaccgccaggccatccccgcgtccaaacctgcgggtgaccagctgcccgcggctctgtggaccagcagtgcggtgctgggactgctgctcctggccttgcccacctatcacctctggaaacgctgccggcacctggctgaggacgacacccacccaccagcttctctgaggcttctgccccaggtgtcggcctgggctgggttaagggggaccggccaggtcgggatcagcccctcctgagtggccagcctttccccctgtgaaagcaaaatagcttggaccccttcaagttgagaactggtcagggcaaacctgcctcccattctactcaaagtcatccctctgttcacagagatggatgcatgttctgattgcctctttggagaagctcatcagaaactcaaaagaaggccactgtttgtctcacctacccatgacctgaagcccctccctgagtggtccccacctttctggacggaaccacgtactttttacatacattgattcatgtctcacgtctccctaaaaatgcgtaagaccaagctgtgccctgaccaccctgggcccctgtcgtcaggacctcctgaggctttggcaaataaacctcctaaaatg

SEQ ID NO: 155802 - DNA, 603 bp, Homo sapiens
  Payload ID: 10606
  Gene Symbol: MADCAM1
  Gene Name: mucosal vascular addressin cell adhesion molecule 1
  Uniprot ID: Q13477
  ENST ID: ENST00000382683
  CDS Start-End: 1-603
atggatttcggactggccctcctgctggcggggcttctggggctcctcctcgccttcccggaccagctgaccgtctccccagcagccctggtgcctggtgacccggaggtggcctgtacggcccacaaagtcacgcccgtggaccccaacgcgctctccttctccctgctcgtcgggggccaggaactggagggggcgcaagccctgggcccggaggtgcaggaggaggaggaggagccccagggggacgaggacgtgctgttcagggtgacagagcgctggcggctgccgcccctggggacccctgtcccgcccgccctctactgccaggccacgatgaggctgcctggcttggagctcagccaccgccaggccatccccgcgtccaaacctgcgggtgaccagctgcccgcggctctgtggaccagcagtgcggtgctgggactgctgctcctggccttgcccacctatcacctctggaaacgctgccggcacctggctgaggacgacacccacccaccagcttctctgaggcttctgccccaggtgtcggcctgggctgggttaagggggaccggccaggtcgggatcagcccctcctga

SEQ ID NO: 155803 - DNA, 1723 bp, Homo sapiens
  Payload ID: 10606
  Gene Symbol: MADCAM1
  Gene Name: mucosal vascular addressin cell adhesion molecule 1
  ENST ID: ENST00000587541
  CDS Start-End: 855-1346
acccgcggaaaaggagggggagcggctggtcagctgcgccctgcgggtcgagaatgtcatcagcagggatggcggcgctttgagtgctgagcgcggccccgaccgggaccccctacccttgacccaccctcgcaggccgagccccgactcccgacccgccgtcgcagcccgcggccccgacctctgacccgccctcgcagcccgcggccccgacctctgacccgccctcccagccagaccctctacgcccgacccgccctcgcagcccatggcccatcggcccggcagtggacgcagagcctcggccccgttccctccccggaccccccggacccgctctccgtcctccctgcagagccgagggccttggcccagccccgcatcctccccgaccgtgctcgatccagcccgggtgtgctgcacccgaaacaggctcccgggggccgtcgggcctgtgggtgaccgtgcaggccaggatctcccccttcccagtcgtgacaaccacagatggccccagatgccacgttagggttagtgcctcctgggggcgggattgcggccgggggagaaccaccctcccaacccgttaggaactgcagggacggagagcgcgctcgggatgtccagcactcagcgcgggttgggtggcgaatggagagcgagtcgtcctcagaggccgccggcctgcaggcgagaaccctcccagccaggaggctgcggctctgcctgaaccccgacccagggcgaacacccacatttggcccctgcccggtgctgagagaggccagagcggcgtccccagaagcggagcgggagccccacgtccggcggccacgatagaaagaagaaaagaaatgggtggtatcctgcacagcccgacctccccggagcctcccgacaccacctccccggagtctcccgacaccacctccccggagtctcccgacaccacctcccaggagcctcccgacaccacctccccggagcctcccgacaagacctccccggagcccgccccccagcagggctccacacacacccccaggagcccaggctccaccaggactcgccgccctgagatctcccaggctgggcccacgcagggagaagtgatcccaacaggctcgtccaaacctgcgggtgaccagctgcccgcggctctgtggaccagcagtgcggtgctgggactgctgctcctggccttgcccacctatcacctctggaaacgctgccggcacctggctgaggacgacacccacccaccagcttctctgaggcttctgccccaggtgtcggcctgggctgggttaagggggaccggccaggtcgggatcagcccctcctgagtggccagcctttccccctgtgaaagcaaaatagcttggaccccttcaagttgagaactggtcagggcaaacctgcctcccattctactcaaagtcatccctctgttcacagagatggatgcatgttctgattgcctctttggagaagctcatcagaaactcaaaagaaggccactgtttgtctcacctacccatgacctgaagcccctccctgagtggtccccacctttctggacggaaccacgtactttttacatacattgattcatgtctcacgtctccctaaaaatgcgtaagaccaagctgtgccctgaccaccctgggcccctgtcgtcaggacctcctgaggctttggcaaataaacctcctaaaatgat

SEQ ID NO: 155804 - DNA, 1461 bp, Homo sapiens
  Payload ID: 10606
  Gene Symbol: MADCAM1
  Gene Name: mucosal vascular addressin cell adhesion molecule 1
  ENST ID: ENST00000622462
  CDS Start-End: 47-1219
ctatttaagcggcttccccgcggcctcgggacagaggggactgagcatggatttcggactggccctcctgctggcggggcttctggggctcctcctcggccagtccctccaggtgaagcccctgcaggtggagcccccggagccggtggtggccgtggccttgggcgcctcgcgccagctcacctgccgcctggcctgcgcggaccgcggggcctcggtgcagtggcggggcctggacaccagcctgggcgcggtgcagtcggacacgggccgcagcgtcctcaccgtgcgcaacgcctcgctgtcggcggccgggacccgcgtgtgcgtgggctcctgcgggggccgcaccttccagcacaccgtgcagctccttgtgtacgccttcccggaccagctgaccgtctccccagcagccctggtgcctggtgacccggaggtggcctgtacggcccacaaagtcacgcccgtggaccccaacgcgctctccttctccctgctcgtcgggggccaggaactggagggggcgcaagccctgggcccggaggtgcaggaggaggaggaggagccccagggggacgaggacgtgctgttcagggtgacagagcgctggcggctgccgcccctggggacccctgtcccgcccgccctctactgccaggccacgatgaggctgcctggcttggagctcagccaccgccaggccatccccgcccttcacgctctgtccaatcccgaagcccctgccccgacctccccggagcctcccgacaccacctccccggagtctcccgacaccacctccccggagtctcccgacaccacctcccaggagcctcccgacaccacctccccggagcctcccgacaagacctccccggagcccgccccccagcagggctccacacacacccccaggagcccaggctccaccaggactcgccgccctgagatctcccaggctgggcccacgcagggagaagtgatcccaacaggctcgtccaaacctgcgggtgaccagctgcccgcggctctgtggaccagcagtgcggtgctgggactgctgctcctggccttgcccacctatcacctctggaaacgctgccggcacctggctgaggacgacacccacccaccagcttctctgaggcttctgccccaggtgtcggcctgggctgggttaagggggaccggccaggtcgggatcagcccctcctgagtggccagcctttccccctgtgaaagcaaaatagcttggaccccttcaagttgagaactggtcagggcaaacctgcctcccattctactcaaagtcatccctctgttcacagagatggatgcatgttctgattgcctctttggagaagctcatcagaaactcaaaagaaggccactgtttgtctcacctacccatgacctgaagcccctccctgagtggtccccacctttctggacggaacc

SEQ ID NO: 155805 - DNA, 1509 bp, Homo sapiens
  Payload ID: 10606
  Gene Symbol: MADCAM1
  Gene Name: mucosal vascular addressin cell adhesion molecule 1
  ENST ID: ENST00000613880
  CDS Start-End: 47-1267
ctatttaagcggcttccccgcggcctcgggacagaggggactgagcatggatttcggactggccctcctgctggcggggcttctggggctcctcctcggccagtccctccaggtgaagcccctgcaggtggagcccccggagccggtggtggccgtggccttgggcgcctcgcgccagctcacctgccgcctggcctgcgcggaccgcggggcctcggtgcagtggcggggcctggacaccagcctgggcgcggtgcagtcggacacgggccgcagcgtcctcaccgtgcgcaacgcctcgctgtcggcggccgggacccgcgtgtgcgtgggctcctgcgggggccgcaccttccagcacaccgtgcagctccttgtgtacgccttcccggaccagctgaccgtctccccagcagccctggtgcctggtgacccggaggtggcctgtacggcccacaaagtcacgcccgtggaccccaacgcgctctccttctccctgctcgtcgggggccaggaactggagggggcgcaagccctgggcccggaggtgcaggaggaggaggaggagccccagggggacgaggacgtgctgttcagggtgacagagcgctggcggctgccgcccctggggacccctgtcccgcccgccctctactgccaggccacgatgaggctgcctggcttggagctcagccaccgccaggccatccccgcccttcacgctctgtccaatcccgaagcccctgcggcagaaagcccccaagcaccttctctctccacgccagcctcctcccacccgacctccccggagcctcccgacaccacctccccggagtctcccgacaccacctccccggagtctcccgacaccacctcccaggagcctcccgacaccacctccccggagcctcccgacaagacctccccggagcccgccccccagcagggctccacacacacccccaggagcccaggctccaccaggactcgccgccctgagatctcccaggctgggcccacgcagggagaagtgatcccaacaggctcgtccaaacctgcgggtgaccagctgcccgcggctctgtggaccagcagtgcggtgctgggactgctgctcctggccttgcccacctatcacctctggaaacgctgccggcacctggctgaggacgacacccacccaccagcttctctgaggcttctgccccaggtgtcggcctgggctgggttaagggggaccggccaggtcgggatcagcccctcctgagtggccagcctttccccctgtgaaagcaaaatagcttggaccccttcaagttgagaactggtcagggcaaacctgcctcccattctactcaaagtcatccctctgttcacagagatggatgcatgttctgattgcctctttggagaagctcatcagaaactcaaaagaaggccactgtttgtctcacctacccatgacctgaagcccctccctgagtggtccccacctttctggacggaacc

SEQ ID NO: 155806 - DNA, 1203 bp, Homo sapiens
  Payload ID: 10606
  Gene Symbol: MADCAM1
  Gene Name: mucosal vascular addressin cell adhesion molecule 1
  ENST ID: ENST00000621286
  CDS Start-End: 1-1203
atggatttcggactggccctcctgctggcggggcttctggggctcctcctcggccagtccctccaggtgaagcccctgcaggtggagcccccggagccggtggtggccgtggccttgggcgcctcgcgccagctcacctgccgcctggcctgcgcggaccgcggggcctcggtgcagtggcggggcctggacaccagcctgggcgcggtgcagtcggacacgggccgcagcgtcctcaccgtgcgcaacgcctcgctgtcggcggccgggacccgcgtgtgcgtgggctcctgcgggggccgcaccttccagcacaccgtgcagctccttgtgtacgccttcccggaccagctgaccgtctccccagcagccctggtgcctggtgacccggaggtggcctgtacggcccacaaagtcacgcccgtggaccccaacgcgctctccttctccctgctcgtcgggggccaggaactggagggggcgcaagccctgggcccggaggtgcaggaggaggaggaggagccccagggggacgaggacgtgctgttcagggtgacagagcgctggcggctgccgcccctggggacccctgtcccgcccgccctctactgccaggccacgatgaggctgcctggcttggagctcagccaccgccaggccatccccgtccgctgggtgccctggagacccacccgctcgccagccttgacaagcacttcggagtcccacagcccgacctccccggagcctcccgacaccacctccccggagtctcccgacaccacctccccggagtctcccgacaccacctcccaggagcctcccgacaccacctccccggagcctcccgacaagacctccccggagcccgccccccagcagggctccacacacacccccaggagcccaggctccaccaggactcgccgccctgagatctcccaggctgggcccacgcagggagaagtgatcccaacaggctcgtccaaacctgcgggtgaccagctgcccgcggctctgtggaccagcagtgcggtgctgggactgctgctcctggccttgcccacctatcacctctggaaacgctgccggcacctggctgaggacgacacccacccaccagcttctctgaggcttctgccccaggtgtcggcctgggctgggttaagggggaccggccaggtcgggatcagcccctcctga

SEQ ID NO: 155807 - DNA, 1485 bp, Homo sapiens
  Payload ID: 10606
  Gene Symbol: MADCAM1
  Gene Name: mucosal vascular addressin cell adhesion molecule 1
  ENST ID: ENST00000619333
  CDS Start-End: 47-1243
ctatttaagcggcttccccgcggcctcgggacagaggggactgagcatggatttcggactggccctcctgctggcggggcttctggggctcctcctcggccagtccctccaggtgaagcccctgcaggtggagcccccggagccggtggtggccgtggccttgggcgcctcgcgccagctcacctgccgcctggcctgcgcggaccgcggggcctcggtgcagtggcggggcctggacaccagcctgggcgcggtgcagtcggacacgggccgcagcgtcctcaccgtgcgcaacgcctcgctgtcggcggccgggacccgcgtgtgcgtgggctcctgcgggggccgcaccttccagcacaccgtgcagctccttgtgtacgccttcccggaccagctgaccgtctccccagcagccctggtgcctggtgacccggaggtggcctgtacggcccacaaagtcacgcccgtggaccccaacgcgctctccttctccctgctcgtcgggggccaggaactggagggggcgcaagccctgggcccggaggtgcaggaggaggaggaggagccccagggggacgaggacgtgctgttcagggtgacagagcgctggcggctgccgcccctggggacccctgtcccgcccgccctctactgccaggccacgatgaggctgcctggcttggagctcagccaccgccaggccatccccgcgctccatggctggctctctcctcctccccctcagaacacgggccctcacgggcctcacccgacctccccggagcctcccgacaccacctccccggagtctcccgacaccacctccccggagtctcccgacaccacctcccaggagcctcccgacaccacctccccggagcctcccgacaagacctccccggagcccgccccccagcagggctccacacacacccccaggagcccaggctccaccaggactcgccgccctgagatctcccaggctgggcccacgcagggagaagtgatcccaacaggctcgtccaaacctgcgggtgaccagctgcccgcggctctgtggaccagcagtgcggtgctgggactgctgctcctggccttgcccacctatcacctctggaaacgctgccggcacctggctgaggacgacacccacccaccagcttctctgaggcttctgccccaggtgtcggcctgggctgggttaagggggaccggccaggtcgggatcagcccctcctgagtggccagcctttccccctgtgaaagcaaaatagcttggaccccttcaagttgagaactggtcagggcaaacctgcctcccattctactcaaagtcatccctctgttcacagagatggatgcatgttctgattgcctctttggagaagctcatcagaaactcaaaagaaggccactgtttgtctcacctacccatgacctgaagcccctccctgagtggtccccacctttctggacggaacc

SEQ ID NO: 155808 - DNA, 1491 bp, Homo sapiens
  Payload ID: 10606
  Gene Symbol: MADCAM1
  Gene Name: mucosal vascular addressin cell adhesion molecule 1
  ENST ID: ENST00000617201
  CDS Start-End: 47-1249
ctatttaagcggcttccccgcggcctcgggacagaggggactgagcatggatttcggactggccctcctgctggcggggcttctggggctcctcctcggccagtccctccaggtgaagcccctgcaggtggagcccccggagccggtggtggccgtggccttgggcgcctcgcgccagctcacctgccgcctggcctgcgcggaccgcggggcctcggtgcagtggcggggcctggacaccagcctgggcgcggtgcagtcggacacgggccgcagcgtcctcaccgtgcgcaacgcctcgctgtcggcggccgggacccgcgtgtgcgtgggctcctgcgggggccgcaccttccagcacaccgtgcagctccttgtgtacgccttcccggaccagctgaccgtctccccagcagccctggtgcctggtgacccggaggtggcctgtacggcccacaaagtcacgcccgtggaccccaacgcgctctccttctccctgctcgtcgggggccaggaactggagggggcgcaagccctgggcccggaggtgcaggaggaggaggaggagccccagggggacgaggacgtgctgttcagggtgacagagcgctggcggctgccgcccctggggacccctgtcccgcccgccctctactgccaggccacgatgaggctgcctggcttggagctcagccaccgccaggccatccccgtccgctgggtgccctggagacccacccgctcgccagccgacagcacttcgccagtcctgcacagcccgacctccccggagcctcccgacaccacctccccggagtctcccgacaccacctccccggagtctcccgacaccacctcccaggagcctcccgacaccacctccccggagcctcccgacaagacctccccggagcccgccccccagcagggctccacacacacccccaggagcccaggctccaccaggactcgccgccctgagatctcccaggctgggcccacgcagggagaagtgatcccaacaggctcgtccaaacctgcgggtgaccagctgcccgcggctctgtggaccagcagtgcggtgctgggactgctgctcctggccttgcccacctatcacctctggaaacgctgccggcacctggctgaggacgacacccacccaccagcttctctgaggcttctgccccaggtgtcggcctgggctgggttaagggggaccggccaggtcgggatcagcccctcctgagtggccagcctttccccctgtgaaagcaaaatagcttggaccccttcaagttgagaactggtcagggcaaacctgcctcccattctactcaaagtcatccctctgttcacagagatggatgcatgttctgattgcctctttggagaagctcatcagaaactcaaaagaaggccactgtttgtctcacctacccatgacctgaagcccctccctgagtggtccccacctttctggacggaacc

SEQ ID NO: 155809 - DNA, 2091 bp, Homo sapiens
  Payload ID: 10607
  Gene Symbol: MCIDAS
  Gene Name: multiciliate differentiation and DNA synthesis associated cell cycle protein
  ENST ID: ENST00000513468
  CDS Start-End: 178-717
cccgccatctctcagcacctcctcggcagcccctcggctccttctcggtcacgcgcctgccccaacctctggctggcttcggagcctgcaggcactgaagggagtgcagggtgtggatcgctgccccagcccgggccgccgcctccgagcagtcggcacccggaggcaggaggcacaatgcaggcgtgcgggggcggcgcggccggccgtcgggccttcgacagcatctgccccaacagaatgctggcactgccgggccgggcgctgctctgcaagccggggaagccggagaggaagttcgctcctccgcggaagttcttccccggatgcacaggcgggagcccggtgtcggtgtacgaggatcccccggacgccgagcccacagcgctgccagccctcaccaccatagacctgcaggacctcgctgactgctcttcgctactcgggtccgacgcgccgcctggtggtgacctggccgcctcgcagaaccattcccaccaaacggaagcagacttcaatctgcaagatttcagagacacggtggatgatctcatttcaggcaaactcatcctctatgatgtcgcctaccctggccagcggagacttccccttctctccttgcgacatatcaccattcgggccctgcctctccccgccactggacccacgggccctgcagtcaccaccgctgcgccctccagacgtgcccccgcctgagcaatactggaaggaggtggcggaccagaaccagagagcgttgggagacgcgcttgttgagaataatcaactgcacgtgacattgacccagaaacaggaggagatcgcctcgctcaaggagcggaacgtgcagctgaaggaactcgccagccgaacccggcacctggcctcggtgctggataagctgatgatcacacagtcccgggattgtggggcggcggccgagcccttcctgctcaaggcgaaggccaaaaggagcctggaggagttggtcagcgctgcggggcaggattgcgcggaagtggacgccatcctgagggagatttccgagcgctgcgatgaagcccttcagagccgcgatcccaagcggccccgactgctgccagagcccgcgaatactgacaccaggcccgggaacctgcatggcgccttccgggggctgcgcacagactgcagccggagcgcgttgaacctgagccacagtgagctggaggagggcggctccttcagcacccgcatccgcagccacagcaccatccgcaccctcgccttcccccagggcaatgccttcaccatcagaacagccaacgggggttacaagttccgctgggtccccagttgagctgtgatgtggtcccccaaaacactgccctgtgtttccactgaagtgcctgggggcttcccagaactttgccttcaggttgaatgccaccctgaaacactttttcaggaacaaaagcatcttgataccgatgcattgtaaatttctgctacaaaacattgtatagcccctccccttgtcacagtgaaactctgtttatatatgtatatgtcacatatgtcacagccaattttaaaagtatttatttttagcagctttgaattatgtatttttagagcagggaaggatttagaaaccatagttacttttataattatgtaatgctctaatattataagaaggaaaagaaggctctaagagattaagtaatttcctgcaatgggaaacactggaacctttcaatcactttaactagtcacttaaggactctaggcccagaagcctggtttctgggtgaatgtttttatacatcactcaacttccctcgtcctaaaaggacacctaattttgttactattgaaaatttttattttggtggccagaatacgaaatcgggagaggtaacccaaacagttgtcttaggaaaaggcagattctcagaggcaatgggctatcaacaaaataggtgctaagcacatttgtttgtaatgatcattcatataatttagaagatttatggtaacagtttatattcattatccatacagttctatttgtgcaaatagaataaccacctataagcaaacagtgtt

SEQ ID NO: 155810 - DNA, 1736 bp, Homo sapiens
  Payload ID: 10607
  Gene Symbol: MCIDAS
  Gene Name: multiciliate differentiation and DNA synthesis associated cell cycle protein
  Uniprot ID: D6RGH6
  ENST ID: ENST00000513312
  CDS Start-End: 178-1335
cccgccatctctcagcacctcctcggcagcccctcggctccttctcggtcacgcgcctgccccaacctctggctggcttcggagcctgcaggcactgaagggagtgcagggtgtggatcgctgccccagcccgggccgccgcctccgagcagtcggcacccggaggcaggaggcacaatgcaggcgtgcgggggcggcgcggccggccgtcgggccttcgacagcatctgccccaacagaatgctggcactgccgggccgggcgctgctctgcaagccggggaagccggagaggaagttcgctcctccgcggaagttcttccccggatgcacaggcgggagcccggtgtcggtgtacgaggatcccccggacgccgagcccacagcgctgccagccctcaccaccatagacctgcaggacctcgctgactgctcttcgctactcgggtccgacgcgccgcctggtggtgacctggccgcctcgcagaaccattcccaccaaacggaagcagacttcaatctgcaagatttcagagacacggtggatgatctcatttcagactcatcctctatgatgtcgcctaccctggccagcggagacttccccttctctccttgcgacatatcaccattcgggccctgcctctccccgccactggacccacgggccctgcagtcaccaccgctgcgccctccagacgtgcccccgcctgagcaatactggaaggaggtggcggaccagaaccagagagcgttgggagacgcgcttgttgagaataatcaactgcacgtgacattgacccagaaacaggaggagatcgcctcgctcaaggagcggaacgtgcagctgaaggaactcgccagccgaacccggcacctggcctcggtgctggataagctgatgatcacacagtcccgggattgtggggcggcggccgagcccttcctgctcaaggcgaaggccaaaaggagcctggaggagttggtcagcgctgcggggcaggattgcgcggaagtggacgccatcctgagggagatttccgagcgctgcgatgaagcccttcagagccgcgatcccaagcggccccgactgctgccagagcccgcgaatactgacaccaggcccgggaacctgcatggcgccttccgggggctgcgcacagactgcagccggagcgcgttgaacctgagccacagtgagctggaggagggcggctccttcagcacccgcatccgcagccacagcaccatccgcaccctcgccttcccccagggcaatgccttcaccatcagaacagccaacgggggttacaagttccgctgggtccccagttgagctgtgatgtggtcccccaaaacactgccctgtgtttccactgaagtgcctgggggcttcccagaactttgccttcaggttgaatgccaccctgaaacactttttcaggaacaaaagcatcttgataccgatgcattgtaaatttctgctacaaaacattgtatagcccctccccttgtcacagtgaaactctgtttatatatgtatatgtcacatatgtcacagccaattttaaaagtatttatttttagcagctttgaattatgtatttttagagcagggaaggatttagaaaccatagttacttttataattatgtaatgctctaatattataagaaggaaaagaaggctctaagagattaagtaatttcctgcaatgggaaacactggaacctttca

SEQ ID NO: 155811 - DNA, 4967 bp, Homo sapiens
  Payload ID: 10608
  Gene Symbol: MMRN1
  Gene Name: multimerin 1
  Uniprot ID: Q13201
  ENST ID: ENST00000264790
  CDS Start-End: 72-3758
cagctatcaaaaaggccataaggattttgtccccaaatttcacatgagctaccttgcttcaaactactgagatgaagggggcaagattatttgtccttctttctagtttatggagtgggggcattgggcttaacaacagtaagcattcttggactatacctgaggatgggaactctcagaagactatgccttctgcttcagttcctccaaataaaatacaaagtttgcaaatactgccaaccactcgggtcatgtcggcggagatagctacaactccagaggcaagaacttctgaagacagtcttcttaaatcaacactgcctccctcagaaacaagtgcacctgctgagggtgtgagaaatcaaactctcacatccacagagaaagcagaaggagtggtcaagttacagaatcttaccctcccaaccaacgctagcatcaagttcaatcctggagcagaatcagtggtcctttccaattctacactgaaatttcttcagagctttgccagaaagtcaaatgaacaagcaacttctctaaacacagttggaggcactggaggcattggaggcgttggaggcactggaggcgtgggaaatcgagccccacgggaaacatacctcagccggggtgacagcagttccagccaaagaactgactaccaaaaatcaaatttcgaaacaactagaggaaagaattggtgtgcttatgtacataccaggttatctcccacagtgatattggacaaccaggtcacttatgtcccaggtgggaaaggaccttgtggctggaccggtggatcctgtcctcagagatctcagaagatatccaatcctgtctataggatgcaacataaaattgtcacctcattggattggaggtgctgtcctggatacagtgggccgaaatgtcaactaagagcccaggaacagcaaagtttgatacacaccaaccaggctgaaagtcatacagctgttggcagaggagtagctgagcagcagcagcagcaaggctgtggtgacccagaagtgatgcaaaaaatgactgatcaggtgaactaccaggcaatgaaactgactcttctgcagaagaagattgacaatatttctttgactgtgaatgatgtaaggaacacttactcctccctagaaggaaaagtcagcgaagataaaagcagagaatttcaatctcttctaaaaggtctaaaatccaaaagcattaatgtactgataagagacatagtaagagaacaatttaaaatttttcaaaatgacatgcaagagactgtagcacagctcttcaagactgtatcaagtctatcagaggacctcgaaagcaccaggcaaataattcaaaaagttaatgaatctgtggtttcaatagcagcccagcaaaagtttgttttggtgcaagagaatcggcccactttgactgatatagtggaactaaggaatcacattgtgaatgtaaggcaagaaatgactcttacatgtgagaagcctattaaagaactagaagtaaagcagactcatttagaaggtgctctagaacaggaacactcaagaagcattctgtattatgaatccctcaataaaactctttctaaattgaaggaagtacatgagcagcttttatcaactgaacaggtatcagaccagaagaatgctccagctgctgagtcagttagcaataatgtcactgagtacatgtctactttacatgaaaatataaagaagcagagtttgatgatgctgcaaatgtttgaagatttgcacattcaagaaagcaagattaacaatctcaccgtctctttggagatggagaaagagtctctcagaggtgaatgtgaagacatgttatccaaatgcagaaatgattttaaatttcaacttaaggacacagaagagaatttacatgtgttaaatcaaacattggctgaagttctctttccaatggacaataagatggacaaaatgagtgagcaactaaatgatttgacttatgatatggagatccttcaacccttgcttgagcagggagcatcactcagacagacaatgacatatgaacaaccaaaggaagcaatagtgataaggaaaaagatagaaaatctgactagtgctgtcaatagtctaaattttattatcaaagaacttacaaaaagacacaacttacttagaaatgaagtacagggtcgtgatgatgccttagaaagacgtatcaatgaatatgccttagaaatggaagatggcctcaataagacaatgactattataaataatgctattgatttcattcaagataactatgccctaaaagagactttaagtactattaaggataatagtgagatccatcataaatgtacctccgatatggaaactattttgacatttattcctcagttccaccgtctgaatgattctattcagactttggtcaatgacaatcagagatataactttgttttgcaagtcgccaagacccttgcaggtattcccagagatgagaaactaaatcagtccaacttccaaaagatgtatcaaatgttcaatgaaaccacttcccaagtgagaaaataccagcaaaatatgagtcatttggaagaaaaactactcttaactaccaagatttccaaaaattttgagactcggttgcaagacattgagtctaaagttacccagacgctcataccttattatatttcagttaaaaaaggcagtgtagttacaaatgagagagatcaggctcttcaactgcaagtattaaattccagatttaaggcgttggaagcaaaatctatccatctttcaattaacttcttttcgcttaacaaaactctccacgaagttttaacaatgtgtcacaatgcttctacaagtgtgtcagaactgaatgctaccatccctaagtggataaaacattccctgccagatattcaacttcttcagaaaggtctaacagaatttgtggaaccaataattcaaataaaaactcaagctgccctatctaatttaacttgttgtatagatcgatcgttgcctggtagtctggcaaatgttgtcaagtctcagaagcaagtaaaatcattgccaaagaaaattaacgcacttaagaaaccaacggtaaatcttaccacagtcctgataggccggactcaaagaaacacggacaacataatatatcctgaggagtattcaagctgtagtcggcatccgtgccaaaatgggggcacgtgcataaatggaagaactagctttacctgtgcctgcagacatccttttactggtgacaactgcactatcaagcttgtggaagaaaatgctttagctccagatttttccaaaggatcttacagatatgcacccatggtggcattttttgcatctcatacgtatggaatgactatacctggtcctatcctgtttaataacttggatgtcaattatggagcttcatataccccaagaactggaaaatttagaattccgtatcttggagtatatgttttcaagtacaccatcgagtcatttagtgctcatatttctggatttttagtggttgatggaatagacaagcttgcatttgagtctgaaaatattaacagtgaaatacactgtgatagggttttaactggggatgccttattagaattaaattatgggcaggaagtctggttacgacttgcaaaaggaacaattccagccaagtttccccctgttactacatttagtggctatttattatatcgtacataagttagtatgaaaaacagactatcacctttattgagaaacagccagtgttttcatttatctttgcttgcacatctgctctgttttggtttttctacaggaaatgaaaatcaacttgtttttttaatatgagtaaacttgtatgtctattttataaaattatttgaatattgtttaatgtctgaatatgaaagagttcttgatcctaaagaaatttagtggcacagaaaacaaagtgaatttgttagcataattattcctattcttatttcttcattttaagtcattgcaatggaaagtaatattataaaatggtaattacaacatattatcagtcacagttttctttccaattaaacacttaacttttgttattccctgtatataaatatataacacacattttctagattcacaaatttaaataaattactcaaaaaatgaaaattgattttgtaaacttttatttttactctttacgttgagttgatcaattttccatactaagattttcattcagaatcaaaattaagaaagttggactgaaaatatgaaaaatgcttaactattgttctcttcctataattctctaattataacatagtaatttacatgtagttggacatgtacactcaagtctaagaatatatgagtggatcatttaccgccccccgccccacaacatctataaggggcaaaaagtctttttctaataagtattcttctatggtagtacctacagatctgcccttcttcttctaaagggtaagtcataatctgtgtaatactacaatttatgggatgctcactatgccctgtttctcttctaaacaatttacatgtaatgtctcattcctcacaataacccttgtaaagtgggcatgattaccatgatttttatagttgaagaacctaagacacagagaccaaggcccatgagctcatagggctgaggcaggatttggaatcaggccatgtcttctccagagcccacatccatcctttctctatattgcctcccacagatgtgctaaaatttatttaactaatcctttatcctctatttgtgttgtctcccattttttattattacaatattactgtggtgaacatgcttaaaaatacattccttggatatctgacaacgtgtttctgaaaaacagattttcataagtaataataaaaataataataaaaaagttttggtatggt

SEQ ID NO: 155812 - DNA, 5217 bp, Homo sapiens
  Payload ID: 10608
  Gene Symbol: MMRN1
  Gene Name: multimerin 1
  Uniprot ID: Q13201
  ENST ID: ENST00000394980
  CDS Start-End: 320-4006
agagaggccaagaggtttctgcttctattgatgttagcatttggttataaccacgggcaaagaatattaagctttgtcagagacccttcagcacttccatagagccatcccactagaggtcacagatcacaaaaaccctacagaaacaggaaaccgaacttcctgagtacgctacaaaacacagaaacctgtttcctctacacatctcaaactggcaaaactcagtcttagcagattcagtgtggaagcagctatcaaaaaggccataaggattttgtccccaaatttcacatgagctaccttgcttcaaactactgagatgaagggggcaagattatttgtccttctttctagtttatggagtgggggcattgggcttaacaacagtaagcattcttggactatacctgaggatgggaactctcagaagactatgccttctgcttcagttcctccaaataaaatacaaagtttgcaaatactgccaaccactcgggtcatgtcggcggagatagctacaactccagaggcaagaacttctgaagacagtcttcttaaatcaacactgcctccctcagaaacaagtgcacctgctgagggtgtgagaaatcaaactctcacatccacagagaaagcagaaggagtggtcaagttacagaatcttaccctcccaaccaacgctagcatcaagttcaatcctggagcagaatcagtggtcctttccaattctacactgaaatttcttcagagctttgccagaaagtcaaatgaacaagcaacttctctaaacacagttggaggcactggaggcattggaggcgttggaggcactggaggcgtgggaaatcgagccccacgggaaacatacctcagccggggtgacagcagttccagccaaagaactgactaccaaaaatcaaatttcgaaacaactagaggaaagaattggtgtgcttatgtacataccaggttatctcccacagtgatattggacaaccaggtcacttatgtcccaggtgggaaaggaccttgtggctggaccggtggatcctgtcctcagagatctcagaagatatccaatcctgtctataggatgcaacataaaattgtcacctcattggattggaggtgctgtcctggatacagtgggccgaaatgtcaactaagagcccaggaacagcaaagtttgatacacaccaaccaggctgaaagtcatacagctgttggcagaggagtagctgagcagcagcagcagcaaggctgtggtgacccagaagtgatgcaaaaaatgactgatcaggtgaactaccaggcaatgaaactgactcttctgcagaagaagattgacaatatttctttgactgtgaatgatgtaaggaacacttactcctccctagaaggaaaagtcagcgaagataaaagcagagaatttcaatctcttctaaaaggtctaaaatccaaaagcattaatgtactgataagagacatagtaagagaacaatttaaaatttttcaaaatgacatgcaagagactgtagcacagctcttcaagactgtatcaagtctatcagaggacctcgaaagcaccaggcaaataattcaaaaagttaatgaatctgtggtttcaatagcagcccagcaaaagtttgttttggtgcaagagaatcggcccactttgactgatatagtggaactaaggaatcacattgtgaatgtaaggcaagaaatgactcttacatgtgagaagcctattaaagaactagaagtaaagcagactcatttagaaggtgctctagaacaggaacactcaagaagcattctgtattatgaatccctcaataaaactctttctaaattgaaggaagtacatgagcagcttttatcaactgaacaggtatcagaccagaagaatgctccagctgctgagtcagttagcaataatgtcactgagtacatgtctactttacatgaaaatataaagaagcagagtttgatgatgctgcaaatgtttgaagatttgcacattcaagaaagcaagattaacaatctcaccgtctctttggagatggagaaagagtctctcagaggtgaatgtgaagacatgttatccaaatgcagaaatgattttaaatttcaacttaaggacacagaagagaatttacatgtgttaaatcaaacattggctgaagttctctttccaatggacaataagatggacaaaatgagtgagcaactaaatgatttgacttatgatatggagatccttcaacccttgcttgagcagggagcatcactcagacagacaatgacatatgaacaaccaaaggaagcaatagtgataaggaaaaagatagaaaatctgactagtgctgtcaatagtctaaattttattatcaaagaacttacaaaaagacacaacttacttagaaatgaagtacagggtcgtgatgatgccttagaaagacgtatcaatgaatatgccttagaaatggaagatggcctcaataagacaatgactattataaataatgctattgatttcattcaagataactatgccctaaaagagactttaagtactattaaggataatagtgagatccatcataaatgtacctccgatatggaaactattttgacatttattcctcagttccaccgtctgaatgattctattcagactttggtcaatgacaatcagagatataactttgttttgcaagtcgccaagacccttgcaggtattcccagagatgagaaactaaatcagtccaacttccaaaagatgtatcaaatgttcaatgaaaccacttcccaagtgagaaaataccagcaaaatatgagtcatttggaagaaaaactactcttaactaccaagatttccaaaaattttgagactcggttgcaagacattgagtctaaagttacccagacgctcataccttattatatttcagttaaaaaaggcagtgtagttacaaatgagagagatcaggctcttcaactgcaagtattaaattccagatttaaggcgttggaagcaaaatctatccatctttcaattaacttcttttcgcttaacaaaactctccacgaagttttaacaatgtgtcacaatgcttctacaagtgtgtcagaactgaatgctaccatccctaagtggataaaacattccctgccagatattcaacttcttcagaaaggtctaacagaatttgtggaaccaataattcaaataaaaactcaagctgccctatctaatttaacttgttgtatagatcgatcgttgcctggtagtctggcaaatgttgtcaagtctcagaagcaagtaaaatcattgccaaagaaaattaacgcacttaagaaaccaacggtaaatcttaccacagtcctgataggccggactcaaagaaacacggacaacataatatatcctgaggagtattcaagctgtagtcggcatccgtgccaaaatgggggcacgtgcataaatggaagaactagctttacctgtgcctgcagacatccttttactggtgacaactgcactatcaagcttgtggaagaaaatgctttagctccagatttttccaaaggatcttacagatatgcacccatggtggcattttttgcatctcatacgtatggaatgactatacctggtcctatcctgtttaataacttggatgtcaattatggagcttcatataccccaagaactggaaaatttagaattccgtatcttggagtatatgttttcaagtacaccatcgagtcatttagtgctcatatttctggatttttagtggttgatggaatagacaagcttgcatttgagtctgaaaatattaacagtgaaatacactgtgatagggttttaactggggatgccttattagaattaaattatgggcaggaagtctggttacgacttgcaaaaggaacaattccagccaagtttccccctgttactacatttagtggctatttattatatcgtacataagttagtatgaaaaacagactatcacctttattgagaaacagccagtgttttcatttatctttgcttgcacatctgctctgttttggtttttctacaggaaatgaaaatcaacttgtttttttaatatgagtaaacttgtatgtctattttataaaattatttgaatattgtttaatgtctgaatatgaaagagttcttgatcctaaagaaatttagtggcacagaaaacaaagtgaatttgttagcataattattcctattcttatttcttcattttaagtcattgcaatggaaagtaatattataaaatggtaattacaacatattatcagtcacagttttctttccaattaaacacttaacttttgttattccctgtatataaatatataacacacattttctagattcacaaatttaaataaattactcaaaaaatgaaaattgattttgtaaacttttatttttactctttacgttgagttgatcaattttccatactaagattttcattcagaatcaaaattaagaaagttggactgaaaatatgaaaaatgcttaactattgttctcttcctataattctctaattataacatagtaatttacatgtagttggacatgtacactcaagtctaagaatatatgagtggatcatttaccgccccccgccccacaacatctataaggggcaaaaagtctttttctaataagtattcttctatggtagtacctacagatctgcccttcttcttctaaagggtaagtcataatctgtgtaatactacaatttatgggatgctcactatgccctgtttctcttctaaacaatttacatgtaatgtctcattcctcacaataacccttgtaaagtgggcatgattaccatgatttttatagttgaagaacctaagacacagagaccaaggcccatgagctcatagggctgaggcaggatttggaatcaggccatgtcttctccagagcccacatccatcctttctctatattgcctcccacagatgtgctaaaatttatttaactaatcctttatcctctatttgtgttgtctcccattttttattattacaatattactgtggtgaacatgcttaaaaatacattccttggatatctgacaacgtgtttctgaaaaacagattttcataagtaataataaaaataataataaaaaagttttggtatggtaa

SEQ ID NO: 155813 - DNA, 3234 bp, Homo sapiens
  Payload ID: 10608
  Gene Symbol: MMRN1
  Gene Name: multimerin 1
  ENST ID: ENST00000508372
  CDS Start-End: 285-3197
atccgttagcctgcctttgtggtctgcacgctgggaaagcctgacacctactggaatagaaacagtttacaacgcccggaatatgctcaagtcacagttttgcaaggaagggggaaacaaaaaataaaattaggaattggtgtgcttatgtacataccaggttatctcccacagtgatattggacaaccaggtcacttatgtcccaggtgggaaaggaccttgtggctggaccggtggatcctgtcctcagagatctcagaagatatccaatcctgtctataggatgcaacataaaattgtcacctcattggattggaggtgctgtcctggatacagtgggccgaaatgtcaactaagagcccaggaacagcaaagtttgatacacaccaaccaggctgaaagtcatacagctgttggcagaggagtagctgagcagcagcagcagcaaggctgtggtgacccagaagtgatgcaaaaaatgactgatcaggtgaactaccaggcaatgaaactgactcttctgcagaagaagattgacaatatttctttgactgtgaatgatgtaaggaacacttactcctccctagaaggaaaagtcagcgaagataaaagcagagaatttcaatctcttctaaaaggtctaaaatccaaaagcattaatgtactgataagagacatagtaagagaacaatttaaaatttttcaaaatgacatgcaagagactgtagcacagctcttcaagactgtatcaagtctatcagaggacctcgaaagcaccaggcaaataattcaaaaagttaatgaatctgtggtttcaatagcagcccagcaaaagtttgttttggtgcaagagaatcggcccactttgactgatatagtggaactaaggaatcacattgtgaatgtaaggcaagaaatgactcttacatgtgagaagcctattaaagaactagaagtaaagcagactcatttagaaggtgctctagaacaggaacactcaagaagcattctgtattatgaatccctcaataaaactctttctaaattgaaggaagtacatgagcagcttttatcaactgaacaggtatcagaccagaagaatgctccagctgctgagtcagttagcaataatgtcactgagtacatgtctactttacatgaaaatataaagaagcagagtttgatgatgctgcaaatgtttgaagatttgcacattcaagaaagcaagattaacaatctcaccgtctctttggagatggagaaagagtctctcagaggtgaatgtgaagacatgttatccaaatgcagaaatgattttaaatttcaacttaaggacacagaagagaatttacatgtgttaaatcaaacattggctgaagttctctttccaatggacaataagatggacaaaatgagtgagcaactaaatgatttgacttatgatatggagatccttcaacccttgcttgagcagggagcatcactcagacagacaatgacatatgaacaaccaaaggaagcaatagtgataaggaaaaagatagaaaatctgactagtgctgtcaatagtctaaattttattatcaaagaacttacaaaaagacacaacttacttagaaatgaagtacagggtcgtgatgatgccttagaaagacgtatcaatgaatatgccttagaaatggaagatggcctcaataagacaatgactattataaataatgctattgatttcattcaagataactatgccctaaaagagactttaagtactattaaggataatagtgagatccatcataaatgtacctccgatatggaaactattttgacatttattcctcagttccaccgtctgaatgattctattcagactttggtcaatgacaatcagagatataactttgttttgcaagtcgccaagacccttgcaggtattcccagagatgagaaactaaatcagtccaacttccaaaagatgtatcaaatgttcaatgaaaccacttcccaagtgagaaaataccagcaaaatatgagtcatttggaagaaaaactactcttaactaccaagatttccaaaaattttgagactcggttgcaagacattgagtctaaagttacccagacgctcataccttattatatttcagttaaaaaaggcagtgtagttacaaatgagagagatcaggctcttcaactgcaagtattaaattccagatttaaggcgttggaagcaaaatctatccatctttcaattaacttcttttcgcttaacaaaactctccacgaagttttaacaatgtgtcacaatgcttctacaagtgtgtcagaactgaatgctaccatccctaagtggataaaacattccctgccagatattcaacttcttcagaaaggtctaacagaatttgtggaaccaataattcaaataaaaactcaagctgccctatctaatttaacttgttgtatagatcgatcgttgcctggtagtctggcaaatgttgtcaagtctcagaagcaagtaaaatcattgccaaagaaaattaacgcacttaagaaaccaacggtaaatcttaccacagtcctgataggccggactcaaagaaacacggacaacataatatatcctgaggagtattcaagctgtagtcggcatccgtgccaaaatgggggcacgtgcataaatggaagaactagctttacctgtgcctgcagacatccttttactggtgacaactgcactatcaagcttgtggaagaaaatgctttagctccagatttttccaaaggatcttacagatatgcacccatggtggcattttttgcatctcatacgtatggaatgactatacctggtcctatcctgtttaataacttggatgtcaattatggagcttcatataccccaagaactggaaaatttagaattccgtatcttggagtatatgttttcaagtacaccatcgagtcatttagtgctcatatttctggatttttagtggttgatggaatagacaagcttgcatttgagtctgaaaatattaacagtgaaatacactgtgatagggttttaactggggatgccttattagaattaaattatgggcaggaagtctggttacgacttgcaaaaggaacaattccagccaagtttccccctgttactacatttagtggctatttattatatcgtacataagttagtatgaaaaacagactatcacctttattgagaa

SEQ ID NO: 155814 - DNA, 4375 bp, Homo sapiens
  Payload ID: 10609
  Gene Symbol: MMRN2
  Gene Name: multimerin 2
  Uniprot ID: Q9H8L6
  ENST ID: ENST00000372027
  CDS Start-End: 323-3172
cttttcatggctcccagggagcaggttcccataaggatgcatttggtggggccaccccatgtctaccacattcccagagtccctgagccaagtcctcagggacaggaactggcttgtgtggttggcggcccctgtggggccagccagggtagttggggggcaggacaagacccaccgggtaggccggcccaggccacttcctctctttgttgtcctcgtattttcttttcctcctgagatttaacttgaagacaacgtcactagcagtttctggagctacttgccaaggctgagtgtgagctgagcctgccccaccaccaagatgatcctgagcttgctgttcagccttgggggccccctgggctgggggctgctgggggcatgggcccaggcttccagtactagcctctctgatctgcagagctccaggacacctggggtctggaaggcagaggctgaggacaccggcaaggaccccgtaggacgtaactggtgcccctacccaatgtccaagctggtcaccttactagctctttgcaaaacagagaaattcctcatccactcgcagcagccgtgtccgcagggagctccagactgccagaaagtcaaagtcatgtaccgcatggcccacaagccagtgtaccaggtcaagcagaaggtgctgacctctttggcctggaggtgctgccctggctacacgggccccaactgcgagcaccacgattccatggcaatccctgagcctgcagatcctggtgacagccaccaggaacctcaggatggaccagtcagcttcaaacctggccaccttgctgcagtgatcaatgaggttgaggtgcaacaggaacagcaggaacatctgctgggagatctccagaatgatgtgcaccgggtggcagacagcctgccaggcctgtggaaagccctgcctggtaacctcacagctgcagtgatggaagcaaatcaaacagggcacgagttccctgatagatccttggagcaggtgctgctaccccacgtggacaccttcctacaagtgcatttcagccccatctggaggagctttaaccaaagcctgcacagccttacccaggccataagaaacctgtctcttgacgtggaggccaaccgccaggccatctccagagtccaggacagtgccgtggccagggctgacttccaggagcttggtgccaaatttgaggccaaggtccaggagaacactcagagagtgggtcagctgcgacaggacgtggaggaccgcctgcacgcccagcactttaccctgcaccgctcgatctcagagctccaagccgatgtggacaccaaattgaagaggctgcacaaggctcaggaggccccagggaccaatggcagtctggtgttggcaacgcctggggctggggcaaggcctgagccggacagcctgcaggccaggctgggccagctgcagaggaacctctcagagctgcacatgaccacggcccgcagggaggaggagttgcagtacaccctggaggacatgagggccaccctgacccggcacgtggatgagatcaaggaactgtactccgaatcggacgagactttcgatcagattagcaaggtggagcggcaggtggaggagctgcaggtgaaccacacggcgctccgtgagctgcgcgtgatcctgatggagaagtctctgatcatggaggagaacaaggaggaggtggagcggcagctcctggagctcaacctcacgctgcagcacctgcagggtggccatgccgacctcatcaagtacgtgaaggactgcaattgccagaagctctatttagacctggacgtcatccgggagggccagagggacgccacgcgtgccctggaggagacccaggtgagcctggacgagcggcggcagctggacggctcctccctgcaggccctgcagaacgccgtggacgccgtgtcgctggccgtggacgcgcacaaagcggagggcgagcgggcgcgggcggccacgtcgcggctccggagccaagtgcaggcgctggatgacgaggtgggcgcgctgaaggcggccgcggccgaggcccgccacgaggtgcgccagctgcacagcgccttcgccgccctgctggaggacgcgctgcggcacgaggcggtgctggccgcgctcttcggggaggaggtgctggaggagatgtctgagcagacgccgggaccgctgcccctgagctacgagcagatccgcgtggccctgcaggacgccgctagcgggctgcaggagcaggcgctcggctgggacgagctggccgcccgagtgacggccctggagcaggcctcggagcccccgcggccggcagagcacctggagcccagccacgacgcgggccgcgaggaggccgccaccaccgccctggccgggctggcgcgggagctccagagcctgagcaacgacgtcaagaatgtcgggcggtgctgcgaggccgaggccggggccggggccgcctccctcaacgcctcccttcacggcctccacaacgcactcttcgccactcagcgcagcttggagcagcaccagcggctcttccacagcctctttgggaacttccaagggctcatggaagccaacgtcagcctggacctggggaagctgcagaccatgctgagcaggaaagggaagaagcagcagaaagacctggaagctccccggaagagggacaagaaggaagcggagcctttggtggacatacgggtcacagggcctgtgccaggtgccttgggcgcggcgctctgggaggcaggatcccctgtggccttctatgccagcttttcagaagggacggctgccctgcagacagtgaagttcaacaccacatacatcaacattggcagcagctacttccctgaacatggctacttccgagcccctgagcgtggtgtctacctgtttgcagtgagcgttgaatttggcccagggccaggcaccgggcagctggtgtttggaggtcaccatcggactccagtctgtaccactgggcaggggagtggaagcacagcaacggtctttgccatggctgagctgcagaagggtgagcgagtatggtttgagttaacccagggatcaataacaaagagaagcctgtcgggcactgcatttgggggcttcctgatgtttaagacctgaaccccagccccaatctgatcagacatcatggactcgcccagctctcctcggcctggggctctggccaaggatgggctggaggtcattcagttggtctgtctcttccctggaaaccttctgcaaagatggtgtggtgtacgtggcttccctgtaaccacatggggcttggccatttctccatgatgagaaggactggaatgcttctccgggcaggacatggtcctaggaagcctgaaccttggcttggcatgccttctcagacagcacggcctgggctccaactcttcaccacaccctgtattctacaacttctttggtgttttgctcctcctgtggttggaaacttctgtacaacactttaaacttttctcttgcttcctcttctcttctcccttatcgtatgatagaaagacattcttccccaggaggaatgtttaaaatggaggcaacattttggccaacattggaaagcactagagggcaatgggattaaaccaacctgcttggtctctattagtcagtaatgaagacgacagcctggccaaccaagggaaaggaaattagtatctttagtttcagtcattccttgtaggatatggtttagctgtgcccccacctaaaatatcatcttgaattgtaatccctataatccccacatcaagggagagatcaggtggaggtaattggatcttgggggcggttcccccatgctgttcttgtgatagttctcacgagatctgatgattttataagtttgatagttcctcctgtgttcattctccttcctgccaccttgtgaagatgccttggttcctcttcactgtctgccatgattgtaagtttcctgaggcctccccagccatgtggaacagtgagtcaattaaacctctttcctttataaattatccagtcttgggcaattcttgatagcagtgtgaaaatggactaatacacttgtgtttatctgtaatttaaatttcatgtctttttctccttgccttacatagggtaaagaccaagaaatgccaaacgtgaactaaaatatgtagggccttcaacttttttacttcctccagtatcttaggaccatcgtaattcttgttagcatctctaaccaggaggcagctgagggaggagggaaagaagactgtaaaaatccccctcactaatgatcaactttggaataaagtgatgcccttcaaa

SEQ ID NO: 155815 - DNA, 829 bp, Homo sapiens
  Payload ID: 10609
  Gene Symbol: MMRN2
  Gene Name: multimerin 2
  ENST ID: ENST00000474994
  CDS Start-End: 460-829
ccagatcccatcctccggaaagggttagtcaggcaagtgtgctgagaggcccctgggaacctcgtctcgattaacccatcagaaagcagcccatcctttgcacccagctctcagatggaaaagtgaagcccagaaggaagggacctgacacggaggcttccttggtagcatttcagtctcaagggaagaactgtgggcctcccctggagcactggtgaagtaaggggttggtttggatattgtctcctgactgggatatgggcaggactgacagggagctggagtcctaacgaagcctgggctaggtgcaggaagaaccaacccagtggtctcctgacatctcccacgcccccaccgcagctgggtcacctccagaatacggaggagagagctggaggtggaggaactaaggaccttctttgccaggtggggacttaaagtaactggtgcccctacccaatgtccaagctggtcaccttactagctctttgcaaaacagagaaattcctcatccactcgcagcagccgtgtccgcagggagctccagactgccagaaagtcaaagtcatgtaccgcatggcccacaagccagtgtaccaggtcaagcagaaggtgctgacctctttggcctggaggtgctgccctggctacacgggccccaactgcgagcaccacgattccatggcaatccctgagcctgcagatcctggtgacagccaccaggaacctcaggatggaccagtcagcttcaaacctggccaccttgctgcagtgatcaatgaggttgaggtgcaacaggaacagcaggaacatctgctgggagatctcc

SEQ ID NO: 155816 - DNA, 599 bp, Homo sapiens
  Payload ID: 10609
  Gene Symbol: MMRN2
  Gene Name: multimerin 2
  ENST ID: ENST00000608090
  CDS Start-End: 31-360
agtgtgagctgagcctgccccaccaccaagatgatcctgagcttgctgttcagccttgggggccccctgggctgggggctgctgggggcatgggcccaggcttccagtactagcctctctgatctgcagagctccaggacacctggggtctggaaggcagaggctgaggacaccggcaaggaccccgtaggacggataatggattccagaatcccagcactgctccggcaggaggcgaggaccggtggctctgcactggcaccccctgttgacctgggtgtggctcagcagccttctcctctggcttgttttccagtaactggtgcccctacccaatgtccaagctggtcaccttactagctctttgcaaaacagagaaattcctcatccactcgcagcagccgtgtccgcagggagctccagactgccagaaagtcaaagtcatgtaccgcatggcccacaagccagtgtaccaggtcaagcagaaggtgctgacctctttggcctggaggtgctgccctggctacacgggccccaactgcgagcaccacgattccatggcaatccctgagcctgcagatcctggtgacagccaccag

SEQ ID NO: 155817 - DNA, 890 bp, Homo sapiens
  Payload ID: 10609
  Gene Symbol: MMRN2
  Gene Name: multimerin 2
  ENST ID: ENST00000609457
  CDS Start-End: 279-890
atttcagtctcaagggaagaactgtgggcctcccctggagcactggtgaagtaaggggttggtttggatattgtctcctgactgggatatgggcaggactgacagggagctggagtcctaacgaagcctgggctaggtgcaggaagaaccaacccagtggtctcctgacatctcccacgcccccaccgcagctgggtcacctccagaatacggaggagagagctggaggtggaggaactaaggaccttctttgccaggtggggacttaaaggtaccgcatggcccacaagccagtgtaccaggtcaagcagaaggtgctgacctctttggcctggaggtgctgccctggctacacgggccccaactgcgagcaccacgattccatggcaatccctgagcctgcagatcctggtgacagccaccaggaacctcaggatggaccagtcagcttcaaacctggccaccttgctgcagtgatcaatgaggttgaggtgcaacaggaacagcaggaacatctgctgggagatctccagaatgatgtgcaccgggtggcagacagcctgccaggcctgtggaaagccctgcctggtaacctcacagctgcagtgatggaagcaaatcaaacagggcacgagttccctgatagatccttggagcaggtgctgctaccccacgtggacaccttcctacaagtgcatttcagccccatctggaggagctttaaccaaagcctgcacagccttacccaggccataagaaacctgtctcttgacgtggaggccaaccgccaggccatctccagagtccaggacagtgccgtggccagggctgacttccaggagcttggtgccaaatttgaggccaaggtccaggagaacactcagagagtg

SEQ ID NO: 155818 - DNA, 1020 bp, Homo sapiens
  Payload ID: 10609
  Gene Symbol: MMRN2
  Gene Name: multimerin 2
  ENST ID: ENST00000610081
  CDS Start-End: 136-1020
ggcagctccaaaccaggccagaggagccccacatccactctgggttggccactgggagatgagggcacccagcaggactccccaagggagggcacaaagatgaagccagcctgagacggaggggcagagggaaaaatgggcacttcagcaagttgggccgggggcatgggcatcaagggccagccagaagctgccaagagctggaggaagccaaagcaaagtaactggtgcccctacccaatgtccaagctggtcaccttactagctctttgcaaaacagagaaattcctcatccactcgcagcagccgtgtccgcagggagctccagactgccagaaagtcaaagtcatgtaccgcatggcccacaagccagtgtaccaggtcaagcagaaggtgctgacctctttggcctggaggtgctgccctggctacacgggccccaactgcgagcaccacgattccatggcaatccctgagcctgcagatcctggtgacagccaccaggaacctcaggatggaccagtcagcttcaaacctggccaccttgctgcagtgatcaatgaggttgaggtgcaacaggaacagcaggaacatctgctgggagatctccagaatgatgtgcaccgggtggcagacagcctgccaggcctgtggaaagccctgcctggtaacctcacagctgcagtgatggaagcaaatcaaacagggcacgagttccctgatagatccttggagcaggtgctgctaccccacgtggacaccttcctacaagtgcatttcagccccatctggaggagctttaaccaaagcctgcacagccttacccaggccataagaaacctgtctcttgacgtggaggccaaccgccaggccatctccagagtccaggacagtgccgtggccagggctgacttccaggagcttggtgccaaatttgaggccaaggtccaggagaacactcagagagtgggtcagctgcgacaggacgtggaggaccgcctgcacgcccagcactttacc

SEQ ID NO: 155819 - DNA, 2337 bp, Homo sapiens
  Payload ID: 10610
  Gene Symbol: MCTP1
  Gene Name: multiple C2 domains, transmembrane 1
  Uniprot ID: Q6DN14
  ENST ID: ENST00000312216
  CDS Start-End: 1-2337
atgctagacagctgcaagctgaaaagtgcctgcaatttgccatttatttgtaataagaaaataataaacactgctggaaccagtaatgcagaagtccccttggctgatcccggaatgtaccagctggacattacattaagaaggggtcaaagtttagctgctcgagatcgaggagggacgagtgatccatatgtgaagtttaaaatcggaggaaaagaagtttttagaagtaagataatacacaagaacctcaaccctgtgtgggaagaaaaagcttgtattctggttgatcatcttagggagccattgtatataaaggtatttgactatgattttggactacaggatgactttatgggctcagcctttctggatctgacacaattggagttaaacaggcccacagatgtgacccttactctgaaagatcctcattatcctgaccatgatcttggaatcattttgctctcagtcatccttacccctaaagaaggagagtccagggatgtgacaatgctaatgaggaagagttggaaaagatcaagtaaggaactttcagaaaatgaagtggttggatcttatttctctgtgaagtctctcttttggaggacgtgcggcaggccagctcttcctgtcctgggcttctgcagagcagagcttcagaatccttattgcaaaaatgtacaatttcagacccaaagtttacgcctatcagacctacacagaaaatcgcatctttggagaggaatagtcagcatcaccttgattgaagggagagacctcaaggccatggattccaacgggttgagcgatccctacgtgaagttccggcttgggcatcagaagtacaagagcaagattatgccaaaaacgttgaatcctcagtggagggaacaatttgattttcacctttatgaagaaagaggaggagtcattgatatcactgcatgggacaaagatgctgggaaaagggatgatttcattggcaggtgccaggtcgacctgtcagccctcagtagggaacagacgcacaagctggagttgcagctggaagagggtgagggacacctggtgctgctggtcactctgacagcatcagccacagtcagcatctctgacctgtctgtcaactccctggaggaccagaaggaacgagaggagatattaaagagatatagcccattgaggatatttcacaacctgaaagatgtgggatttctccaggtgaaagtcatcagagcggaagggttaatggctgccgacgtcactggaaaaagtgacccattttgtgtggtagaactgaacaacgatagactgctaacacatactgtctacaaaaatctcaatcctgagtggaataaagtcttcacgttcaacattaaagatatccattcagttcttgaagtgacagtttatgatgaagatcgggatcgaagtgctgactttctgggcaaagttgctataccattgctgtctattcaaaatggtgaacagaaagcctacgtcttgaaaaacaagcagctgacagggccaacaaagggggtcatctatcttgaaatagatgtgatttttaatgctgtgaaagccagcttacgaacattaatacccaaagaacagaagtacattgaagaggaaaacagactctctaaacagctgctactaagaaactttatcagaatgaaacgttgtgtcatggtgctggtaaatgctgcatactacgttaatagttgctttgattgggattcacccccaaggagtctcgctgcttttgtgctctttctctttgttgtctggaactttgagctctacatgataccactggttttgttgttactattgacatggaactacttcttgataatatcagggaaagataacaggcaacgtgatacagtagtggaggacatgctagaggacgaggaagaagaagatgacaaagatgacaaggacagtgaaaaaaagggatttataaataaaatctatgccatccaggaggtatgtgtcagtgtccagaacatcctagatgaagtggcttcctttggcgaaaggataaagaatactttcaactggactgtcccattcttaagctggctggccattgtagccctctgtgtgttcacagccatcctgtactgcattccgctgagatacattgtccttgtctggggcatcaataaatttacaaaaaagcttcggagtccatatgcaattgataacaatgaactacttgacttcctttccagagtcccttcagatgtacaagtggtgcaataccaagaactgaaaccagatccttctcatagcccatataaaagaaagaaaaacaatcttggctag

SEQ ID NO: 155820 - DNA, 3159 bp, Homo sapiens
  Payload ID: 10610
  Gene Symbol: MCTP1
  Gene Name: multiple C2 domains, transmembrane 1
  Uniprot ID: Q6DN14
  ENST ID: ENST00000429576
  CDS Start-End: 164-2242
attccaagtcgctgctgtgcagagcagcaagtgctccgtgcagggctgttgctatcacttggaggtgaacagcctcttttgccggtattcagtgaagaaagcaagtctaaatatgcagttctctcactggagtgaaagatgttttgttcatttctaatcaactatgctagacagctgcaagctgaaaagtgcctgcaatttgccatttatttgtaataagaaaataataaacactgctggaaccagtaatgcagaagtccccttggctgatcccggaatgtaccagctggacattacattaagaaggggtcaaagtttagctgctcgagatcgaggagggacgagtgatccatatgtgaagtttaaaatcggaggaaaagaagtttttagaagtaagataatacacaagaacctcaaccctgtgtgggaagaaaaagcttgtattctggttgatcatcttagggagccattgtatataaaggtatttgactatgattttggactacaggatgactttatgggctcagcctttctggatctgacacaattggagttaaacaggcccacagatgtgacccttactctgaaagatcctcattatcctgaccatgatcttggaatcattttgctctcagtcatccttacccctaaagaaggagagtccagggatgtgacaatgctaatgaggaagagttggaaaagatcaagtaagtttcagacccaaagtttacgcctatcagacctacacagaaaatcgcatctttggagaggaatagtcagcatcaccttgattgaagggagagacctcaaggccatggattccaacgggttgagcgatccctacgtgaagttccggcttgggcatcagaagtacaagagcaagattatgccaaaaacgttgaatcctcagtggagggaacaatttgattttcacctttatgaagaaagaggaggagtcattgatatcactgcatgggacaaagatgctgggaaaagggatgatttcattggcaggtgccaggtcgacctgtcagccctcagtagggaacagacgcacaagctggagttgcagctggaagagggtgagggacacctggtgctgctggtcactctgacagcatcagccacagtcagcatctctgacctgtctgtcaactccctggaggaccagaaggaacgagaggagatattaaagagatatagcccattgaggatatttcacaacctgaaagatgtgggatttctccaggtgaaagtcatcagagcggaagggttaatggctgccgacgtcactggaaaaagtgacccattttgtgtggtagaactgaacaacgatagactgctaacacatactgtctacaaaaatctcaatcctgagtggaataaagtcttcacgttcaacattaaagatatccattcagttcttgaagtgacagtttatgatgaagatcgggatcgaagtgctgactttctgggcaaagttgctataccattgctgtctattcaaaatggtgaacagaaagcctacgtcttgaaaaacaagcagctgacagggccaacaaagggggtcatctatcttgaaatagatgtgatttttaatgctgtgaaagccagcttacgaacattaatacccaaagaacagaagtacattgaagaggaaaacagactctctaaacagctgctactaagaaactttatcagaatgaaacgttgtgtcatggtgctggtaaatgctgcatactacgttaatagttgctttgattgggattcacccccaaggagtctcgctgcttttgtggtagtggaggacatgctagaggacgaggaagaagaagatgacaaagatgacaaggacagtgaaaaaaagggatttataaataaaatctatgccatccaggaggtatgtgtcagtgtccagaacatcctagatgaagtggcttcctttggcgaaaggataaagaatactttcaactggactgtcccattcttaagctggctggccattgtagccctctgtgtgttcacagccatcctgtactgcattccgctgagatacattgtccttgtctggggcatcaataaatttacaaaaaagcttcggagtccatatgcaattgataacaatgaactacttgacttcctttccagagtcccttcagatgtacaagtggtgcaataccaagaactgaaaccagatccttctcatagcccatataaaagaaagaaaaacaatcttggctagccagctcccagcactgaggagaccagcatctgtttgggaagataaaagaaaaagccctcagcctcagcagcatttcctttctttctgctttttatttattttgcctttttatcatgatcgagagaatctgtaaatagtgtacaaaggcatatgtctttgaatatatacttctattgtacagactcaacttgataaaggttttgctactgctgtgtcaaaaccttgttagctgtggataataatataacacactgaaagaacaaatataagaatgataacactggaagatatattcttatctaattactagtggattaaatactcacctgtgctctgattaaatctacatcaattgtaaatgtcgatttgattttaaagtttttttttaatgcgactattttttatctgaaaagtaatccattacacttttctatgttttatacatttcaaaagggagggaaattccaaagcctgaataatggaatggatacatttcaatttaacatatattctggctttagatcccgacattcactcctgtgcaaattacttaggtatgacttaggctaattttaagctaataagtgaaggtacattcactccctcaagagaatcaatactcagaaggttacaaagttttctttatagaatttcaatcaatcattccatctaaaaccttaaaatctctacaggactacataacataaatactgccagtttataaacgattgcctatctgaatttttatacctaccactactttaatttatacagttagttagcaaattagcaacccagtaagtacagttatcaaaaatactaggaaactatatccatatcgcttttggtgtcagattgtatctgtgcatctaaaaatattttaataaatactcaagtgctctcagagaaaaaaaaaa

SEQ ID NO: 155821 - DNA, 1702 bp, Homo sapiens
  Payload ID: 10610
  Gene Symbol: MCTP1
  Gene Name: multiple C2 domains, transmembrane 1
  ENST ID: ENST00000514780
  CDS Start-End: 1-510
aaaataataaacactgctggaaccagtaatgcagaagtccccttggctgatcccggaatgtaccagctggacattacattaagaaggggtcaaagtttagctgctcgagatcgaggagggacgagtgatccatatgtgaagtttaaaatcggaggaaaagaagtttttagaagtaagataatacacaagaacctcaaccctgtgtgggaagaaaaagcttgtattctggttgatcatcttagggagccattgtatataaaggtatttgactatgattttggactacaggatgactttatgggctcagcctttctggatctgacacaattggagttaaacaggcccacagatgtgacccttactctgaaagatcctcattatcctgaccatgatcttggaatcattttgctctcagtcatccttacccctaaagaaggagagtccagggatgtgacaatgctaatgaggaagagttggaaaagatcaagtaaggtaattcttagcttgtgatctttcagcttttcttgttgagcagaactatcatctgctttcccagatctctctcatctcttcaaagtatgctaccagatttcatactattcaattgttacttttccccataaatttaagccaaccatgtgatgttttttaaatagaaatcacaccgatcaatagcttcaaatcatcctttcactattctctggtcacttctcaacatcattctcagcatctggtctcaactatatatgcaacagggtctagaaaattgctctgagccaggaataaaatgatgaggctaggggagggacaactccagacagaagaaagattcgcacaatttattttattttggggggtcacagaaaattgagtatgaggctttctaaactcagaaattcctgtatcattacatctttatagtatacaataagaacaatttttccccattgtctcttctcactttaagaaataaagtgagaggagtttatggttcctgtaacttactaagccctggctcttcttcaacttgtaagatatgcaaaatataaactaagtgtttaatttgttcagtgatgctgccactgttggacacagatcgatatcaagatgaaacaatttttatatgaatataccttgaaataaatcaaaacgattttacttgtaaaaatcttgtctgctcaaatttctacttagagtcagtattcctttttaataatgactaatttttttagaccctggaacatgacagtctttttccttccattctgattgaatcatgcttttacctaagcttttctttaattttgtcatttttattactgtgaattaatatatatcaaaatgtttttatatttatggtaatgacttaatctgtttgaacaagtgtctcttactgtacattttctccctaattcctatggcattaatggcattaatgaccaaagaataatttggcttacaaaaaagtcagggctcccattaaaaatcacctttattattttaataaaatgaaaaaggcttattaaggaaggttgctgaatatttctaacttaatgttcactgtgattttcactaatcaaaataaagtttcaagatgttttgaagaaatatttgcactgttcatatttgtattactttttcctttacagttatactttacagttattgttatattaaaagtgtatatatttttaaattcata

SEQ ID NO: 155822 - DNA, 570 bp, Homo sapiens
  Payload ID: 10610
  Gene Symbol: MCTP1
  Gene Name: multiple C2 domains, transmembrane 1
  ENST ID: ENST00000510732
  CDS Start-End: 165-570
cattccaagtcgctgctgtgcagagcagcaagtgctccgtgcagggctgttgctatcacttggaggtgaacagcctcttttgccggtattcagtgaagaaagcaagtctaaatatgcagttctctcactggagtgaaagatgttttgttcatttctaatcaactatgctagacagctgcaagctgaaaagtgcctgcaatttgccatttatttgtaataagaccctgtatggtaagattggaaaggacagactaaatgcagtaaacaaaataataaacactgctggaaccagtaatgcagaagtccccttggctgatcccggaatgtaccagctggacattacattaagaaggggtcaaagtttagctgctcgagatcgaggagggacgagtgatccatatgtgaagtttaaaatcggaggaaaagaagtttttagaagtaagataatacacaagaacctcaaccctgtgtgggaagaaaaagcttgtattctggttgatcatcttagggagccattgtatataaaggtatttgactatgattttggactacaggatgactttatgggct

SEQ ID NO: 155823 - DNA, 483 bp, Homo sapiens
  Payload ID: 10610
  Gene Symbol: MCTP1
  Gene Name: multiple C2 domains, transmembrane 1
  ENST ID: ENST00000505465
  CDS Start-End: 240-483
cctgttgtggcttttgccatgaggaagaggttgactactaacactgcatgtttgatttagcaggtgaagtttttagtatttaattcgctgctgtgcagagcagcaagtgctccgtgcagggctgttgctatcacttggaggtgaacagcctcttttgccggtattcagtgaagaaagcaagtctaaatatgcagttctctcactggagtgaaagatgttttgttcatttctaatcaactatgctagacagctgcaagctgaaaagtgcctgcaatttgccatttatttgtaataagaaaataataaacactgctggaaccagtaatgcagaagtccccttggctgatcccggaatgtaccagctggacattacattaagaaggggtcaaagtttagctgctcgagatcgaggagggacgagtgatccatatgtgaagtttaaaatcggaggaaaagaagtttttagaagtaagataatacaca

SEQ ID NO: 155824 - DNA, 2214 bp, Homo sapiens
  Payload ID: 10610
  Gene Symbol: MCTP1
  Gene Name: multiple C2 domains, transmembrane 1
  ENST ID: ENST00000508509
  CDS Start-End: 164-2214
attccaagtcgctgctgtgcagagcagcaagtgctccgtgcagggctgttgctatcacttggaggtgaacagcctcttttgccggtattcagtgaagaaagcaagtctaaatatgcagttctctcactggagtgaaagatgttttgttcatttctaatcaactatgctagacagctgcaagctgaaaagtgcctgcaatttgccatttatttgtaataagaaaataataaacactgctggaaccagtaatgcagaagtccccttggctgatcccggaatgtaccagctggacattacattaagaaggggtcaaagtttagctgctcgagatcgaggagggacgagtgatccatatgtgaagtttaaaatcggaggaaaagaagtttttagaagtaagataatacacaagaacctcaaccctgtgtgggaagaaaaagcttgtattctggttgatcatcttagggagccattgtatataaaggtatttgactatgattttggactacaggatgactttatgggctcagcctttctggatctgacacaattggagttaaacaggcccacagatgtgacccttactctgaaagatcctcattatcctgaccatgatcttggaatcattttgctctcagtcatccttacccctaaagaaggagagtccagggatgtgtttcagacccaaagtttacgcctatcagacctacacagaaaatcgcatctttggagaggaatagtcagcatcaccttgattgaagggagagacctcaaggccatggattccaacgggttgagcgatccctacgtgaagttccggcttgggcatcagaagtacaagagcaagattatgccaaaaacgttgaatcctcagtggagggaacaatttgattttcacctttatgaagaaagaggaggagtcattgatatcactgcatgggacaaagatgctgggaaaagggatgatttcattggcaggtgccaggtcgacctgtcagccctcagtagggaacagacgcacaagctggagttgcagctggaagagggtgagggacacctggtgctgctggtcactctgacagcatcagccacagtcagcatctctgacctgtctgtcaactccctggaggaccagaaggaacgagaggagatattaaagagatatagcccattgaggatatttcacaacctgaaagatgtgggatttctccaggtgaaagtcatcagagcggaagggttaatggctgccgacgtcactggaaaaagtgacccattttgtgtggtagaactgaacaacgatagactgctaacacatactgtctacaaaaatctcaatcctgagtggaataaagtcttcacgttcaacattaaagatatccattcagttcttgaagtgacagtttatgatgaagatcgggatcgaagtgctgactttctgggcaaagttgctataccattgctgtctattcaaaatggtgaacagaaagcctacgtcttgaaaaacaagcagctgacagggccaacaaagggggtcatctatcttgaaatagatgtgatttttaatgctgtgaaagccagcttacgaacattaatacccaaagaacagaagtacattgaagaggaaaacagactctctaaacagctgctactaagaaactttatcagaatgaaacgttgtgtcatggtgctggtaaatgctgcatactacgttaatagttgctttgattgggattcacccccaaggagtctcgctgcttttgtgctctttctctttgttgtctggaactttgagctctacatgataccactggttttgttgttactattgacatggaactacttcttgataatatcagggaaagataacaggcaacgtgatacagtagtggaggacatgctagaggacgaggaagaagaagatgacaaagatgacaaggacagtgaaaaaaagggatttataaataaaatctatgccatccaggaggtatgtgtcagtgtccagaacatcctagatgaagtggcttcctttggcgaaaggataaagaatactttcaactggactgtcccattcttaagctggctggccattgtagccctctgtgtgttcacagccatcctgtactgcattccgctgagatacattgtccttgtctggggcatcaataaatttacaaaaaagcttcggagtccatatgcaattgataacaatgaactact

SEQ ID NO: 155825 - DNA, 5396 bp, Homo sapiens
  Payload ID: 10610
  Gene Symbol: MCTP1
  Gene Name: multiple C2 domains, transmembrane 1
  Uniprot ID: Q6DN14
  ENST ID: ENST00000515393
  CDS Start-End: 1-3000
atggagccccgggctgccgcggcgggcgagccagagccgccggcggcgtcctcctccttccaggcccggctctggaagaacctgcagctgggggtgggcaggagcaagggcggcgggggcgggcgcgctgggggtccagagcgccgcactgcggacaccccgtcgccctccccgccacccccggtgggcacagggaatgcaccggccagggggagtggtgcaggcagcaggtggagcggcttcaagaagcggaagcaagtgctggaccgagtcttctcctcctcgcagcccaacctgtgctgctcgtcgccggagcccctggagcccggcggcgccggcagagccgagcaggggtccacgctacgccgccggatccgcgagcatttgctccccgccgtaaaggggcccgcggcggcctcgggagcagcgggagggacgcctcctggcggacgctcccccgactcagctccttcctcttcctccgcctcatcctccctgtcctcctcgccccagcctcccccgaggggggaccgcgcccgagatgagggtgcacggcgtcagggccccggggcgcacttgtgccaccagaagagctcctctctgccgggcaccgcctgcctggagcagctgctggagccgccgcctcctcccgcagagccggcgcggagtcccgcggagtctcgggccccggagacgggcgaggagcacggcagcagccagaaaataataaacactgctggaaccagtaatgcagaagtccccttggctgatcccggaatgtaccagctggacattacattaagaaggggtcaaagtttagctgctcgagatcgaggagggacgagtgatccatatgtgaagtttaaaatcggaggaaaagaagtttttagaagtaagataatacacaagaacctcaaccctgtgtgggaagaaaaagcttgtattctggttgatcatcttagggagccattgtatataaaggtatttgactatgattttggactacaggatgactttatgggctcagcctttctggatctgacacaattggagttaaacaggcccacagatgtgacccttactctgaaagatcctcattatcctgaccatgatcttggaatcattttgctctcagtcatccttacccctaaagaaggagagtccagggatgtgacaatgctaatgaggaagagttggaaaagatcaagtaaggaactttcagaaaatgaagtggttggatcttatttctctgtgaagtctctcttttggaggacgtgcggcaggccagctcttcctgtcctgggcttctgcagagcagagcttcagaatccttattgcaaaaatgtacaatttcagacccaaagtttacgcctatcagacctacacagaaaatcgcatctttggagaggaatagtcagcatcaccttgattgaagggagagacctcaaggccatggattccaacgggttgagcgatccctacgtgaagttccggcttgggcatcagaagtacaagagcaagattatgccaaaaacgttgaatcctcagtggagggaacaatttgattttcacctttatgaagaaagaggaggagtcattgatatcactgcatgggacaaagatgctgggaaaagggatgatttcattggcaggtgccaggtcgacctgtcagccctcagtagggaacagacgcacaagctggagttgcagctggaagagggtgagggacacctggtgctgctggtcactctgacagcatcagccacagtcagcatctctgacctgtctgtcaactccctggaggaccagaaggaacgagaggagatattaaagagatatagcccattgaggatatttcacaacctgaaagatgtgggatttctccaggtgaaagtcatcagagcggaagggttaatggctgccgacgtcactggaaaaagtgacccattttgtgtggtagaactgaacaacgatagactgctaacacatactgtctacaaaaatctcaatcctgagtggaataaagtcttcacgttcaacattaaagatatccattcagttcttgaagtgacagtttatgatgaagatcgggatcgaagtgctgactttctgggcaaagttgctataccattgctgtctattcaaaatggtgaacagaaagcctacgtcttgaaaaacaagcagctgacagggccaacaaagggggtcatctatcttgaaatagatgtgatttttaatgctgtgaaagccagcttacgaacattaatacccaaagaacagaagtacattgaagaggaaaacagactctctaaacagctgctactaagaaactttatcagaatgaaacgttgtgtcatggtgctggtaaatgctgcatactacgttaatagttgctttgattgggattcacccccaaggagtctcgctgcttttgtgctctttctctttgttgtctggaactttgagctctacatgataccactggttttgttgttactattgacatggaactacttcttgataatatcagggaaagataacaggcaacgtgatacagtagtggaggacatgctagaggacgaggaagaagaagatgacaaagatgacaaggacagtgaaaaaaagggatttataaataaaatctatgccatccaggaggtatgtgtcagtgtccagaacatcctagatgaagtggcttcctttggcgaaaggataaagaatactttcaactggactgtcccattcttaagctggctggccattgtagccctctgtgtgttcacagccatcctgtactgcattccgctgagatacattgtccttgtctggggcatcaataaatttacaaaaaagcttcggagtccatatgcaattgataacaatgaactacttgacttcctttccagagtcccttcagatgtacaagtggtgcaataccaagaactgaaaccagatccttctcatagcccatataaaagaaagaaaaacaatcttggctagccagctcccagcactgaggagaccagcatctgtttgggaagataaaagaaaaagccctcagcctcagcagcatttcctttctttctgctttttatttattttgcctttttatcatgatcgagagaatctgtaaatagtgtacaaaggcatatgtctttgaatatatacttctattgtacagactcaacttgataaaggttttgctactgctgtgtcaaaaccttgttagctgtggataataatataacacactgaaagaacaaatataagaatgataacactggaagatatattcttatctaattactagtggattaaatactcacctgtgctctgattaaatctacatcaattgtaaatgtcgatttgattttaaagtttttttttaatgcgactattttttatctgaaaagtaatccattacacttttctatgttttatacatttcaaaagggagggaaattccaaagcctgaataatggaatggatacatttcaatttaacatatattctggctttagatcccgacattcactcctgtgcaaattacttaggtatgacttaggctaattttaagctaataagtgaaggtacattcactccctcaagagaatcaatactcagaaggttacaaagttttctttatagaatttcaatcaatcattccatctaaaaccttaaaatctctacaggactacataacataaatactgccagtttataaacgattgcctatctgaatttttatacctaccactactttaatttatacagttagttagcaaattagcaacccagtaagtacagttatcaaaaatactaggaaactatatccatatcgcttttggtgtcagattgtatctgtgcatctaaaaatattttaataaatactcaagtgctctcagagaaaaaaaaaacctgctttctcattagattactgaaatgctttaattcatactatgattttgttattagtgtgaattttaatgtagagaattcagtgtgctaagtgatatgccagtgtttcactacattcatttattaaaaaaaatcattcttgattatgcatgaaaacctgttttgtaaaataaaataaactgcttgggggtggtggttgcctttatcaatgtttcactattatcatagaatctatacttaaaaattgcattcccaagactcttaaagtagtttttatatctcactccctggtatactaagggagcataactctggagaaaaaataatttggttggttgagaatgtcttacttccctgacttggtaggggactacactcagttgaaattgcagcagacaatgctttgcactactttattaataataaacttggatggggtaaaagtgggggttatactggaaaaactatagaaaagctaaaagaaatgtatatttcactctaaaggaagattctttaacaataaatgtaatctcattgaagctgatttttaaagtatttttattttagagataagttgttaaatactatttcttataatagaactattttgatctgtttatatactatgcttgaatgtcaattaaattccctttctacagaaaggctttgacctcaacatgctttatttaatgtatcatgtttaaaatgacatgcttctgtctgcataccatcactgtttgttgctaaaaacataatgttccatgaacatgatgttactacagaaagtttattgatgagataactgtttgaaataactttcaattataccttatgtgagacttttatgttctgtgctgacaatgtgtactcaaatgtctataagcctgatattctacaacctcagatgtatctagtggatagtaaccattaacagatgactaatttgtttcactgtatcaaatttcagatgtttagttcaatggtaatgctgactacacattcactgtattaaatacaaaagaaaataatctttcccacgtataatcagcactccttttttttttttttttggtggttcagagattgatgagggattgtgtgcatattcttaaaaactatatgtcacttggagaaaaacagatttggtttaaacaaataagacctttttcctgaaactctgactcttatatgaaaatacctctggaggggtgagcaaccaatgacattaacagaggaataagaactagcttgaggcacaaaagtgatattcagggaaatcttcattgcttttagaaactactacattcacaggctgaaaacagaatatgtatagttaaaattttaactatttatttctttccccttctcacatagctgcaattctgtcttgagagctgcctgacttgccttcattttgagatctgtgatgtaaatatttcttaagagactgaatgtcactcaaacatctacttggactg

SEQ ID NO: 155826 - DNA, 575 bp, Homo sapiens
  Payload ID: 10610
  Gene Symbol: MCTP1
  Gene Name: multiple C2 domains, transmembrane 1
  ENST ID: ENST00000507214
  CDS Start-End: 1-575
cagaaaataataaacactgctggaaccagtaatgcagaagtccccttggctgatcccggaatgtaccagctggacattacattaagaaggggtcaaagtttagctgctcgagatcgaggagggacgagtgatccatatgtgaagtttaaaatcggaggaaaagaagtttttagaagtaagataatacacaagaacctcaaccctgtgtgggaagaaaaagcttgtattctggttgatcatcttagggagccattgtatataaaggtatttgactatgattttggactacaggatgactttatgggctcagcctttctggatctgacacaattggagttaaacaggcccacagatgtgacccttactctgaaagatcctcattatcctgaccatgatcttggaatcattttgctctcagtcatccttacccctaaagaaggagagtccagggatgtgtttcagacccaaagtttacgcctatcagacctacacagaaaatcgcatctttggagaggaatagtcagcatcaccttgattgaagggagagacctcaaggccatggattccaacgggtt

SEQ ID NO: 155827 - DNA, 874 bp, Homo sapiens
  Payload ID: 10610
  Gene Symbol: MCTP1
  Gene Name: multiple C2 domains, transmembrane 1
  ENST ID: ENST00000503301
  CDS Start-End: 1-874
cttgtgccaccagaagagctcctctctgccgggcaccgcctgcctggagcagctgctggagccgccgcctcctcccgcagagccggcgcggagtcccgcggagtctcgggccccggagacgggcgaggagcacggcagcagccagaaaataataaacactgctggaaccagtaatgcagaagtccccttggctgatcccggaatgtaccagctggacattacattaagaaggggtcaaagtttagctgctcgagatcgaggagggacgagtgatccatatgtgaagtttaaaatcggaggaaaagaagtttttagaagtaagataatacacaagaacctcaaccctgtgtgggaagaaaaagcttgtattctggttgatcatcttagggagccattgtatataaaggtatttgactatgattttggactacaggatgactttatgggctcagcctttctggatctgacacaattggagttaaacaggcccacagatgtgacccttactctgaaagatcctcattatcctgaccatgatcttggaatcattttgctctcagtcatccttacccctaaagaaggagagtccagggatgtgacaatgctaatgaggaagagttggaaaagatcaagtaagtttcagacccaaagtttacgcctatcagacctacacagaaaatcgcatctttggagaggaatagtcagcatcaccttgattgaagggagagacctcaaggccatggattccaacgggttgagcgatccctacgtgaagttccggcttgggcatcagaagtacaagagcaagattatgccaaaaacgttgaatcctcagtggagggaacaatttgattttcacctttatgaagaaaga

SEQ ID NO: 155828 - DNA, 2350 bp, Homo sapiens
  Payload ID: 10610
  Gene Symbol: MCTP1
  Gene Name: multiple C2 domains, transmembrane 1
  ENST ID: ENST00000506568
  CDS Start-End: 1-1245
actctgaaagatcctcattatcctgaccatgatcttggaatcattttgctctcagtcatccttacccctaaagaaggagagtccagggatgtggaactttcagaaaatgaagtggttggatcttatttctctgtgaagtctctcttttggaggtttcagacccaaagtttacgcctatcagacctacacagaaaatcgcatctttggagaggaatagtcagcatcaccttgattgaagggagagacctcaaggccatggattccaacgggttgagcgatccctacgtgaagttccggcttgggcatcagaagtacaagagcaagattatgccaaaaacgttgaatcctcagtggagggaacaatttgattttcacctttatgaagaaagaggaggagtcattgatatcactgcatgggacaaagatgctgggaaaagggatgatttcattggcaggtgccaggtcgacctgtcagccctcagtagggaacagacgcacaagctggagttgcagctggaagagggtgagggacacctggtgctgctggtcactctgacagcatcagccacagtcagcatctctgacctgtctgtcaactccctggaggaccagaaggaacgagaggagatattaaagagatatagcccattgaggatatttcacaacctgaaagatgtgggatttctccaggtgaaagtcatcagagcggaagggttaatggctgccgacgtcactggaaaaagtgacccattttgtgtggtagaactgaacaacgatagactgctaacacatactgtctacaaaaatctcaatcctgagtggaataaagtcttcacgttcaacattaaagatatccattcagttcttgaagtgacagtttatgatgaagatcgggatcgaagtgctgactttctgggcaaagttgctataccattgctgtctattcaaaatggtgaacagaaagcctacgtcttgaaaaacaagcagctgacagggccaacaaagggggtcatctatcttgaaatagatgtgatttttaatgctgtgaaagccagcttacgaacattaatacccaaagaacagaagtacattgaagaggaaaacagactctctaaacagctgctactaagaaactttatcagaatgaaacgttgtgtcatggtgctggtaaatgctgcatactacgttaatagttgctttgattgggattcacccccaaggagtctcgctgcttttgtggtatgatcatactgtattacttacattgttattcattaaattcagtaatcatagctgcatgtttctgtggctatagtaacagttatgttgatgtggccattttaaaactcctattttaagacttgactggacagatttgccgtgggcaggaacctgatggattgtacaaggtctgagtctaagaatacattttcccccctcagatttccggaacgcaagacatctcagccaatgtatcattttctctgtgacagttaaaaagtaaaattttacatattgcataattccaaaccccaataggacagccaagaaaagtcctccatgtgaaaaataataatagtaataatctcgaccattctcaatttgattttatctgtcctatagttaatttttttcaagatatgaaaatcattggtagtagaatgctaccaatgctacttggtaatgctttaacatgtgattcaactggaagtggatgtgacctatttaagagatgttttattatttctgagatttctagcttttaaaagtcacaagtgagaattcgatagatccaaagagtcctttaatatgttcatcttgtggccttttactttgattatttaaaaacttctgatgagaccaactggcagagctagaaaatccaaaagaatactttgctctgagctttagctgggattttcttctctcacattattttggctttttcaggatttcagtttgaagtttaagtagagtcattcttttgaaatcctttattttattttcatgtttgttcaaatatgagtaccttatgcttccttatagttgccagtttagcagaatacgactttattatgggggcttacaagaagagccttaattatagtaacaaatcaacattttagtattaccattcaaatgagtgtatgcacatctgtttagtactttgagctctgtcttcctctcaggccttgtatgggactttcattaatgtctgagcacatggaacaaagagtgtctacgtccctttgtgttgtaagttaccagaaagttaggcagcctgcttcccatagacgtgttgttgtctccctaaagaaagcaattgtcattatcgttaagttttagaaaa

SEQ ID NO: 155829 - DNA, 2629 bp, Homo sapiens
  Payload ID: 10610
  Gene Symbol: MCTP1
  Gene Name: multiple C2 domains, transmembrane 1
  Uniprot ID: Q6DN14
  ENST ID: ENST00000505078
  CDS Start-End: 177-1724
acacactctgctacattgaaactgctccctgaatcttttcctccggtaaattgtgcttcctgggaaactaagggtttcagacccaaagtttacgcctatcagacctacacagaaaatcgcatctttggagaggaatagtcagcatcaccttgattgaagggagagacctcaaggccatggattccaacgggttgagcgatccctacgtgaagttccggcttgggcatcagaagtacaagagcaagattatgccaaaaacgttgaatcctcagtggagggaacaatttgattttcacctttatgaagaaagaggaggagtcattgatatcactgcatgggacaaagatgctgggaaaagggatgatttcattggcaggtgccaggtcgacctgtcagccctcagtagggaacagacgcacaagctggagttgcagctggaagagggtgagggacacctggtgctgctggtcactctgacagcatcagccacagtcagcatctctgacctgtctgtcaactccctggaggaccagaaggaacgagaggagatattaaagagatatagcccattgaggatatttcacaacctgaaagatgtgggatttctccaggtgaaagtcatcagagcggaagggttaatggctgccgacgtcactggaaaaagtgacccattttgtgtggtagaactgaacaacgatagactgctaacacatactgtctacaaaaatctcaatcctgagtggaataaagtcttcacgttcaacattaaagatatccattcagttcttgaagtgacagtttatgatgaagatcgggatcgaagtgctgactttctgggcaaagttgctataccattgctgtctattcaaaatggtgaacagaaagcctacgtcttgaaaaacaagcagctgacagggccaacaaagggggtcatctatcttgaaatagatgtgatttttaatgctgtgaaagccagcttacgaacattaatacccaaagaacagaagtacattgaagaggaaaacagactctctaaacagctgctactaagaaactttatcagaatgaaacgttgtgtcatggtgctggtaaatgctgcatactacgttaatagttgctttgattgggattcacccccaaggagtctcgctgcttttgtgctctttctctttgttgtctggaactttgagctctacatgataccactggttttgttgttactattgacatggaactacttcttgataatatcagggaaagataacaggcaacgtgatacagtagtggaggacatgctagaggacgaggaagaagaagatgacaaagatgacaaggacagtgaaaaaaagggatttataaataaaatctatgccatccaggaggtatgtgtcagtgtccagaacatcctagatgaagtggcttcctttggcgaaaggataaagaatactttcaactggactgtcccattcttaagctggctggccattgtagccctctgtgtgttcacagccatcctgtactgcattccgctgagatacattgtccttgtctggggcatcaataaatttacaaaaaagcttcggagtccatatgcaattgataacaatgaactacttgacttcctttccagagtcccttcagatgtacaagtggtgcaataccaagaactgaaaccagatccttctcatagcccatataaaagaaagaaaaacaatcttggctagccagctcccagcactgaggagaccagcatctgtttgggaagataaaagaaaaagccctcagcctcagcagcatttcctttctttctgctttttatttattttgcctttttatcatgatcgagagaatctgtaaatagtgtacaaaggcatatgtctttgaatatatacttctattgtacagactcaacttgataaaggttttgctactgctgtgtcaaaaccttgttagctgtggataataatataacacactgaaagaacaaatataagaatgataacactggaagatatattcttatctaattactagtggattaaatactcacctgtgctctgattaaatctacatcaattgtaaatgtcgatttgattttaaagtttttttttaatgcgactattttttatctgaaaagtaatccattacacttttctatgttttatacatttcaaaagggagggaaattccaaagcctgaataatggaatggatacatttcaatttaacatatattctggctttagatcccgacattcactcctgtgcaaattacttaggtatgacttaggctaattttaagctaataagtgaaggtacattcactccctcaagagaatcaatactcagaaggttacaaagttttctttatagaatttcaatcaatcattccatctaaaaccttaaaatctctacaggactacataacataaatactgccagtttataaacgattgcctatctgaatttttatacctaccactactttaatttatacagttagttagcaaattagcaacccagtaagtacagttatcaaaaatactaggaaactatatccatatcgcttttggtgtcagattgtatctgtgcatctaaaaatattttaataaatactcaagtgctctcag

SEQ ID NO: 155830 - DNA, 2158 bp, Homo sapiens
  Payload ID: 10610
  Gene Symbol: MCTP1
  Gene Name: multiple C2 domains, transmembrane 1
  Uniprot ID: Q6DN14
  ENST ID: ENST00000505208
  CDS Start-End: 146-1948
gcagagcagcaagtgctccgtgcagggctgttgctatcacttggaggtgaacagcctcttttgccggtattcagtgaagaaagcaagtctaaatatgcagttctctcactggagtgaaagatgttttgttcatttctaatcaactatgctagacagctgcaagctgaaaagtgcctgcaatttgccatttatttgtaataagaaaataataaacactgctggaaccagtaatgcagaagtccccttggctgatcccggaatgtaccagctggacattacattaagaaggggtcaaagtttagctgctcgagatcgaggagggacgagtgatccatatgtgaagtttaaaatcggaggaaaagaagtttttagaagtaagataatacacaagaacctcaaccctgtgtgggaagaaaaagcttgtattctggttgatcatcttagggagccattgtatataaaggtatttgactatgattttggactacaggatgactttatgggctcagcctttctggatctgacacaattggagttaaacaggcccacagatgtgacccttactctgaaagatcctcattatcctgaccatgatcttggaatcattttgctctcagtcatccttacccctaaagaaggagagtccagggatgtgacaatgctaatgaggaagagttggaaaagatcaagtaaggaactttcagaaaatgaagtggttggatcttatttctctgtgaagtctctcttttggaggacgtgcggcaggccagctcttcctgtcctgggcttctgcagagcagagcttcagaatccttattgcaaaaatgtacaatttcagacccaaagtttacgcctatcagacctacacagaaaatcgcatctttggagaggaatagtcagcatcaccttgattgaagggagagacctcaaggccatggattccaacgggttgagcgatccctacgtgaagttccggcttgggcatcagaagtacaagagcaagattatgccaaaaacgttgaatcctcagtggagggaacaatttgattttcacctttatgaagaaagaggaggagtcattgatatcactgcatgggacaaagatgctgggaaaagggatgatttcattggcaggtgccaggtcgacctgtcagccctcagtagggaacagacgcacaagctggagttgcagctggaagagggtgagggacacctggtgctgctggtcactctgacagcatcagccacagtcagcatctctgacctgtctgtcaactccctggaggaccagaaggaacgagaggagatattaaagagatatagcccattgaggatatttcacaacctgaaagatgtgggatttctccaggtgaaagtcatcagagcggaagggttaatggctgccgacgtcactggaaaaagtgacccattttgtgtggtagaactgaacaacgatagactgctaacacatactgtctacaaaaatctcaatcctgagtggaataaagtcttcacgttcaacattaaagatatccattcagttcttgaagtgacagtttatgatgaagatcgggatcgaagtgctgactttctgggcaaagttgctataccattgctgtctattcaaaatggtgaacagaaagcctacgtcttgaaaaacaagcagctgacagggccaacaaagggggtcatctatcttgaaatagatgtgatttttaatgctgtgaaagccagcttacgaacattaatacccaaagaacagaagtacattgaagaggaaaacagactctctaaacagctgctactaagaaactttatcagaatgaaacgttgtgtcatggtgctggtaaatgctgcatactacgttaatagttgctttgattgggattcacccccaaggagtctcgctgcttttgtggccttgtatgggactttcattaatgtctgagcacatggaacaaagagtgtctacgtccctttgtgttgtaagttaccagaaagttaggcagcctgcttcccatagacgtgttgttgtctccctaaagaaagcaattgtcattatcgttaagttttagaaaaaaaatctctctctctctgtctctctcagtattctttttgtagctctttcttataataaatatatggtggtactattaag

SEQ ID NO: 155831 - DNA, 1751 bp, Homo sapiens
  Payload ID: 10610
  Gene Symbol: MCTP1
  Gene Name: multiple C2 domains, transmembrane 1
  ENST ID: ENST00000512425
  CDS Start-End: 285-1751
ctcttttgccggtattcagtgaagaaagcaagtctaaatatgcagttctctcactggagtgaaagatgttttgttcatttctaatcaactatgctagacagctgcaagctgaaaagtgcctgcaatttgccatttatttgtaataagaagtttttagaagtaagataatacacaagaacctcaaccctgtgtgggaagaaaaagcttgtattctggttgatcatcttagggagccattgtatataaaggtatttgactatgattttggactacaggatgactttatgggctcagcctttctggatctgacacaattggagttaaacaggcccacagatgtgacccttactctgaaagatcctcattatcctgaccatgatcttggaatcattttgctctcagtcatccttacccctaaagaaggagagtccagggatgtgacaatgctaatgaggaagagttggaaaagatcaagtaaggaactttcagaaaatgaagtggttggatcttatttctctgtgaagtctctcttttggaggacgtgcggcaggccagctcttcctgtcctgggcttctgcagagcagagcttcagaatccttattgcaaaaatgtacaatttcagacccaaagtttacgcctatcagacctacacagaaaatcgcatctttggagaggaatagtcagcatcaccttgattgaagggagagacctcaaggccatggattccaacgggttgagcgatccctacgtgaagttccggcttgggcatcagaagtacaagagcaagattatgccaaaaacgttgaatcctcagtggagggaacaatttgattttcacctttatgaagaaagaggaggagtcattgatatcactgcatgggacaaagatgctgggaaaagggatgatttcattggcaggtgccaggtcgacctgtcagccctcagtagggaacagacgcacaagctggagttgcagctggaagagggtgagggacacctggtgctgctggtcactctgacagcatcagccacagtcagcatctctgacctgtctgtcaactccctggaggaccagaaggaacgagaggagatattaaagagatatagcccattgaggatatttcacaacctgaaagatgtgggatttctccaggtgaaagtcatcagagcggaagggttaatggctgccgacgtcactggaaaaagtgacccattttgtgtggtagaactgaacaacgatagactgctaacacatactgtctacaaaaatctcaatcctgagtggaataaagtcttcacgttcaacattaaagatatccattcagttcttgaagtgacagtttatgatgaagatcgggatcgaagtgctgactttctgggcaaagttgctataccattgctgtctattcaaaatggtgaacagaaagcctacgtcttgaaaaacaagcagctgacagggccaacaaagggggtcatctatcttgaaatagatgtgatttttaatgctgtgaaagccagcttacgaacattaatacccaaagaacagaagtacattgaagaggaaaacagactctctaaacagctgctactaagaaactttatcagaatgaaacgttgtgtcatggtgctggtaaatgctgcatactacgttaatagttgctttgattgggattcacccccaaggagtctcgctgcttttgtgctctttctctttgttgtctggaactttgagctctacatgataccactg

SEQ ID NO: 155832 - DNA, 7555 bp, Homo sapiens
  Payload ID: 10611
  Gene Symbol: MCTP2
  Gene Name: multiple C2 domains, transmembrane 2
  Uniprot ID: Q6DN12
  ENST ID: ENST00000357742
  CDS Start-End: 1-2637
atggatctggataaaccatctgtttggggctcattaaaacagcggaccaggccattgttgatcaacttgagcaagaagaaggtgaaaaagaacccaagtaagcccccagatctacgggcaaggcatcacttggaccgccgtctcagcctctctgtgcctgatctcctggaggctgaggccttggccccagagggccggccttactccgggccacagtcttcctacacctcggtgcccagcagtctgtccactgcagggatctttcccaagagcagcagtagctccttgaaacagtctgaagaagaattggattggagccaggaagaagccagtcacctccatgtggtggaaacagactcagaggaggcctatgcctctcctgctgagcggagacgggtgtccagcaacggcatctttgatcttcagaaaacttcccttggaggggatgcaccagaagagccagagaagctatgtggaagcagtgacctgaatgcttctatgacatctcaacattttgaagaacaatctgtaccgggggaagccagtgatggcttgagtaacctccccagcccttttgcgtacctcctcaccatacacctgaaggaaggccggaacctggttgtccgagatcgctgtggcacaagtgatccttatgtgaaatttaagctgaatgggaagacgctgtacaaaagtaaagtcatatataagaacttgaacccagtatgggatgagatagttgtattgccaatccaaagccttgatcaaaagctacgtgtgaaggtatatgatcgagatttaaccacatctgatttcatgggttctgcatttgtcattctcagtgatcttgagcttaacagaacaactgaacatattttaaaactggaagatccaaacagtttagaagatgacatgggagtgatcgtgttaaatttgaacctagtggtaaaacagggtgatttcaagagacaccgttggtcaaatcggaagcgattaagtgccagcaagtcctctttgatacgcaacctacggctctctgagtccttgaaaaagaaccaactctggaacgggattataagtataactttgttggaagggaagaatgtctcaggaggaagcatgacagagatgtttgtccagttaaaactgggagatcagaggtataaaagtaagacactgtgtaagagtgcaaatccgcagtggcaggaacagtttgactttcactacttctctgacaggatgggcattttggacattgaagtgtggggaaaggacaacaaaaagcatgaggaacgtctgggcacgtgtaaagtggatatctcggcactccctctgaagcaagccaactgcctggagctgccactggacagctgtctgggggctctccttatgttggtcacacttacaccctgtgcgggggtctccgtctctgatctgtgtgtctgccccttagcagacctcagcgaaagaaagcagattacccagcgatattgcttacagaactccctgaaagatgtgaaagacgtcggcattctacaagtgaaggttttaaaggcagcagatctcttagcggcagatttctcagggaagagtgacccattttgcttgttggagttaggcaatgaccgacttcagacgcataccgtctacaaaaacctcaaccctgaatggaacaaagtttttacatttcccattaaagatatccatgatgttttggaagtgacagtgtttgatgaagatggagataaacccccagattttcttggaaaagttgccattcccttgctgtccattagagatggacaaccgaattgttatgtactaaagaataaagatttagaacaagcttttaaaggagttatttacttagagatggaccttatatataatccggtgaaagcaagtattaggacttttactccccgggaaaagcgctttgttgaagacagccgcaagctgtccaaaaagatcttatcaagagatgtggaccgtgtgaaaagaatcactatggcaatatggaatacaatgcagttccttaaaagctgcttccagtgggaatccacattaagaagtacaatagcattcgcggtatttttgatcactgtctggaattttgaactatatatgatccccttggcattgttgctgatctttgtctacaatttcatcagacctgtgaaaggcaaggtcagcagcatccaggacagccaggagagcacagacatagatgacgaggaggatgaagatgacaaggaatctgagaaaaaggggttgattgaaagaatctatatggtacaggatattgtttcaactgttcaaaacgtcttggaggaaatagcttcttttggagaaaggattaagaacacatttaactggacggtccccttcctttcatctctggcctgtttgattctggcagcagccaccatcattttgtatttcattccactgcggtacatcattttaatctggggcataaataaatttactaagaagcttcgaaatccctattccatcgacaataatgagctactagacttcctctctagggtaccgtctgatgttcaaaaggtgcagtatgcagaattgaaactctgcagcagccacagccccctgcggaagaagcgcagcgctctctagggcacacaccgactttggacagcagcacccaatattgtgtttggttgagtagaccaatgttatggctgtttcagtggtacccaaggtgtccttctgaaatgcatgccctgtggcaccctctgtatacttcctcctccttcacgtgcacagacatacacacatgtgcacacaccctcatgcatgggtgtcctagttgcgtagagggtcagcccagcgaaaagcaacaaccccaagactgtgaaagactaacatccattctgaaataggagataacaaggctgccatggatctgaacaccaccttccttgagaacagccaggagcccacttggattcaagagtgactttgaacttgttttcacacctccaacagactctcattaagattcagttatttccgctccccagccccacactcctttcagattatcgttcatgggcgtaagtctcttctcagagttaacaagtctttggtagtcatcctctgtccaaatattgtatattattaaaaggcatttttaataattaccagaattagctcaaacctttagggatctttcagccatgattattaaggatatgtatgtgaatttttgggaaacctctcggtgctggatgccagcctacagcagggtccattgctggcaatggatggcccaggaaggtccctagagatcactcacttgaaaaatgagggtcccatgaaagtatttggttgccttctgatgccacttcttctcactttactttttgcttattttcaaaatattataaaatgtcaacatataatttcagaaaggcaggtgggggtaggggagaaatgaatgaataaattctctaggtatttagaaagataagaaactgaagaccgagagactaataaggctgcttacctaattattataatcatttcatttgcctgaatgttttaagcaggaagtagaaatactttggctgcccaaatgtatcttttgttcctcttagaagtaaaataagctacatacaataaaaatttatttcagaaccccatttctagaaaataccaccccagagtcctcatttgatagcatctgtctcctgcagacctcatcattccacagtatttccctgccatgtaaaaatcctgactttgtgcgtatataaaatgtatgcaattaagtctgtttaaatgatatttaagttttaaagactgtattttgttgacacatactttgtgcagtttttatgtatgtatgtattataaaaaaagttaaggttaaaaagatctcatttaatagtgagttcactatttttttttttttgtctctgggttgtaatttaataatcttcaaacaaaatgtttacgaaaaatgccaaagattctaaatcttatcatcccgtgtctgtttttcttcatgttgtatctcactgggttgctttctggctgagccagaattctgcatgatttgatttacttcaagttaatgaagctggctggaaaagagccttgcagaaattataaaagctccagtaaatctcgtagttgtacatacaatagatacccaagaacctcttttgttaaaccagttactcaatcttctgtgtaaacaatgcctcattgtcttgcttctaactatcatctagtttatcatagtctgtcattttgtaacgacctaagtcagacatttttaaacagacatgtgagatctgatcagtcatttgaatgaaaactttcagcagcaaaataaccccttatttatttaaaagtggaaccaatactttattgttgttcttttgctatagaatttcaaaatgaaattatttgcccgacaagaaggcatcattagttagacttgtttcctctgtagcccgattgaaattctcagtgttaagtttaggacccaaacaccagctgggacgtaagagcaggaccgaatcaaccttgaataaactgtatatagaaaacaattgttagttgattaagtagacattggatgtttgttagaaaggaatgttagttgtaagtgacatgttaagatttatacaattgtcaaaaacttttaggaaagattccagaatgcttttgataaaatttatcgattgtggattcacagtgtgataattaagtagggatgttgaagtcttgccaagttttcctggttcccttctcaaactttatcttcccatttctagccctgtctctctatcttacaggcatctacacctcagcaagtcagaaactaaacatcatctgtctctccctgtcttcagaaccccaaccctcataatctccttccagcttccttatttcccttaccaggactggcattttctgggcttggaatttctcggtcatcctctttttttttgttcctcgtgctgttgtcctcgtctcccaacccctaaagcctagtaggtccagtgtcaatgcattaaccacttctgttctgatttccaccacccaagtggaggccttcataacctctcagacgtcacggccatgatgccagttacattatgcctagttaatcttcattcagactggaaggacctgcccccagttgtttctttctgaatagattctactctccttcaacacttccaaagtctcctgccccaaagaggcttagttagtcctgtggctggatgtgactccaacttccttttttgtaccatcacatctttcatatctttctggcatctgccatacatcataagaggctttgaccactgtcctccactgaatagcccattacagctagcacctaatagttactcaggaaataaatacatgtttaacaggccaggtcgtagagattatttttctttctctgccttttcatgtgctgctttcagaacagagggctggattggatagattagtatgatctatcctggagattcatttcttgcattaagagcttattttgtgtgatattatttataatccctgactatgtcaattataaacttttaaattatgtcttatatttgaagttcttacctacatatcagaggaaaatataatgtttatttctaggtggtaaaacaatcttctggattcttttttctttacttgtaaattatcatttaacaagtctatattgaatgccgataattttctggaacaaaacagactacattcccttggtaaagccagacattaaacagatactttcaagcaacagcatgccatgctcagatttaagtttgaaaaatattctagctgcaatggatagcctagcaattttcaaagtttagagaagttattaatattagccctttgtagtactcctgataaatgaataacaccctggactttcaaatagtggcactgggaaaaaagtaagtagaattgagagatggtgaagagataaagtgagcaggacttaacaattgctggactatgggatgagggagcgtagagtcaaggatggctctcagtccctaggtctccaggtctaggaagatggtgttacctttcactaagggagagaactgtaagaactgctgtgagaggaccacaggagtccagttttagcgctgaatctcaggtgactgaaaagcatccaaataggaatgtcagcaaggtaatggaatatatagttctcagagaagtaacacactgtacttgagatgtacacaagttaaaggcaaacattgtatatgaaaagtgatcaaaactacatgcttcaagaaattaaaccttgaagaactcaacagttaatgtcatatatagaaaggcaagtcagttaagagtgtaaatagaaacgggtaaatacagaggagaaaaacagtaagcatggactgtcctagaattcagtggcagagcatactgcaagaaagctgatgtggtcaataatatcaaatgccgctgagatcacataagtacagaatcatgaccttaatggtttgacagtttggaagcaccctggcaacaagccatttcagtggaatggtagaaatggaaaccacgctgggttgagaagtgagtggatgtgaaaatatggggcctctgaatggaggtaacccttgaaaaattccactgtggagaagaaaggagagagagagggctggaatttggaatgaaaggagatatttgggattattttagtaagaaaacagaggtgtcatgacctcagtgtaaccctattagctgcaaaaaattcttcatgggcttgagatggagttagccatattcattattgaaaactatgttctgcacttatacattgttggttggagtgtaaattagttcaaccgctgtggaagacagggtgggtgtttcctcaaaaacctaaagacagaaataccatttgacccagcaatcccataactgggtatgtacccaaaggaatataaattgttctactataaaaacacatgcacacacatgttcactgcaacactatttacaatagcaaagacactggatcagtctaaatgcccatcattgatagaatggataaagaaaatgtggtagaggtacaccatggaatactatgcagccataaaaaagaatgagatcatgtccttttgcaggaacttggatacagctggaggccattatccttagcaaactaatgcagcaacagaaaaccaaataccacatgttctcatttataggtaggagttaaatgatgagaacacatggacatgtagaagggaacaaaatacactgggggctattggagggtgaagggtgaaaggaggaagaggatcaggaaaaataatgagtaccaggcttaatacatgggcgatgaaataatctgtatgacaagcctctctgacacagtttacctatgtaacaaacctgcacagttacccctgaactttaaaaaaaactatgttctatcaaaacctgcctctcatttatgtattaggaatcttgtgacaacggaacagttgaaaaattaaaataaaaattgcctgaaaatgca

SEQ ID NO: 155833 - DNA, 4493 bp, Homo sapiens
  Payload ID: 10611
  Gene Symbol: MCTP2
  Gene Name: multiple C2 domains, transmembrane 2
  Uniprot ID: Q6DN12
  ENST ID: ENST00000456504
  CDS Start-End: 350-949
gcctgggggtgggcgtcttctctcaaccgaagctgggagttggggagctggagggtccaggatgagaattcagtggcgctactaccccggagctgcttgtggttcagagatcagaaaggtgtcctgaggactggaggcagaaatccaggcgtggcgtactggaaggcgcactaggggagggcagcctggcccagaatttctttgcattttaaaggccacacattcagtctccccggggcgctacggaggtagtcaccgccacatccaggactccttccacagaggagtcattgcagttttcagtagaggtgtacttctgagaagtggcttcttgggtcttcatgcagccatggatctggataaaccatctgtttggggctcattaaaacagcggaccaggccattgttgatcaacttgagcaagaagaaggtgaaaaagaacccaagtaagcccccagatctacgggcaaggcatcacttggaccgccgtctcagcctctctgtgcctgatctcctggaggctgaggccttggccccagagggccggccttactccgggccacagtcttcctacacctcggtgcccagcagtctgtccactgcagggatctttcccaagagcagcagtagctccttgaaacagtctgaagaagaattggattggagccaggaagaagccagtcacctccatgtggtggaaacagactcagaggaggcctatgcctctcctgctgagcggagacgggtgtccagcaacggcatctttgatcttcagaaaacttcccttggaggggatgcaccagaagagccagagaagctatgtggaagcagtgacctgaatgcttctatgacatctcaacattttgaagaacaatctgacagtcaaaagtttgaaatgactcaaaaatttaattgggctcatgtaatacatattcaaaaacagacttgaattctacaatatggccagcaggagttgatgcatttctggaggaggaagtgactgagttgcgggaaggtaccgggggaagccagtgatggcttgagtaacctccccagcccttttgcgtacctcctcaccatacacctgaaggaaggccggaacctggttgtccgagatcgctgtggcacaagtgatccttatgtgaaatttaagctgaatgggaagacgctgtacaaaagtaaagtcatatataagaacttgaacccagtatgggatgagatagttgtattgccaatccaaagccttgatcaaaagctacgtgtgaaggtatatgatcgagatttaaccacatctgatttcatgggttctgcatttgtcattctcagtgatcttgagcttaacagaacaactgaacatattttaaaactggaagatccaaacagtttagaagatgacatgggagtgatcgtgttaaatttgaacctagtggtaaaacagggtgatttcaagagacaccgttggtcaaatcggaagcgattaagtgccagcaagtcctctttgatacgcaacctacggctctctgagtccttgaaaaagaaccaactctggaacgggattataagtataactttgttggaagggaagaatgtctcaggaggaagcatgacagagatgtttgtccagttaaaactgggagatcagaggtataaaagtaagacactgtgtaagagtgcaaatccgcagtggcaggaacagtttgactttcactacttctctgacaggatgggcattttggacattgaagtgtggggaaaggacaacaaaaagcatgaggaacgtctgggcacgtgtaaagtggatatctcggcactccctctgaagcaagccaactgcctggagctgccactggacagctgtctgggggctctccttatgttggtcacacttacaccctgtgcgggggtctccgtctctgatctgtgtgtctgccccttagcagacctcagcgaaagaaagcagattacccagcgatattgcttacagaactccctgaaagatgtgaaagacgtcggcattctacaagtgaaggttttaaaggcagcagatctcttagcggcagatttctcagggaagagtgacccattttgcttgttggagttaggcaatgaccgacttcagacgcataccgtctacaaaaacctcaaccctgaatggaacaaagtttttacatttcccattaaagatatccatgatgttttggaagtgacagtgtttgatgaagatggagataaacccccagattttcttggaaaagttgccattcccttgctgtccattagagatggacaaccgaattgttatgtactaaagaataaagatttagaacaagcttttaaaggagttatttacttagagatggaccttatatataatccggtgaaagcaagtattaggacttttactccccgggaaaagcgctttgttgaagacagccgcaagctgtccaaaaagatcttatcaagagatgtggaccgtgtgaaaagaatcactatggcaatatggaatacaatgcagttccttaaaagctgcttccagtgggaatccacattaagaagtacaatagcattcgcggtatttttgatcactgtctggaattttgaactatatatgatccccttggcattgttgctgatctttgtctacaatttcatcagacctgtgaaaggcaaggtcagcagcatccaggacagccaggagagcacagacatagatgacgaggaggatgaagatgacaaggaatctgagaaaaaggggttgattgaaagaatctatatggtacaggatattgtttcaactgttcaaaacgtcttggaggaaatagcttcttttggagaaaggattaagaacacatttaactggacggtccccttcctttcatctctggcctgtttgattctggcagcagccaccatcattttgtatttcattccactgcggtacatcattttaatctggggcataaataaatttactaagaagcttcgaaatccctattccatcgacaataatgagctactagacttcctctctagggtaccgtctgatgttcaaaaggtgcagtatgcagaattgaaactctgcagcagccacagccccctgcggaagaagcgcagcgctctctagggcacacaccgactttggacagcagcacccaatattgtgtttggttgagtagaccaatgttatggctgtttcagtggtacccaaggtgtccttctgaaatgcatgccctgtggcaccctctgtatacttcctcctccttcacgtgcacagacatacacacatgtgcacacaccctcatgcatgggtgtcctagttgcgtagagggtcagcccagcgaaaagcaacaaccccaagactgtgaaagactaacatccattctgaaataggagataacaaggctgccatggatctgaacaccaccttccttgagaacagccaggagcccacttggattcaagagtgactttgaacttgttttcacacctccaacagactctcattaagattcagttatttccgctccccagccccacactcctttcagattatcgttcatgggcgtaagtctcttctcagagttaacaagtctttggtagtcatcctctgtccaaatattgtatattattaaaaggcatttttaataattaccagaattagctcaaacctttagggatctttcagccatgattattaaggatatgtatgtgaatttttgggaaacctctcggtgctggatgccagcctacagcagggtccattgctggcaatggatggcccaggaaggtccctagagatcactcacttgaaaaatgagggtcccatgaaagtatttggttgccttctgatgccacttcttctcactttactttttgcttattttcaaaatattataaaatgtcaacatataatttcagaaaggcaggtgggggtaggggagaaatgaatgaataaattctctaggtatttagaaagataagaaactgaagaccgagagactaataaggctgcttacctaattattataatcatttcatttgcctgaatgttttaagcaggaagtagaaatactttggctgcccaaatgtatcttttgttcctcttagaagtaaaataagctacatacaataaaaatttatttcagaaccccatttctagaaaataccaccccagagtcctcatttgatagcatctgtctcctgcagacctcatcattccacagtatttccctgccatgtaaaaatcctgactttgtgcgtatataaaatgtatgcaattaagtctgtttaaatgatatttaagttttaaagactgtattttgttgacacatactttgtgcagtttttatgtatgtatgtattataaaaaaagttaaggttaaaaagatctcatttaatagtgagttcactatttttttttttttgtctctgggttgtaatttaataatcttcaaacaaaatgtttacgaaaaatgccaaagattctaaatctt

SEQ ID NO: 155834 - DNA, 2472 bp, Homo sapiens
  Payload ID: 10611
  Gene Symbol: MCTP2
  Gene Name: multiple C2 domains, transmembrane 2
  Uniprot ID: Q6DN12
  ENST ID: ENST00000451018
  CDS Start-End: 1-2472
atggatctggataaaccatctgtttggggctcattaaaacagcggaccaggccattgttgatcaacttgagcaagaagaaggtgaaaaagaacccaagtaagcccccagatctacgggcaaggcatcacttggaccgccgtctcagcctctctgtgcctgatctcctggaggctgaggccttggccccagagggccggccttactccgggccacagtcttcctacacctcggtgcccagcagtctgtccactgcagggatctttcccaagagcagcagtagctccttgaaacagtctgaagaagaattggattggagccaggaagaagccagtcacctccatgtggtggaaacagactcagaggaggcctatgcctctcctgctgagcggagacgggtgtccagcaacggcatctttgatcttcagaaaacttcccttggaggggatgcaccagaagagccagagaagctatgtggaagcagtgacctgaatgcttctatgacatctcaacattttgaagaacaatctgtaccgggggaagccagtgatggcttgagtaacctccccagcccttttgcgtacctcctcaccatacacctgaaggaaggccggaacctggttgtccgagatcgctgtggcacaagtgatccttatgtgaaatttaagctgaatgggaagacgctgtacaaaagtaaagtcatatataagaacttgaacccagtatgggatgagatagttgtattgccaatccaaagccttgatcaaaagctacgtgtgaaggtatatgatcgagatttaaccacatctgatttcatgggttctgcatttgtcattctcagtgatcttgagcttaacagaacaactgaacatattttaaaactggaagatccaaacagtttagaagatgacatgggagtgatcgtgttaaatttgaacctagtggtaaaacagggtgatttcaagagacaccgttggtcaaatcggaagcgattaagtgccagcaagtcctctttgatacgcaacctacggctctctgagtccttgaaaaagaaccaactctggaacgggattataagtataactttgttggaagggaagaatgtctcaggaggaagcatgacagagatgtttgtccagttaaaactgggagatcagaggtataaaagtaagacactgtgtaagagtgcaaatccgcagtggcaggaacagtttgactttcactacttctctgacaggatgggcattttggacattgaagtgtggggaaaggacaacaaaaagcatgaggaacgtctgggcacgtgtaaagtggatatctcggcactccctctgaagcaagccaactgcctggagctgccactggacagctgtctgggggctctccttatgttggtcacacttacaccctgtgcgggggtctccgtctctgatctgtgtgtctgccccttagcagacctcagcgaaagaaagcagattacccagcgatattgcttacagaactccctgaaagatgtgaaagacgtcggcattctacaagtgaaggttttaaaggcagcagatctcttagcggcagatttctcagggaagagtgacccattttgcttgttggagttaggcaatgaccgacttcagacgcataccgtctacaaaaacctcaaccctgaatggaacaaagtttttacatttcccattaaagatatccatgatgttttggaagtgacagtgtttgatgaagatggagataaacccccagattttcttggaaaagttgccattcccttgctgtccattagagatggacaaccgaattgttatgtactaaagaataaagatttagaacaagcttttaaaggagttatttacttagagatggaccttatatataatccggtgaaagcaagtattaggacttttactccccgggaaaagcgctttgttgaagacagccgcaagctgtccaaaaagatcttatcaagagatgtggaccgtgtgaaaagaatcactatggcaatatggaatacaatgcagttccttaaaagctgcttccagtgggaatccacattaagaagtacaatagcattcgcggaatctgagaaaaaggggttgattgaaagaatctatatggtacaggatattgtttcaactgttcaaaacgtcttggaggaaatagcttcttttggagaaaggattaagaacacatttaactggacggtccccttcctttcatctctggcctgtttgattctggcagcagccaccatcattttgtatttcattccactgcggtacatcattttaatctggggcataaataaatttactaagaagcttcgaaatccctattccatcgacaataatgagctactagacttcctctctagggtaccgtctgatgttcaaaaggtgcagtatgcagaattgaaactctgcagcagccacagccccctgcggaagaagcgcagcgctctctag

SEQ ID NO: 155835 - DNA, 1422 bp, Homo sapiens
  Payload ID: 10611
  Gene Symbol: MCTP2
  Gene Name: multiple C2 domains, transmembrane 2
  ENST ID: ENST00000543482
  CDS Start-End: 193-1383
gatgcccccgcccccgccgcgtcagggttgctccctgcgcttccgagtggcgactgcagcgggtccggtgcaggtgaggggcgcgcgcctgcccagctttgcagcccccgaacgcggcctcgcacaggagtcattgcagttttcagtagaggtgtacttctgagaagtggcttcttgggtcttcatgcagccatggatctggataaaccatctgtttggggctcattaaaacagcggaccaggccattgttgatcaacttgagcaagaagaaggtgaaaaagaacccaagtaagcccccagatctacgggcaaggcatcacttggaccgccgtctcagcctctctgtgcctgatctcctggaggctgaggccttggccccagagggccggccttactccgggccacagtcttcctacacctcggtgcccagcagtctgtccactgcagggatctttcccaagagcagcagtagctccttgaaacagtctgaagaagaattggattggagccaggaagaagccagtcacctccatgtggtggaaacagactcagaggaggcctatgcctctcctgctgagcggagacgggtgtccagcaacggcatctttgatcttcagaaaacttcccttggaggggatgcaccagaagagccagagaagctatgtggaagcagtgacctgaatgcttctatgacatctcaacattttgaagaacaatctgtaccgggggaagccagtgatggcttgagtaacctccccagcccttttgcgtacctcctcaccatacacctgaaggaaggccggaacctggttgtccgagatcgctgtggcacaagtgatccttatgtgaaatttaagctgaatgggaagacgctgtacaaaagtaaagtcatatataagaacttgaacccagtatgggatgagatagttgtattgccaatccaaagccttgatcaaaagctacgtgtgaaggtatatgatcgagatttaaccacatctgatttcatgggttctgcatttgtcattctcagtgatcttgagcttaacagaacaactgaacatattttaaaactggaagatccaaacagtttagaagatgacatgggagtgatcgtgttaaatttgaacctagtggtaaaacagggtgatttcaagagacaccgttggtcaaatcggaagcgattaagtgccagcaagtcctctttgatacgcaacctacggctctctgagtccttgaaaaagaaccaactctggaacgggattataagtataactttgttggaagggaagaatgtctcaggaggaagcatgacagagatgtttgtccagttaaaactgggagatcagaggtataaaagtaaggatgggcattttggacattgaagtgtggggaaaggacaacaaaaagcatgaggaacgtct

SEQ ID NO: 155836 - DNA, 1957 bp, Homo sapiens
  Payload ID: 10611
  Gene Symbol: MCTP2
  Gene Name: multiple C2 domains, transmembrane 2
  Uniprot ID: Q6DN12
  ENST ID: ENST00000557742
  CDS Start-End: 330-1250
ctgtgacagcaggtttgcaaaaccaatgaaaaaaacagttttccccaggcagggaggaattttttttataattaaatactgaaagttggaattcctatgatcatcaaagtcactctcaggaattagaagcaagtttacatgtcatctttattttttgctttagtcctctttgatacgcaacctacggctctctgagtccttgaaaaagaaccaactctggaacgggattataagtataactttgttggaagggaagaatgtctcaggaggaagcatgacagagatgtttgtccagttaaaactgggagatcagaggtataaaagtaaggatgggcattttggacattgaagtgtggggaaaggacaacaaaaagcatgaggaacgtctgggcacgtgtaaagtggatatctcggcactccctctgaagcaagccaactgcctggagctgccactggacagctgtctgggggctctccttatgttggtcacacttacaccctgtgcgggggtctccgtctctgatctgtgtgtctgccccttagcagacctcagcgaaagaaagcagattacccagcgatattgcttacagaactccctgaaagatgtgaaagacgtcggcattctacaagtgaaggttttaaaggcagcagatctcttagcggcagatttctcagggaagagtgacccattttgcttgttggagttaggcaatgaccgacttcagacgcataccgtctacaaaaacctcaaccctgaatggaacaaagtttttacatttcccattaaagatatccatgatgttttggaagtgacagtgtttgatgaagatggagataaacccccagattttcttggaaaagttgccattcccttgctgtccattagagatggacaaccgaattgttatgtactaaagaataaagatttagaacaagcttttaaaggagttatttacttagagatggaccttatatataatccggtgaaagcaagtattaggacttttactccccgggaaaagcgctttgttgaagacagccgcaagctgtccaaaaagatcttatcaagagatgtggaccgtgtgaaaagaatcactatggcaatatggaatacaatgcagttccttaaaagctgcttccagtgggaatccacattaagaagtacaatagcattcgcgcaccgcaaagaggaaccacccctgtctatgaaatgtacccttttctctggtgacattggcccatccttatgagcataataaaatcgcagaatcaaagcgctgcaagagatcttaaaaccacctaagtctaccactgagagcccaagaatcttggaaggacttcacagctggcctcatgccttcactttatatctcagggcattttctctcatttgtaaagggacttgtccttgatcaaattggtaatgtcagccatgggaggagaaatcaagtctcccgactgcaaatctttgtatatttggtatcatgccattcatttctgtcctgtgcaaagatcactataaaaactaatacgaggtatgagtggtctaagagtgtgaatatcagtcatgatcattggtgaatctgatttctgaatgttatgtggttctgcttctgttttctactgccaatatatgctgaatgttctctcttagccaacaggcatagcctcatataaaaaatgggggaaaaaaaacatttattagcccaagaagccaatgggttcaaggtcactcccaacatttttatgccatcaagtatatcagctccaaaagaggcttttcctttgccattggggggtattttgtttgctgtcgtttattttagttctccactgcttcggtgtagaggacctatgctgcctgtaggcttgacctttcctatactttttctgctgtctgaagttgctaaaacatttggccttaataaaaacactaataaaggttttattaatctgt

SEQ ID NO: 155837 - DNA, 4182 bp, Homo sapiens
  Payload ID: 10612
  Gene Symbol: MCFD2
  Gene Name: multiple coagulation factor deficiency 2
  Uniprot ID: Q8NI22
  ENST ID: ENST00000319466
  CDS Start-End: 153-593
aatgggcgggcggcagggagcgcgcgtgcgcagggcaggtcggggggggggggggggcggggcgaagccgaggaagagcgttttggggacgggggctggtgaggctcacgttggagggcttcgcgtctgcttcggagaccgtaaggatattgatgaccatgagatccctgctcagaacccccttcctgtgtggcctgctctgggccttttgtgccccaggcgccagggctgaggagcctgcagccagcttctcccaacccggcagcatgggcctggataagaacacagtgcacgaccaagagcatatcatggagcatctagaaggtgtcatcaacaaaccagaggcggagatgtcgccacaagaattgcagctccattacttcaaaatgcatgattatgatggcaataatttgcttgatggcttagaactctccacagccatcactcatgtccataaggaggaagggagtgaacaggcaccactaatgagtgaagatgaactgattaacataatagatggtgttttgagagatgatgacaagaacaatgatggatacattgactatgctgaatttgcaaaatcactgcagtagatgttatttggccatctcctggttatatacaaatgtgacccgtgataatgtgattgaacactttagtaatgcaaaataactcatttccaactactgctgcagcattttggtaaaaacctgtagcgattcgttacactggggtgagaagagataagagaaatgaaagagaagagaaatgggacatctaatagtccctaagtgctattaaataccttattggacaagggcttgcttcaagcatctgtattagtctgtattaatgctgctgataaagacgtacccgagactgggaagaaaaagaggtttacttggacttacagttccacatggctggggaggcctcagaatcatggcgggaggtgaaaggcacttcttacatggcagcaagagaaaatgaggaagaagcaaaagtggaaacccctgataagccatcagatcttgtgaaacttattcactatcacaagaatagcatgggaaagactggcccccatgattcaattacctccccttgggtctctcccacaacacgtgggaattctggtagatacaatttcaagttgagatttgggtggggacatagccaaaccatatcattctacccctggcccctccaaatctcatgtcctcactattcaaaaccaatcatgccttcctaacagtcccccaaagtcttaactcttttcagcattaacgcaaaaatccacagtccaaagtctcatctgagacaaggcaagtcccttccacctatgagcctgtaaaatcaaaagcaagctagttacttcctagataccaacaggggtacaggtattgattaaagacggctgttccaaatgggagaaattggccaaaataaaggggttacagggcccatgcaagtccgaaatccagcagggctgtcaaattttaaagttccagaataatctcctttgactccaggtctcacatccaggtcatactgatgcaagaagtgggttcccatggtcttgggcagctctgcccctgtggctttgtagggtacagcctccctcctggctgctttcacggctgttgttcagtgcctgcggcttttccaggtgcacggtgcaagctgttggtggatctaccattctggggtctggaggacggtggccctcttctcacagctccactaggcagtgccccagtagggactctgtgtgggggctcccacaccacatttcccttctgcactgccctagcagaggttctctcccctgccgctgagagggcctctcccctgcagcaaacgtttgcctgggcattgaggcatttccatacatcttctgaaaactaggcggaggtttccaaatctcaattcttgacttctgtgcacctgcaggcttaacagcacatagaagctgccaaggcttggggcttccactctgaagccacagcccgagctgtatgttggcccctttcagccatggctggagtggctgggacacaagacaccaagtccctaggctgcacacacatgtcaggggctgccctgacatggcctggagacattttccccatggtgttggggattaacattaggctccttgctacttatgcaaatttctgcagctggcttgaatttctccccagaaaatgggtttttcttttctattgcatagtcaggctgcaaatttccaaacttttatgctttgcttcccttatttataagggaatgcctttaaaagcacccaagtcacctgttgaacactttgctgcttagaaatttcttccgctagttaacctaaatcatctctctcaagttcaaagttccacaaatccctatggaaggggcaaaatgctgccagtctctttgctaaaacataacaagagtcacctttactccagttcccaacaagttcctcatcttcatctgaggccacctcagcctggactttgttgtccatattgctatcagcatttggggcaaagccattcaacaagtctgtaggaagttccaaactttcccacattttcctgttttcttctgagccctccaaactgttccagcctctgcctgttacccagttccaaagtcacttccacattttgggtatttcttcagcaggtcccaatctactggtaccaatttactgtattagtccgttttcacgctgctgataaagacatacccgagactgggaagaaaaagtggtttaattggacttaaagttccacatggctggggaggcctcagaatcatggtgggaggcaaaagacacttcttacattgtggcaagaaaaaatgaggaagaagcaaaagcagaaacccctgataaactgatcagatctcatgagacttattcactgtcacgagaatagcacgggaaagactggcccccatgattcaattacctccccctgggtctgtcccacaacacgtgggaattctgggagatacaattcaagttgagatttgtggggggacacaaccaaaccatatcagcatcctttcaagaatattagataattggagctgagtactcaggaacttgactgtagtagaatactgctagtttcttaattttaattcacatcacctgaaaagtaaaacaacaggctttgccaagtggatgcttttcagtaacagtgaagtggagtgaataccaaatgtttgccctggtggttcctatctcttcaggcaaacatggtcagtattctgtaaagttcccctggcctaaatgattacttgctctgggcaagtggatatttattaggctatttcaaagccacagcataagaatgtcagcctagccacagagtctgagattctgagttcagcctagccacagagtctaagattctgtatcctctgacattttggaaatgatacactactggcttaagtgatgactctttcagattttcagtattttatacaactactgccacatccttatactttattgcttttctgtcttcttcaacctgggagagaccctgaatttgagtgtgttctctaatcaatagtggtttagctttcttttctatttcactcgtttctagggttttttatttgcagtttaggaactattaggaatgtcaggactttatcagcaggggtaaaactaccacctggcctagcctaagtaggaagtgaaaagataattcaccaaacaatgattaatcagatagaagttctagtcaagagggatattgttgaagttacctcttttagcctagatacatggattcttttcaaatcaggaaagattagaaaaggaacccaaaaaaccctttaacagtgtgaatctttatagtatttgaaaatgagaagaagcagcagattgtaatttggtttattggatgtgatggacgttctgtaatagaaaacctgaaacgatgattgaatgggaaaaagagactacaaaatttgtcgtaggatgtatacagacttattttctttattacagtattataagaaaacatatgtatttgtaaaaatggtttcctgtgtcaagtatttgtgcagtcagagctgacttgtaaactattcttgtaatagctcattattttgaaagatttatatatgatgaattctggatatatgaccaataaaactgatgaagcaaaa

SEQ ID NO: 155838 - DNA, 648 bp, Homo sapiens
  Payload ID: 10612
  Gene Symbol: MCFD2
  Gene Name: multiple coagulation factor deficiency 2
  Uniprot ID: Q8NI22
  ENST ID: ENST00000409218
  CDS Start-End: 139-579
ggatccgccatcctacgtcgcccgtggaactacgttcctgagggcttccggcgttgcctagcaactgccgggcccctagggcgtccagcggcccaactggagtggagccgagtgtcgcccttgggaaagcagatattgatgaccatgagatccctgctcagaacccccttcctgtgtggcctgctctgggccttttgtgccccaggcgccagggctgaggagcctgcagccagcttctcccaacccggcagcatgggcctggataagaacacagtgcacgaccaagagcatatcatggagcatctagaaggtgtcatcaacaaaccagaggcggagatgtcgccacaagaattgcagctccattacttcaaaatgcatgattatgatggcaataatttgcttgatggcttagaactctccacagccatcactcatgtccataaggaggaagggagtgaacaggcaccactaatgagtgaagatgaactgattaacataatagatggtgttttgagagatgatgacaagaacaatgatggatacattgactatgctgaatttgcaaaatcactgcagtagatgttatttggccatctcctggttatatacaaatgtgacccgtgataatgtgattgaacactttagtaa

SEQ ID NO: 155839 - DNA, 821 bp, Homo sapiens
  Payload ID: 10612
  Gene Symbol: MCFD2
  Gene Name: multiple coagulation factor deficiency 2
  Uniprot ID: Q8NI22
  ENST ID: ENST00000409973
  CDS Start-End: 189-629
ggggcgaagccgaggaagagcgttttggggacgggggctggtgaggctcacgttggagggcttcgcgtctgcttcggagaccgtaaggagatgggggtctgactgtgttgtctaggctgatctcaaactcctggcctcaagtgatcctcctgcctcagcctcccaaagtgctgggattacagatattgatgaccatgagatccctgctcagaacccccttcctgtgtggcctgctctgggccttttgtgccccaggcgccagggctgaggagcctgcagccagcttctcccaacccggcagcatgggcctggataagaacacagtgcacgaccaagagcatatcatggagcatctagaaggtgtcatcaacaaaccagaggcggagatgtcgccacaagaattgcagctccattacttcaaaatgcatgattatgatggcaataatttgcttgatggcttagaactctccacagccatcactcatgtccataaggaggaagggagtgaacaggcaccactaatgagtgaagatgaactgattaacataatagatggtgttttgagagatgatgacaagaacaatgatggatacattgactatgctgaatttgcaaaatcactgcagtagatgttatttggccatctcctggttatatacaaatgtgacccgtgataatgtgattgaacactttagtaatgcaaaataactcatttccaactactgctgcagcattttggtaaaaacctgtagcgattcgttacactggggtgagaagagataagagaaatgaaagagaagagaaatgggacatctaatagt

SEQ ID NO: 155840 - DNA, 1113 bp, Homo sapiens
  Payload ID: 10612
  Gene Symbol: MCFD2
  Gene Name: multiple coagulation factor deficiency 2
  Uniprot ID: Q8NI22
  ENST ID: ENST00000409207
  CDS Start-End: 168-608
tactcaccggtgtccggaaaggtgaacgctgcgctcgggctgcctcgcctgttacctccgccgccgggcatgctcagcgtctgcagctgccggaccagctccggcatgcggtcccagtggccctcggcgcggcagcgctccagctcgctctccaccttcagatattgatgaccatgagatccctgctcagaacccccttcctgtgtggcctgctctgggccttttgtgccccaggcgccagggctgaggagcctgcagccagcttctcccaacccggcagcatgggcctggataagaacacagtgcacgaccaagagcatatcatggagcatctagaaggtgtcatcaacaaaccagaggcggagatgtcgccacaagaattgcagctccattacttcaaaatgcatgattatgatggcaataatttgcttgatggcttagaactctccacagccatcactcatgtccataaggaggaagggagtgaacaggcaccactaatgagtgaagatgaactgattaacataatagatggtgttttgagagatgatgacaagaacaatgatggatacattgactatgctgaatttgcaaaatcactgcagtagatgttatttggccatctcctggttatatacaaatgtgacccgtgataatgtgattgaacactttagtaatgcaaaataactcatttccaactactgctgcagcattttggtaaaaacctgtagcgattcgttacactggggtgagaagagataagagaaatgaaagagaagagaaatgggacatctaatagtccctaagtgctattaaataccttattggacaagggcttgcttcaagcatctgtattagtctgtattaatgctgctgataaagacgtacccgagactgggaagaaaaagaggtttacttggacttacagttccacatggctggggaggcctcagaatcatggcgggaggtgaaaggcacttcttacatggcagcaagagaaaatgaggaagaagcaaaagtggaaacccctgataagccatcagatcttgtgaaacttattcactatcacaagaatagcatgggaaagactggcccccatgattcaattacctc

SEQ ID NO: 155841 - DNA, 4210 bp, Homo sapiens
  Payload ID: 10612
  Gene Symbol: MCFD2
  Gene Name: multiple coagulation factor deficiency 2
  Uniprot ID: Q8NI22
  ENST ID: ENST00000409105
  CDS Start-End: 181-621
acgggggctggtgaggctcacgttggagggcttcgcgtctgcttcggagaccgtaaggctgtcatcagctgtggacgggagccttctgaagggaagcacttgggagcctgcaggacgaatacctacaccagacttggaattgaaaagacctcactggagaaagagacatttgatatattgatgaccatgagatccctgctcagaacccccttcctgtgtggcctgctctgggccttttgtgccccaggcgccagggctgaggagcctgcagccagcttctcccaacccggcagcatgggcctggataagaacacagtgcacgaccaagagcatatcatggagcatctagaaggtgtcatcaacaaaccagaggcggagatgtcgccacaagaattgcagctccattacttcaaaatgcatgattatgatggcaataatttgcttgatggcttagaactctccacagccatcactcatgtccataaggaggaagggagtgaacaggcaccactaatgagtgaagatgaactgattaacataatagatggtgttttgagagatgatgacaagaacaatgatggatacattgactatgctgaatttgcaaaatcactgcagtagatgttatttggccatctcctggttatatacaaatgtgacccgtgataatgtgattgaacactttagtaatgcaaaataactcatttccaactactgctgcagcattttggtaaaaacctgtagcgattcgttacactggggtgagaagagataagagaaatgaaagagaagagaaatgggacatctaatagtccctaagtgctattaaataccttattggacaagggcttgcttcaagcatctgtattagtctgtattaatgctgctgataaagacgtacccgagactgggaagaaaaagaggtttacttggacttacagttccacatggctggggaggcctcagaatcatggcgggaggtgaaaggcacttcttacatggcagcaagagaaaatgaggaagaagcaaaagtggaaacccctgataagccatcagatcttgtgaaacttattcactatcacaagaatagcatgggaaagactggcccccatgattcaattacctccccttgggtctctcccacaacacgtgggaattctggtagatacaatttcaagttgagatttgggtggggacatagccaaaccatatcattctacccctggcccctccaaatctcatgtcctcactattcaaaaccaatcatgccttcctaacagtcccccaaagtcttaactcttttcagcattaacgcaaaaatccacagtccaaagtctcatctgagacaaggcaagtcccttccacctatgagcctgtaaaatcaaaagcaagctagttacttcctagataccaacaggggtacaggtattgattaaagacggctgttccaaatgggagaaattggccaaaataaaggggttacagggcccatgcaagtccgaaatccagcagggctgtcaaattttaaagttccagaataatctcctttgactccaggtctcacatccaggtcatactgatgcaagaagtgggttcccatggtcttgggcagctctgcccctgtggctttgtagggtacagcctccctcctggctgctttcacggctgttgttcagtgcctgcggcttttccaggtgcacggtgcaagctgttggtggatctaccattctggggtctggaggacggtggccctcttctcacagctccactaggcagtgccccagtagggactctgtgtgggggctcccacaccacatttcccttctgcactgccctagcagaggttctctcccctgccgctgagagggcctctcccctgcagcaaacgtttgcctgggcattgaggcatttccatacatcttctgaaaactaggcggaggtttccaaatctcaattcttgacttctgtgcacctgcaggcttaacagcacatagaagctgccaaggcttggggcttccactctgaagccacagcccgagctgtatgttggcccctttcagccatggctggagtggctgggacacaagacaccaagtccctaggctgcacacacatgtcaggggctgccctgacatggcctggagacattttccccatggtgttggggattaacattaggctccttgctacttatgcaaatttctgcagctggcttgaatttctccccagaaaatgggtttttcttttctattgcatagtcaggctgcaaatttccaaacttttatgctttgcttcccttatttataagggaatgcctttaaaagcacccaagtcacctgttgaacactttgctgcttagaaatttcttccgctagttaacctaaatcatctctctcaagttcaaagttccacaaatccctatggaaggggcaaaatgctgccagtctctttgctaaaacataacaagagtcacctttactccagttcccaacaagttcctcatcttcatctgaggccacctcagcctggactttgttgtccatattgctatcagcatttggggcaaagccattcaacaagtctgtaggaagttccaaactttcccacattttcctgttttcttctgagccctccaaactgttccagcctctgcctgttacccagttccaaagtcacttccacattttgggtatttcttcagcaggtcccaatctactggtaccaatttactgtattagtccgttttcacgctgctgataaagacatacccgagactgggaagaaaaagtggtttaattggacttaaagttccacatggctggggaggcctcagaatcatggtgggaggcaaaagacacttcttacattgtggcaagaaaaaatgaggaagaagcaaaagcagaaacccctgataaactgatcagatctcatgagacttattcactgtcacgagaatagcacgggaaagactggcccccatgattcaattacctccccctgggtctgtcccacaacacgtgggaattctgggagatacaattcaagttgagatttgtggggggacacaaccaaaccatatcagcatcctttcaagaatattagataattggagctgagtactcaggaacttgactgtagtagaatactgctagtttcttaattttaattcacatcacctgaaaagtaaaacaacaggctttgccaagtggatgcttttcagtaacagtgaagtggagtgaataccaaatgtttgccctggtggttcctatctcttcaggcaaacatggtcagtattctgtaaagttcccctggcctaaatgattacttgctctgggcaagtggatatttattaggctatttcaaagccacagcataagaatgtcagcctagccacagagtctgagattctgagttcagcctagccacagagtctaagattctgtatcctctgacattttggaaatgatacactactggcttaagtgatgactctttcagattttcagtattttatacaactactgccacatccttatactttattgcttttctgtcttcttcaacctgggagagaccctgaatttgagtgtgttctctaatcaatagtggtttagctttcttttctatttcactcgtttctagggttttttatttgcagtttaggaactattaggaatgtcaggactttatcagcaggggtaaaactaccacctggcctagcctaagtaggaagtgaaaagataattcaccaaacaatgattaatcagatagaagttctagtcaagagggatattgttgaagttacctcttttagcctagatacatggattcttttcaaatcaggaaagattagaaaaggaacccaaaaaaccctttaacagtgtgaatctttatagtatttgaaaatgagaagaagcagcagattgtaatttggtttattggatgtgatggacgttctgtaatagaaaacctgaaacgatgattgaatgggaaaaagagactacaaaatttgtcgtaggatgtatacagacttattttctttattacagtattataagaaaacatatgtatttgtaaaaatggtttcctgtgtcaagtatttgtgcagtcagagctgacttgtaaactattcttgtaatagctcattattttgaaagatttatatatgatgaattctggatatatgaccaataaaactgatgaagcaaaa

SEQ ID NO: 155842 - DNA, 3975 bp, Homo sapiens
  Payload ID: 10612
  Gene Symbol: MCFD2
  Gene Name: multiple coagulation factor deficiency 2
  Uniprot ID: Q8NI22
  ENST ID: ENST00000409913
  CDS Start-End: 102-386
gggggcggggcgaagccgaggaagagcgttttggggacgggggctggtgaggctcacgttggagggcttcgcgtctgcttcggagaccgtaagggcatatcatggagcatctagaaggtgtcatcaacaaaccagaggcggagatgtcgccacaagaattgcagctccattacttcaaaatgcatgattatgatggcaataatttgcttgatggcttagaactctccacagccatcactcatgtccataaggaggaagggagtgaacaggcaccactaatgagtgaagatgaactgattaacataatagatggtgttttgagagatgatgacaagaacaatgatggatacattgactatgctgaatttgcaaaatcactgcagtagatgttatttggccatctcctggttatatacaaatgtgacccgtgataatgtgattgaacactttagtaatgcaaaataactcatttccaactactgctgcagcattttggtaaaaacctgtagcgattcgttacactggggtgagaagagataagagaaatgaaagagaagagaaatgggacatctaatagtccctaagtgctattaaataccttattggacaagggcttgcttcaagcatctgtattagtctgtattaatgctgctgataaagacgtacccgagactgggaagaaaaagaggtttacttggacttacagttccacatggctggggaggcctcagaatcatggcgggaggtgaaaggcacttcttacatggcagcaagagaaaatgaggaagaagcaaaagtggaaacccctgataagccatcagatcttgtgaaacttattcactatcacaagaatagcatgggaaagactggcccccatgattcaattacctccccttgggtctctcccacaacacgtgggaattctggtagatacaatttcaagttgagatttgggtggggacatagccaaaccatatcattctacccctggcccctccaaatctcatgtcctcactattcaaaaccaatcatgccttcctaacagtcccccaaagtcttaactcttttcagcattaacgcaaaaatccacagtccaaagtctcatctgagacaaggcaagtcccttccacctatgagcctgtaaaatcaaaagcaagctagttacttcctagataccaacaggggtacaggtattgattaaagacggctgttccaaatgggagaaattggccaaaataaaggggttacagggcccatgcaagtccgaaatccagcagggctgtcaaattttaaagttccagaataatctcctttgactccaggtctcacatccaggtcatactgatgcaagaagtgggttcccatggtcttgggcagctctgcccctgtggctttgtagggtacagcctccctcctggctgctttcacggctgttgttcagtgcctgcggcttttccaggtgcacggtgcaagctgttggtggatctaccattctggggtctggaggacggtggccctcttctcacagctccactaggcagtgccccagtagggactctgtgtgggggctcccacaccacatttcccttctgcactgccctagcagaggttctctcccctgccgctgagagggcctctcccctgcagcaaacgtttgcctgggcattgaggcatttccatacatcttctgaaaactaggcggaggtttccaaatctcaattcttgacttctgtgcacctgcaggcttaacagcacatagaagctgccaaggcttggggcttccactctgaagccacagcccgagctgtatgttggcccctttcagccatggctggagtggctgggacacaagacaccaagtccctaggctgcacacacatgtcaggggctgccctgacatggcctggagacattttccccatggtgttggggattaacattaggctccttgctacttatgcaaatttctgcagctggcttgaatttctccccagaaaatgggtttttcttttctattgcatagtcaggctgcaaatttccaaacttttatgctttgcttcccttatttataagggaatgcctttaaaagcacccaagtcacctgttgaacactttgctgcttagaaatttcttccgctagttaacctaaatcatctctctcaagttcaaagttccacaaatccctatggaaggggcaaaatgctgccagtctctttgctaaaacataacaagagtcacctttactccagttcccaacaagttcctcatcttcatctgaggccacctcagcctggactttgttgtccatattgctatcagcatttggggcaaagccattcaacaagtctgtaggaagttccaaactttcccacattttcctgttttcttctgagccctccaaactgttccagcctctgcctgttacccagttccaaagtcacttccacattttgggtatttcttcagcaggtcccaatctactggtaccaatttactgtattagtccgttttcacgctgctgataaagacatacccgagactgggaagaaaaagtggtttaattggacttaaagttccacatggctggggaggcctcagaatcatggtgggaggcaaaagacacttcttacattgtggcaagaaaaaatgaggaagaagcaaaagcagaaacccctgataaactgatcagatctcatgagacttattcactgtcacgagaatagcacgggaaagactggcccccatgattcaattacctccccctgggtctgtcccacaacacgtgggaattctgggagatacaattcaagttgagatttgtggggggacacaaccaaaccatatcagcatcctttcaagaatattagataattggagctgagtactcaggaacttgactgtagtagaatactgctagtttcttaattttaattcacatcacctgaaaagtaaaacaacaggctttgccaagtggatgcttttcagtaacagtgaagtggagtgaataccaaatgtttgccctggtggttcctatctcttcaggcaaacatggtcagtattctgtaaagttcccctggcctaaatgattacttgctctgggcaagtggatatttattaggctatttcaaagccacagcataagaatgtcagcctagccacagagtctgagattctgagttcagcctagccacagagtctaagattctgtatcctctgacattttggaaatgatacactactggcttaagtgatgactctttcagattttcagtattttatacaactactgccacatccttatactttattgcttttctgtcttcttcaacctgggagagaccctgaatttgagtgtgttctctaatcaatagtggtttagctttcttttctatttcactcgtttctagggttttttatttgcagtttaggaactattaggaatgtcaggactttatcagcaggggtaaaactaccacctggcctagcctaagtaggaagtgaaaagataattcaccaaacaatgattaatcagatagaagttctagtcaagagggatattgttgaagttacctcttttagcctagatacatggattcttttcaaatcaggaaagattagaaaaggaacccaaaaaaccctttaacagtgtgaatctttatagtatttgaaaatgagaagaagcagcagattgtaatttggtttattggatgtgatggacgttctgtaatagaaaacctgaaacgatgattgaatgggaaaaagagactacaaaatttgtcgtaggatgtatacagacttattttctttattacagtattataagaaaacatatgtatttgtaaaaatggtttcctgtgtcaagtatttgtgcagtcagagctgacttgtaaactattcttgtaatagctcattattttgaaagatttatatatgatgaattctggatatatgaccaataaaactgatgaagcaaaa

SEQ ID NO: 155843 - DNA, 671 bp, Homo sapiens
  Payload ID: 10612
  Gene Symbol: MCFD2
  Gene Name: multiple coagulation factor deficiency 2
  Uniprot ID: Q8NI22
  ENST ID: ENST00000409147
  CDS Start-End: 292-576
gctcttaagactagcacggtgggctggcaggcgcccgctgtcggccgaggactgtctgggcgcgcttcctggaggaggcggtgcgtttcgcgcgctcgctgccggcgagccagcctcttcccttactcaccggtgtccggaaaggtgaacgctgcgctcgggctgcctcgcctgttacctccgccgccgggcatgctcagcgtctgcagctgccggaccagctccggcatgcggtcccagtggccctcggcgcggcagcgctccagctcgctctccaccttcaggcatatcatggagcatctagaaggtgtcatcaacaaaccagaggcggagatgtcgccacaagaattgcagctccattacttcaaaatgcatgattatgatggcaataatttgcttgatggcttagaactctccacagccatcactcatgtccataaggaggaagggagtgaacaggcaccactaatgagtgaagatgaactgattaacataatagatggtgttttgagagatgatgacaagaacaatgatggatacattgactatgctgaatttgcaaaatcactgcagtagatgttatttggccatctcctggttatatacaaatgtgacccgtgataatgtgattgaacactttagtaatgcaaaataactcatttccaactact

SEQ ID NO: 155844 - DNA, 3955 bp, Homo sapiens
  Payload ID: 10612
  Gene Symbol: MCFD2
  Gene Name: multiple coagulation factor deficiency 2
  Uniprot ID: Q8NI22
  ENST ID: ENST00000409800
  CDS Start-End: 82-366
tagcaactgccgggcccctagggcgtccagcggcccaactggagtggagccgagtgtcgcccttgggaaagcaggcatatcatggagcatctagaaggtgtcatcaacaaaccagaggcggagatgtcgccacaagaattgcagctccattacttcaaaatgcatgattatgatggcaataatttgcttgatggcttagaactctccacagccatcactcatgtccataaggaggaagggagtgaacaggcaccactaatgagtgaagatgaactgattaacataatagatggtgttttgagagatgatgacaagaacaatgatggatacattgactatgctgaatttgcaaaatcactgcagtagatgttatttggccatctcctggttatatacaaatgtgacccgtgataatgtgattgaacactttagtaatgcaaaataactcatttccaactactgctgcagcattttggtaaaaacctgtagcgattcgttacactggggtgagaagagataagagaaatgaaagagaagagaaatgggacatctaatagtccctaagtgctattaaataccttattggacaagggcttgcttcaagcatctgtattagtctgtattaatgctgctgataaagacgtacccgagactgggaagaaaaagaggtttacttggacttacagttccacatggctggggaggcctcagaatcatggcgggaggtgaaaggcacttcttacatggcagcaagagaaaatgaggaagaagcaaaagtggaaacccctgataagccatcagatcttgtgaaacttattcactatcacaagaatagcatgggaaagactggcccccatgattcaattacctccccttgggtctctcccacaacacgtgggaattctggtagatacaatttcaagttgagatttgggtggggacatagccaaaccatatcattctacccctggcccctccaaatctcatgtcctcactattcaaaaccaatcatgccttcctaacagtcccccaaagtcttaactcttttcagcattaacgcaaaaatccacagtccaaagtctcatctgagacaaggcaagtcccttccacctatgagcctgtaaaatcaaaagcaagctagttacttcctagataccaacaggggtacaggtattgattaaagacggctgttccaaatgggagaaattggccaaaataaaggggttacagggcccatgcaagtccgaaatccagcagggctgtcaaattttaaagttccagaataatctcctttgactccaggtctcacatccaggtcatactgatgcaagaagtgggttcccatggtcttgggcagctctgcccctgtggctttgtagggtacagcctccctcctggctgctttcacggctgttgttcagtgcctgcggcttttccaggtgcacggtgcaagctgttggtggatctaccattctggggtctggaggacggtggccctcttctcacagctccactaggcagtgccccagtagggactctgtgtgggggctcccacaccacatttcccttctgcactgccctagcagaggttctctcccctgccgctgagagggcctctcccctgcagcaaacgtttgcctgggcattgaggcatttccatacatcttctgaaaactaggcggaggtttccaaatctcaattcttgacttctgtgcacctgcaggcttaacagcacatagaagctgccaaggcttggggcttccactctgaagccacagcccgagctgtatgttggcccctttcagccatggctggagtggctgggacacaagacaccaagtccctaggctgcacacacatgtcaggggctgccctgacatggcctggagacattttccccatggtgttggggattaacattaggctccttgctacttatgcaaatttctgcagctggcttgaatttctccccagaaaatgggtttttcttttctattgcatagtcaggctgcaaatttccaaacttttatgctttgcttcccttatttataagggaatgcctttaaaagcacccaagtcacctgttgaacactttgctgcttagaaatttcttccgctagttaacctaaatcatctctctcaagttcaaagttccacaaatccctatggaaggggcaaaatgctgccagtctctttgctaaaacataacaagagtcacctttactccagttcccaacaagttcctcatcttcatctgaggccacctcagcctggactttgttgtccatattgctatcagcatttggggcaaagccattcaacaagtctgtaggaagttccaaactttcccacattttcctgttttcttctgagccctccaaactgttccagcctctgcctgttacccagttccaaagtcacttccacattttgggtatttcttcagcaggtcccaatctactggtaccaatttactgtattagtccgttttcacgctgctgataaagacatacccgagactgggaagaaaaagtggtttaattggacttaaagttccacatggctggggaggcctcagaatcatggtgggaggcaaaagacacttcttacattgtggcaagaaaaaatgaggaagaagcaaaagcagaaacccctgataaactgatcagatctcatgagacttattcactgtcacgagaatagcacgggaaagactggcccccatgattcaattacctccccctgggtctgtcccacaacacgtgggaattctgggagatacaattcaagttgagatttgtggggggacacaaccaaaccatatcagcatcctttcaagaatattagataattggagctgagtactcaggaacttgactgtagtagaatactgctagtttcttaattttaattcacatcacctgaaaagtaaaacaacaggctttgccaagtggatgcttttcagtaacagtgaagtggagtgaataccaaatgtttgccctggtggttcctatctcttcaggcaaacatggtcagtattctgtaaagttcccctggcctaaatgattacttgctctgggcaagtggatatttattaggctatttcaaagccacagcataagaatgtcagcctagccacagagtctgagattctgagttcagcctagccacagagtctaagattctgtatcctctgacattttggaaatgatacactactggcttaagtgatgactctttcagattttcagtattttatacaactactgccacatccttatactttattgcttttctgtcttcttcaacctgggagagaccctgaatttgagtgtgttctctaatcaatagtggtttagctttcttttctatttcactcgtttctagggttttttatttgcagtttaggaactattaggaatgtcaggactttatcagcaggggtaaaactaccacctggcctagcctaagtaggaagtgaaaagataattcaccaaacaatgattaatcagatagaagttctagtcaagagggatattgttgaagttacctcttttagcctagatacatggattcttttcaaatcaggaaagattagaaaaggaacccaaaaaaccctttaacagtgtgaatctttatagtatttgaaaatgagaagaagcagcagattgtaatttggtttattggatgtgatggacgttctgtaatagaaaacctgaaacgatgattgaatgggaaaaagagactacaaaatttgtcgtaggatgtatacagacttattttctttattacagtattataagaaaacatatgtatttgtaaaaatggtttcctgtgtcaagtatttgtgcagtcagagctgacttgtaaactattcttgtaatagctcattattttgaaagatttatatatgatgaattctggatatatgaccaataaaactgatgaagcaaaa

SEQ ID NO: 155845 - DNA, 376 bp, Homo sapiens
  Payload ID: 10612
  Gene Symbol: MCFD2
  Gene Name: multiple coagulation factor deficiency 2
  ENST ID: ENST00000434262
  CDS Start-End: 1-273
tcccaacccggcagcatgggcctggataagaacacagtgcacgaccaagagcatatcatggagcatctagaaggtgtcatcaacaaaccagaggcggagatgtcgccacaagaattgcagctccattacttcaaaatgcatgattatgatggcaataatttgcttgatggcttagaactctccacagccatcactcatgtccataaggaggcaaatttgtgcacagagctgaccctcaggaggactggcacttttccaattaaagaagaatgagccataatgaaacaaataagcaaaagcctattttgaagggccttcttttaactggcaaatgtaatttctaaactggattatgataaattgactcaataataca

SEQ ID NO: 155846 - DNA, 565 bp, Homo sapiens
  Payload ID: 10612
  Gene Symbol: MCFD2
  Gene Name: multiple coagulation factor deficiency 2
  ENST ID: ENST00000417180
  CDS Start-End: 382-565
agtaaggtaaatgagagccagaggagagagggtcctgactctcagagagggaggaaaagagaaaaatggaaaaggagaacaacctgtgatcgtatgttcaggtcaaatgagtgtgagaggctacagactgaggtcggatgagagagcaattggtcttggctggaagaatcctgaggtgacatttgaacctgtcctggaaggaagttggagatggacagatggaaccagtaggagcggaggctgtggtacaggaagaggctggcagagcaggaggggagcactgtgacagccaaggcactgggaggcgcactgctcctgatggtccagcactgccctcccaggactgaggctgcgccttgtgagggctgtctcaagatattgatgaccatgagatccctgctcagaacccccttcctgtgtggcctgctctgggccttttgtgccccaggcgccagggctgaggagcctgcagccagcttctcccaacccggcagcatgggcctggataagaacacagtgcacgaccaagagcatatcatggagcatctagaaggtgtcatcaaca

SEQ ID NO: 155847 - DNA, 4169 bp, Homo sapiens
  Payload ID: 10612
  Gene Symbol: MCFD2
  Gene Name: multiple coagulation factor deficiency 2
  Uniprot ID: Q8NI22
  ENST ID: ENST00000444761
  CDS Start-End: 193-576
gctcttaagactagcacggtgggctggcaggcgcccgctgtcggccgaggactgtctgggcgcgcttcctggaggaggcggtgcgtttcgcgcgctcgctgccggcgagccagcctcttcccttactcaccggtgtccggaaaggtgaacgctgcgctcgggctgcctcgcctgttacctccgccgccgggcatgctcagcgtctgcagctgccggaccagctccggcatgcggtcccagtggccctcggcgcggcagcgctccagctcgctctccaccttcaggcatatcatggagcatctagaaggtgtcatcaacaaaccagaggcggagatgtcgccacaagaattgcagctccattacttcaaaatgcatgattatgatggcaataatttgcttgatggcttagaactctccacagccatcactcatgtccataaggaggaagggagtgaacaggcaccactaatgagtgaagatgaactgattaacataatagatggtgttttgagagatgatgacaagaacaatgatggatacattgactatgctgaatttgcaaaatcactgcagtagatgttatttggccatctcctggttatatacaaatgtgacccgtgataatgtgattgaacactttagtaatgcaaaataactcatttccaactactgctgcagcattttggtaaaaacctgtagcgattcgttacactggggtgagaagagataagagaaatgaaagagaagagaaatgggacatctaatagtccctaagtgctattaaataccttattggacaagggcttgcttcaagcatctgtattagtctgtattaatgctgctgataaagacgtacccgagactgggaagaaaaagaggtttacttggacttacagttccacatggctggggaggcctcagaatcatggcgggaggtgaaaggcacttcttacatggcagcaagagaaaatgaggaagaagcaaaagtggaaacccctgataagccatcagatcttgtgaaacttattcactatcacaagaatagcatgggaaagactggcccccatgattcaattacctccccttgggtctctcccacaacacgtgggaattctggtagatacaatttcaagttgagatttgggtggggacatagccaaaccatatcattctacccctggcccctccaaatctcatgtcctcactattcaaaaccaatcatgccttcctaacagtcccccaaagtcttaactcttttcagcattaacgcaaaaatccacagtccaaagtctcatctgagacaaggcaagtcccttccacctatgagcctgtaaaatcaaaagcaagctagttacttcctagataccaacaggggtacaggtattgattaaagacggctgttccaaatgggagaaattggccaaaataaaggggttacagggcccatgcaagtccgaaatccagcagggctgtcaaattttaaagttccagaataatctcctttgactccaggtctcacatccaggtcatactgatgcaagaagtgggttcccatggtcttgggcagctctgcccctgtggctttgtagggtacagcctccctcctggctgctttcacggctgttgttcagtgcctgcggcttttccaggtgcacggtgcaagctgttggtggatctaccattctggggtctggaggacggtggccctcttctcacagctccactaggcagtgccccagtagggactctgtgtgggggctcccacaccacatttcccttctgcactgccctagcagaggttctctcccctgccgctgagagggcctctcccctgcagcaaacgtttgcctgggcattgaggcatttccatacatcttctgaaaactaggcggaggtttccaaatctcaattcttgacttctgtgcacctgcaggcttaacagcacatagaagctgccaaggcttggggcttccactctgaagccacagcccgagctgtatgttggcccctttcagccatggctggagtggctgggacacaagacaccaagtccctaggctgcacacacatgtcaggggctgccctgacatggcctggagacattttccccatggtgttggggattaacattaggctccttgctacttatgcaaatttctgcagctggcttgaatttctccccagaaaatgggtttttcttttctattgcatagtcaggctgcaaatttccaaacttttatgctttgcttcccttatttataagggaatgcctttaaaagcacccaagtcacctgttgaacactttgctgcttagaaatttcttccgctagttaacctaaatcatctctctcaagttcaaagttccacaaatccctatggaaggggcaaaatgctgccagtctctttgctaaaacataacaagagtcacctttactccagttcccaacaagttcctcatcttcatctgaggccacctcagcctggactttgttgtccatattgctatcagcatttggggcaaagccattcaacaagtctgtaggaagttccaaactttcccacattttcctgttttcttctgagccctccaaactgttccagcctctgcctgttacccagttccaaagtcacttccacattttgggtatttcttcagcaggtcccaatctactggtaccaatttactgtattagtccgttttcacgctgctgataaagacatacccgagactgggaagaaaaagtggtttaattggacttaaagttccacatggctggggaggcctcagaatcatggtgggaggcaaaagacacttcttacattgtggcaagaaaaaatgaggaagaagcaaaagcagaaacccctgataaactgatcagatctcatgagacttattcactgtcacgagaatagcacgggaaagactggcccccatgattcaattacctccccctgggtctgtcccacaacacgtgggaattctgggagatacaattcaagttgagatttgtggggggacacaaccaaaccatatcagcatcctttcaagaatattagataattggagctgagtactcaggaacttgactgtagtagaatactgctagtttcttaattttaattcacatcacctgaaaagtaaaacaacaggctttgccaagtggatgcttttcagtaacagtgaagtggagtgaataccaaatgtttgccctggtggttcctatctcttcaggcaaacatggtcagtattctgtaaagttcccctggcctaaatgattacttgctctgggcaagtggatatttattaggctatttcaaagccacagcataagaatgtcagcctagccacagagtctgagattctgagttcagcctagccacagagtctaagattctgtatcctctgacattttggaaatgatacactactggcttaagtgatgactctttcagattttcagtattttatacaactactgccacatccttatactttattgcttttctgtcttcttcaacctgggagagaccctgaatttgagtgtgttctctaatcaatagtggtttagctttcttttctatttcactcgtttctagggttttttatttgcagtttaggaactattaggaatgtcaggactttatcagcaggggtaaaactaccacctggcctagcctaagtaggaagtgaaaagataattcaccaaacaatgattaatcagatagaagttctagtcaagagggatattgttgaagttacctcttttagcctagatacatggattcttttcaaatcaggaaagattagaaaaggaacccaaaaaaccctttaacagtgtgaatctttatagtatttgaaaatgagaagaagcagcagattgtaatttggtttattggatgtgatggacgttctgtaatagaaaacctgaaacgatgattgaatgggaaaaagagactacaaaatttgtcgtaggatgtatacagacttattttctttattacagtattataagaaaacatatgtatttgtaaaaatggtttcctgtgtcaagtatttgtgcagtcagagctgacttgtaaactattcttgtaatagctcattattttgaaagatttatatatgatgaattctggatatatgaccaataaaactgatgaagcaaaacctc

SEQ ID NO: 155848 - DNA, 588 bp, Homo sapiens
  Payload ID: 10612
  Gene Symbol: MCFD2
  Gene Name: multiple coagulation factor deficiency 2
  Uniprot ID: Q8NI22
  ENST ID: ENST00000412438
  CDS Start-End: 151-588
acttccctgattcagcgatgagccaggtcagctcagcagagatcagtaagagatgggggtctgactgtgttgtctaggctgatctcaaactcctggcctcaagtgatcctcctgcctcagcctcccaaagtgctgggattacagatattgatgaccatgagatccctgctcagaacccccttcctgtgtggcctgctctgggccttttgtgccccaggcgccagggctgaggagcctgcagccagcttctcccaacccggcagcatgggcctggataagaacacagtgcacgaccaagagcatatcatggagcatctagaaggtgtcatcaacaaaccagaggcggagatgtcgccacaagaattgcagctccattacttcaaaatgcatgattatgatggcaataatttgcttgatggcttagaactctccacagccatcactcatgtccataaggaggaagggagtgaacaggcaccactaatgagtgaagatgaactgattaacataatagatggtgttttgagagatgatgacaagaacaatgatggatacattgactatgctgaatttgcaaaatcactgcag

SEQ ID NO: 155849 - DNA, 7594 bp, Homo sapiens
  Payload ID: 10613
  Gene Symbol: MEGF10
  Gene Name: multiple EGF-like-domains 10
  Uniprot ID: Q96KG7
  ENST ID: ENST00000274473
  CDS Start-End: 268-3690
tgggaacgcgttgagacgttcctctttcccgcttctccacctttacgcctgaaagaagactcccaaagattgctttcttctgggacgctgcttggacgctaaccgcgttgattggaacagattttgtgtcttggctggctttgggtgaagaccggggagaaaaggttgcgctgcgattctcaagatctctggacctggattatcattgcaaatccattaaagaaggagaagcaagcggatttcagagaggttgttcttcagaaaaaaatggttatttctttgaactcatgcctgagctttatttgtttattgttatgccactggattgggacagcatcacctctgaatcttgaagaccctaatgtgtgtagccactgggaaagctactcagtgactgtgcaagagtcatacccacatccctttgatcaaatttactacacgagctgcactgacattctaaactggtttaaatgcacgcggcacagagtcagctatcggacagcctatcgacatggggagaagactatgtataggcgcaagtctcagtgttgtcctggattttatgaaagcggggaaatgtgtgtcccccactgtgctgataaatgtgtccatggtcgctgtattgctccaaacacctgtcagtgtgagcctggctggggagggaccaactgctccagtgcctgcgatggtgatcactggggtccccactgcaccagccggtgccagtgcaaaaatggggctctgtgcaaccccatcaccggggcttgccactgtgctgcgggcttccggggctggcgctgcgaggaccgctgtgagcagggcacctatggtaacgactgtcatcagagatgccagtgccagaatggagccacctgcgaccacgtcacgggggaatgccgctgcccaccaggatacaccggagccttctgtgaggatctttgtcctcctggtaaacatggtccacagtgtgagcagagatgcccttgtcaaaatggaggagtgtgtcatcacgtcactggagaatgctcttgcccttctggctggatgggcacagtgtgtggtcagccttgccccgagggtcgctttggaaagaactgttcccaagaatgccagtgccataatggagggacgtgtgatgctgccacaggccaatgtcattgcagtccaggatacacaggggaacggtgccaggatgagtgtcctgttgggacctatggcgttctctgtgctgagacctgccagtgtgtcaacggagggaagtgttaccacgtgagcggcgcatgcctctgtgaagcaggctttgctggcgagcgctgcgaagcacgcctgtgtcctgaggggctctacggcatcaaatgtgacaaacggtgtccctgccacctggaaaacactcatagctgtcaccccatgtctggagagtgtgcctgcaagccgggctggtcaggactctactgtaatgagacatgttctcctggattctacggggaagcttgccagcagatctgcagctgccaaaatggggcagactgtgacagtgtgactggaaagtgcacctgtgccccaggattcaaaggaattgactgctctaccccatgccctctgggaacctatgggataaactgttcctctcgctgtggctgtaaaaatgatgcagtctgctctcctgtggacgggtcttgtacttgcaaggcaggctggcacggggtggactgctccatcagatgtcccagtggcacatggggctttggctgtaacttaacatgccagtgcctcaacgggggagcctgcaacaccctggacgggacctgcacgtgtgcacctggatggcgcggggagaaatgcgaacttccctgccaggatggcacgtacgggctgaactgtgctgagcgctgcgactgcagccacgcagatggctgccaccctaccacgggccattgccgctgcctccccggatggtcaggtgtccactgtgacagcgtgtgtgctgagggacgctggggccccaactgctccctgccctgctactgtaaaaatggggcttcatgctcccctgatgatggcatctgcgagtgtgcaccaggcttccgaggcaccacttgtcagaggatctgctcccctggtttttatgggcatcgctgcagccagacatgcccacagtgcgttcacagcagcgggccctgccaccacatcaccggcctgtgtgactgcttgcctggcttcacaggcgccctctgcaatgaagtgtgtcccagtggcagatttgggaaaaactgtgcaggaatttgtacctgcaccaacaacggaacctgtaaccccattgacagatcttgtcagtgttaccccggttggattggcagtgactgctctcaaccatgtccacctgcccactggggcccaaactgcatccacacgtgcaactgccataatggagctttctgcagcgcctacgatggggaatgtaaatgcactcctggctggacagggctctactgcactcagagatgtcctctagggttttatggaaaagattgtgcactgatatgccaatgtcaaaacggagctgactgcgaccacatttctgggcagtgtacttgccgcactggattcatgggacggcactgtgagcagaagtgcccttcaggaacatatggctatggctgtcgccagatatgtgattgtctgaacaactccacctgcgaccacatcactgggacctgttactgcagccccggatggaagggagcgagatgtgatcaagctggtgttatcatagttggaaatctgaacagcttaagccgaaccagtactgctctccctgctgattcctaccagatcggggccattgcaggcatcatcattcttgtcctagttgttctcttcctactggcattgttcattatttatagacacaagcagaagggaaaggaatcaagcatgccagcagttacctacacccctgctatgagggtcgtcaatgcagattataccatttcaggaacccttcctcacagcaatggtggaaacgctaatagccactacttcaccaatcccagttaccacacgctcacccagtgtgccacatcccctcacgtcaacaacagggacaggatgactgtcacgaagtcaaaaaacaatcaactgtttgtgaatcttaaaaatgtgaaccctgggaagagaggccctgtgggggactgcactgggacattgccggctgactggaaacatggcggctacctcaacgagctcggtgcttttggacttgacagaagctatatgggaaaatccttaaaagacctgggaaagaattctgaatataattcaagtaactgctccctaagcagttctgagaacccatatgccactattaaagacccacctgtacttatcccgaaaagctcagagtgtggttatgtggagatgaaatcgccggcacgaagagattccccatatgcagagatcaataactcaacttcagccaacaggaatgtctatgaagttgaacctacagtgagtgttgtccaaggagtattcagcaataatgggcgtctctcccaggatccatatgacctcccaaagaacagtcacatcccttgtcattatgacctgctgccagtccgagacagttcatcctcccctaagcaagaggacagtggtggtagcagcagcaacagcagcagcagcagtgaatgacaccaaaggaccgcttggtagccactggaaccctttccagaactgctgtttggttcttctccatcctcaattttgccactttcatgtgaatgttagtcaattcggtgggcaatttttggacatgaaccagaaagctgaaagctgaggctgacacggactgtaggtgctttttgttcaggtggattcgaaggagttagagatgtgatttcccattgctgttagttttagaactatacccgtgaagcatgacttattgtaagatgttggctgaaagcatgaacttgcagaactccctcggagacgcaggttgcagtggacattgggattgttgcttgaaaaattaaaatttgaatattttctctctcatttgcatcatacagctctacctaggattgtacagtttaccataaaatttacttcatgaaagtgggaatcactgaacatgtagaagacaaggaacatattgttaactcctgattcttaactttattcaactggactcagaattgtagggataatatgaatgcaggaggaaacattctgtcaggcggtatgactggacagactttgaatatactctaaaagtggacagaaaatttacgaaaatcttagattttgtttagaatgagaaaatatacaattagaattattttagaaatagtaggaagtattgcagaagtcaatacacaaatgtgccaggcagaggtggttttctctgtttgactctcaaccaacttcagatctatgacattattctgatcactggctccatcatacatattcaccacttgagattcataacatatcaatagttatttcataaatatagaaatgaaataattttatttttgacagactggatggaatgagtgtgtaatgattgataaaggttgtaaattttaaatgcaagatgacgcttacgttctgtaaaccattagtaatacatgctgtaatatagaattagtggaacattttgattaatctttccctagaagtgactgaaatatttttgtgcatatttgagaaagggaactttccttttattaattgtcaatttagagaaactatgcttaagctggtcttttgcattgctaatgtgacatgtacccaacttttcattaatttgtatttccatttttaaattgcatattctatgttttgtagtgtttggattgttaatgaaaaaatattatatgttcgttattccttgtattattgccacttatcttttgcttgataaaaatgcgttgttcttttttcttttggagggacaagatgaaaatatataatttgaattgattaaaattggtcgttactaaaatagtatagtaaccacaagtgattggcttataaatgaagtagaaatgctttttaatattccaaaatagagttccttttgatctgttggtgctgagccttggttaaaccagggagaaggggagcagaaaggaaacgttgttactgatgagtaccacagactcatcttaaaaaaaactctcattatggtgatcatagaattgaccatccaaactgggacactcttgagagtaaatggagggcattattaataattatcttgtaatgaacttaaatctggactgttccaggcaaaccagacttatcttgcaatatgagaatgctgacacaatgcaggaaagccagtttcccttttgttgatctacttgaccaagcaaaggggctgaaaaactgaataaggaaacaactttataagagaaacagtggtcttcaatcttttaaagacatgaaatcctatatggcattctgtctcagtgagtcagttaacaaatacgtatgtgcaacccttctgctagtagtgcacataagtgattatccctgccaggtatcgagttggaatatccagttatttcatgtcacacatcggcacgtatgatggtggtttggtcagatggataatacagcagacacacttagaacactcactgcactggtggctgttcattttgaggaactccaaagtcaattcaaggaaataaggaatgacctggaacaggccttagaaacaattgatttattccaatagttaaccactggctggctcccaactctaggtgataggcatctaattgagacatgtgtgagtcaatagccatcggggtcctttttggtgagaagaaataagacattttctcccttttaaagatcatctcttcagagctgcatggtaaatttgaatttccccattgttctctagagctaggtcaaaaaaacaactgtttcttttcttattccactattaataaattgaaagcttgctgtacaaaggcaacagcaacttaaaaaagaaaatctggacaatagatgtggactccaaggggccactgccatcccttcctgtgtgctctttttgacaagtaaatcactccagttagctgatgtcctgaaatgacatttgtacctgaggcaattcttattagagcttactcaggacttttcaaacatcaggacacacatagcaatttggatgttgtaaaactacgtgttacatttggagaggtcttgttgagaaggcaaaattttctaaatattttgatatcaatttgggtaaagaaaggaatacttttgttagaatgagaattaaagagaaaacaaaagaatcttggcaaaattttccctctgaaattacaaactttaggaacttttccagatgtatcgaatttaatttgacattgatgtcactcttcataccaagtgaatctattctcatgaactttgaacccatgttaattttggaccctataactaatttcctttctgtatcccatggtggtcaaagcagtaaaggagtttagagatacttagcaaatgccattcatatagtattgttagccaaactattattccttccttagaagttgatgtatcagaaaatttataagttatttgtatttatatataagtacatcagaacttgcccacatgataactcatgtttgctttaataaggaaaatatgttatttgaggttaattatatgatagtgaggaacattttacaattatttacagtgtttgacattaattgctgtcctatgatacagtagtaatgttaacagagagtttaatatgtttagcattatctttatggaatttatattcaccaatttcaggaaaaccaaccatagaactttataataggacagttataacctgactgaaccaaatccatcagcataatgactgtgtgttctgagaaatgcaaacaactttatgaaagtgtggtcatcttgacccccaaagagccacagtagctgtcaattattgagatttttaaatggtaaatattgcaaaagttaaacaagggtaccacaatatcatttataattgatgtcaatattagtagtccactttatgcttaaaataaaatcataaaaaatcaagttttaaggttatattttttaaaataatgaattttctatctctaggcaacatgtctttattattcaagctgaatgtttaagagagattttggtcttaaaggcttcacatcatgaaagtgtacatgcatatgcaagtgtgaattacgtggtatggatgtttgcttgtttattaactaaagatgtacagcaaactgcccgtttagagtcctgttaatattgatgtcctaacactgggtctgcttatgctagttcagtatttggtctaggcttcattttgatatgactgaattgcaatctatatttttaaaaagaaaaatcaaaatacattagggtttacttggttgtggcaaacaaacaaaaaatgctttcagtgttgaaatatctctattttccaaagatgataaactttcatcgttcttagcctacattgtcatttatatcaccaaatgagtttatagattaatgcaataaactttctaataaaaaa

SEQ ID NO: 155850 - DNA, 2238 bp, Homo sapiens
  Payload ID: 10613
  Gene Symbol: MEGF10
  Gene Name: multiple EGF-like-domains 10
  Uniprot ID: Q96KG7
  ENST ID: ENST00000418761
  CDS Start-End: 280-1983
aaactgggcgactgggaacgcgttgagacgttcctctttcccgcttctccacctttacgcctgaaagaagactcccaaagattgctttcttctgggacgctgcttggacgctaaccgcgttgattggaacagattttgtgtcttggctggctttgggtgaagaccggggagaaaaggttgcgctgcgattctcaagatctctggacctggattatcattgcaaatccattaaagaaggagaagcaagcggatttcagagaggttgttcttcagaaaaaaatggttatttctttgaactcatgcctgagctttatttgtttattgttatgccactggattgggacagcatcacctctgaatcttgaagaccctaatgtgtgtagccactgggaaagctactcagtgactgtgcaagagtcatacccacatccctttgatcaaatttactacacgagctgcactgacattctaaactggtttaaatgcacgcggcacagagtcagctatcggacagcctatcgacatggggagaagactatgtataggcgcaagtctcagtgttgtcctggattttatgaaagcggggaaatgtgtgtcccccactgtgctgataaatgtgtccatggtcgctgtattgctccaaacacctgtcagtgtgagcctggctggggagggaccaactgctccagtgcctgcgatggtgatcactggggtccccactgcaccagccggtgccagtgcaaaaatggggctctgtgcaaccccatcaccggggcttgccactgtgctgcgggcttccggggctggcgctgcgaggaccgctgtgagcagggcacctatggtaacgactgtcatcagagatgccagtgccagaatggagccacctgcgaccacgtcacgggggaatgccgctgcccaccaggatacaccggagccttctgtgaggatctttgtcctcctggtaaacatggtccacagtgtgagcagagatgcccttgtcaaaatggaggagtgtgtcatcacgtcactggagaatgctcttgcccttctggctggatgggcacagtgtgtggtcagccttgccccgagggtcgctttggaaagaactgttcccaagaatgccagtgccataatggagggacgtgtgatgctgccacaggccaatgtcattgcagtccaggatacacaggggaacggtgccaggatgagtgtcctgttgggacctatggcgttctctgtgctgagacctgccagtgtgtcaacggagggaagtgttaccacgtgagcggcgcatgcctctgtgaagcaggctttgctggcgagcgctgcgaagcacgcctgtgtcctgaggggctctacggcatcaaatgtgacaaacggtgtccctgccacctggaaaacactcatagctgtcaccccatgtctggagagtgtgcctgcaagccgggctggtcaggactctactgtaatgagacatgttctcctggattctacggggaagcttgccagcagatctgcagctgccaaaatggggcagactgtgacagtgtgactggaaagtgcacctgtgccccaggattcaaaggaattgactgctctaccccatgccctctgggaacctatgggataaactgttcctctcgctgtggctgtaaaaatgatgcagtctgctctcctgtggacgggtcttgtacttgcaaggcaggctggcacggggtggactgctccatcagatgtcccagtggcacatggggctttggctgtaacttaacatgccagtgcctcaacgggggagcctgcaacaccctggacgggacctgcacgtgtgcacctggatggcgcggggagaaatgcgaacttccctgccaggatggcacgtacgggctgaactgtgctgagcgctgcgactgcagccacgcagatggctgccaccctaccacgggccattgccgctgcctccccggatggtcaggattgttttgactattctgggtccttgaatttccatgtgaatggtaacatcaatatgttaatttccacaaagaagcaaggtggaaatttaatggagattgaatctatagatcaatttggggaatactgtccacttaacaatatgaagtcttcagattcataaacatgggatgtcaccagcaacctcttcagtagtgtctctcagccccttggaaaatgttgagagcttctttggtttctaaaggagtaaactgagatgaactgtca

SEQ ID NO: 155851 - DNA, 2365 bp, Homo sapiens
  Payload ID: 10613
  Gene Symbol: MEGF10
  Gene Name: multiple EGF-like-domains 10
  Uniprot ID: Q96KG7
  ENST ID: ENST00000508365
  CDS Start-End: 230-1933
aaaactgggcgactgggaacgcgttgagacgttcctctttcccgcttctccacctttacgcctgaaagaagactcccaaagattgctttcttctgggacgctgcttggacgctaaccgcgttgattggaacagattttgtgtcttggctggctttgggtgaagaccggggagaaaaggttgcgctgcgattctcaagatctctggacctgggttgttcttcagaaaaaaatggttatttctttgaactcatgcctgagctttatttgtttattgttatgccactggattgggacagcatcacctctgaatcttgaagaccctaatgtgtgtagccactgggaaagctactcagtgactgtgcaagagtcatacccacatccctttgatcaaatttactacacgagctgcactgacattctaaactggtttaaatgcacgcggcacagagtcagctatcggacagcctatcgacatggggagaagactatgtataggcgcaagtctcagtgttgtcctggattttatgaaagcggggaaatgtgtgtcccccactgtgctgataaatgtgtccatggtcgctgtattgctccaaacacctgtcagtgtgagcctggctggggagggaccaactgctccagtgcctgcgatggtgatcactggggtccccactgcaccagccggtgccagtgcaaaaatggggctctgtgcaaccccatcaccggggcttgccactgtgctgcgggcttccggggctggcgctgcgaggaccgctgtgagcagggcacctatggtaacgactgtcatcagagatgccagtgccagaatggagccacctgcgaccacgtcacgggggaatgccgctgcccaccaggatacaccggagccttctgtgaggatctttgtcctcctggtaaacatggtccacagtgtgagcagagatgcccttgtcaaaatggaggagtgtgtcatcacgtcactggagaatgctcttgcccttctggctggatgggcacagtgtgtggtcagccttgccccgagggtcgctttggaaagaactgttcccaagaatgccagtgccataatggagggacgtgtgatgctgccacaggccaatgtcattgcagtccaggatacacaggggaacggtgccaggatgagtgtcctgttgggacctatggcgttctctgtgctgagacctgccagtgtgtcaacggagggaagtgttaccacgtgagcggcgcatgcctctgtgaagcaggctttgctggcgagcgctgcgaagcacgcctgtgtcctgaggggctctacggcatcaaatgtgacaaacggtgtccctgccacctggaaaacactcatagctgtcaccccatgtctggagagtgtgcctgcaagccgggctggtcaggactctactgtaatgagacatgttctcctggattctacggggaagcttgccagcagatctgcagctgccaaaatggggcagactgtgacagtgtgactggaaagtgcacctgtgccccaggattcaaaggaattgactgctctaccccatgccctctgggaacctatgggataaactgttcctctcgctgtggctgtaaaaatgatgcagtctgctctcctgtggacgggtcttgtacttgcaaggcaggctggcacggggtggactgctccatcagatgtcccagtggcacatggggctttggctgtaacttaacatgccagtgcctcaacgggggagcctgcaacaccctggacgggacctgcacgtgtgcacctggatggcgcggggagaaatgcgaacttccctgccaggatggcacgtacgggctgaactgtgctgagcgctgcgactgcagccacgcagatggctgccaccctaccacgggccattgccgctgcctccccggatggtcaggattgttttgactattctgggtccttgaatttccatgtgaatggtaacatcaatatgttaatttccacaaagaagcaaggtggaaatttaatggagattgaatctatagatcaatttggggaatactgtccacttaacaatatgaagtcttcagattcataaacatgggatgtcaccagcaacctcttcagtagtgtctctcagccccttggaaaatgttgagagcttctttggtttctaaaggagtaaactgagatgaactgtcatgtgcttgatttctagtgtctgagagctaccttgggaaacaggctaaggctggtgcaatggactttattttctaccaataggagctacccacagacacgaggcctccccaaccctgtagttccatcttgacttgcaaaacctgagataacttgacttcacaataggaaattctgcct

SEQ ID NO: 155852 - DNA, 7571 bp, Homo sapiens
  Payload ID: 10613
  Gene Symbol: MEGF10
  Gene Name: multiple EGF-like-domains 10
  Uniprot ID: Q96KG7
  ENST ID: ENST00000503335
  CDS Start-End: 245-3667
actttcccggtgcgcaaaactgggcgactgggaacgcgttgagacgttcctctttcccgcttctccacctttacgcctgaaagaagactcccaaagattgctttcttctgggacgctgcttggacgctaaccgcgttgattggaacagattttgtgtcttggctggctttgggtgaagaccggggagaaaaggttgcgctgcgattctcaagatctctggacctgggttgttcttcagaaaaaaatggttatttctttgaactcatgcctgagctttatttgtttattgttatgccactggattgggacagcatcacctctgaatcttgaagaccctaatgtgtgtagccactgggaaagctactcagtgactgtgcaagagtcatacccacatccctttgatcaaatttactacacgagctgcactgacattctaaactggtttaaatgcacgcggcacagagtcagctatcggacagcctatcgacatggggagaagactatgtataggcgcaagtctcagtgttgtcctggattttatgaaagcggggaaatgtgtgtcccccactgtgctgataaatgtgtccatggtcgctgtattgctccaaacacctgtcagtgtgagcctggctggggagggaccaactgctccagtgcctgcgatggtgatcactggggtccccactgcaccagccggtgccagtgcaaaaatggggctctgtgcaaccccatcaccggggcttgccactgtgctgcgggcttccggggctggcgctgcgaggaccgctgtgagcagggcacctatggtaacgactgtcatcagagatgccagtgccagaatggagccacctgcgaccacgtcacgggggaatgccgctgcccaccaggatacaccggagccttctgtgaggatctttgtcctcctggtaaacatggtccacagtgtgagcagagatgcccttgtcaaaatggaggagtgtgtcatcacgtcactggagaatgctcttgcccttctggctggatgggcacagtgtgtggtcagccttgccccgagggtcgctttggaaagaactgttcccaagaatgccagtgccataatggagggacgtgtgatgctgccacaggccaatgtcattgcagtccaggatacacaggggaacggtgccaggatgagtgtcctgttgggacctatggcgttctctgtgctgagacctgccagtgtgtcaacggagggaagtgttaccacgtgagcggcgcatgcctctgtgaagcaggctttgctggcgagcgctgcgaagcacgcctgtgtcctgaggggctctacggcatcaaatgtgacaaacggtgtccctgccacctggaaaacactcatagctgtcaccccatgtctggagagtgtgcctgcaagccgggctggtcaggactctactgtaatgagacatgttctcctggattctacggggaagcttgccagcagatctgcagctgccaaaatggggcagactgtgacagtgtgactggaaagtgcacctgtgccccaggattcaaaggaattgactgctctaccccatgccctctgggaacctatgggataaactgttcctctcgctgtggctgtaaaaatgatgcagtctgctctcctgtggacgggtcttgtacttgcaaggcaggctggcacggggtggactgctccatcagatgtcccagtggcacatggggctttggctgtaacttaacatgccagtgcctcaacgggggagcctgcaacaccctggacgggacctgcacgtgtgcacctggatggcgcggggagaaatgcgaacttccctgccaggatggcacgtacgggctgaactgtgctgagcgctgcgactgcagccacgcagatggctgccaccctaccacgggccattgccgctgcctccccggatggtcaggtgtccactgtgacagcgtgtgtgctgagggacgctggggccccaactgctccctgccctgctactgtaaaaatggggcttcatgctcccctgatgatggcatctgcgagtgtgcaccaggcttccgaggcaccacttgtcagaggatctgctcccctggtttttatgggcatcgctgcagccagacatgcccacagtgcgttcacagcagcgggccctgccaccacatcaccggcctgtgtgactgcttgcctggcttcacaggcgccctctgcaatgaagtgtgtcccagtggcagatttgggaaaaactgtgcaggaatttgtacctgcaccaacaacggaacctgtaaccccattgacagatcttgtcagtgttaccccggttggattggcagtgactgctctcaaccatgtccacctgcccactggggcccaaactgcatccacacgtgcaactgccataatggagctttctgcagcgcctacgatggggaatgtaaatgcactcctggctggacagggctctactgcactcagagatgtcctctagggttttatggaaaagattgtgcactgatatgccaatgtcaaaacggagctgactgcgaccacatttctgggcagtgtacttgccgcactggattcatgggacggcactgtgagcagaagtgcccttcaggaacatatggctatggctgtcgccagatatgtgattgtctgaacaactccacctgcgaccacatcactgggacctgttactgcagccccggatggaagggagcgagatgtgatcaagctggtgttatcatagttggaaatctgaacagcttaagccgaaccagtactgctctccctgctgattcctaccagatcggggccattgcaggcatcatcattcttgtcctagttgttctcttcctactggcattgttcattatttatagacacaagcagaagggaaaggaatcaagcatgccagcagttacctacacccctgctatgagggtcgtcaatgcagattataccatttcaggaacccttcctcacagcaatggtggaaacgctaatagccactacttcaccaatcccagttaccacacgctcacccagtgtgccacatcccctcacgtcaacaacagggacaggatgactgtcacgaagtcaaaaaacaatcaactgtttgtgaatcttaaaaatgtgaaccctgggaagagaggccctgtgggggactgcactgggacattgccggctgactggaaacatggcggctacctcaacgagctcggtgcttttggacttgacagaagctatatgggaaaatccttaaaagacctgggaaagaattctgaatataattcaagtaactgctccctaagcagttctgagaacccatatgccactattaaagacccacctgtacttatcccgaaaagctcagagtgtggttatgtggagatgaaatcgccggcacgaagagattccccatatgcagagatcaataactcaacttcagccaacaggaatgtctatgaagttgaacctacagtgagtgttgtccaaggagtattcagcaataatgggcgtctctcccaggatccatatgacctcccaaagaacagtcacatcccttgtcattatgacctgctgccagtccgagacagttcatcctcccctaagcaagaggacagtggtggtagcagcagcaacagcagcagcagcagtgaatgacaccaaaggaccgcttggtagccactggaaccctttccagaactgctgtttggttcttctccatcctcaattttgccactttcatgtgaatgttagtcaattcggtgggcaatttttggacatgaaccagaaagctgaaagctgaggctgacacggactgtaggtgctttttgttcaggtggattcgaaggagttagagatgtgatttcccattgctgttagttttagaactatacccgtgaagcatgacttattgtaagatgttggctgaaagcatgaacttgcagaactccctcggagacgcaggttgcagtggacattgggattgttgcttgaaaaattaaaatttgaatattttctctctcatttgcatcatacagctctacctaggattgtacagtttaccataaaatttacttcatgaaagtgggaatcactgaacatgtagaagacaaggaacatattgttaactcctgattcttaactttattcaactggactcagaattgtagggataatatgaatgcaggaggaaacattctgtcaggcggtatgactggacagactttgaatatactctaaaagtggacagaaaatttacgaaaatcttagattttgtttagaatgagaaaatatacaattagaattattttagaaatagtaggaagtattgcagaagtcaatacacaaatgtgccaggcagaggtggttttctctgtttgactctcaaccaacttcagatctatgacattattctgatcactggctccatcatacatattcaccacttgagattcataacatatcaatagttatttcataaatatagaaatgaaataattttatttttgacagactggatggaatgagtgtgtaatgattgataaaggttgtaaattttaaatgcaagatgacgcttacgttctgtaaaccattagtaatacatgctgtaatatagaattagtggaacattttgattaatctttccctagaagtgactgaaatatttttgtgcatatttgagaaagggaactttccttttattaattgtcaatttagagaaactatgcttaagctggtcttttgcattgctaatgtgacatgtacccaacttttcattaatttgtatttccatttttaaattgcatattctatgttttgtagtgtttggattgttaatgaaaaaatattatatgttcgttattccttgtattattgccacttatcttttgcttgataaaaatgcgttgttcttttttcttttggagggacaagatgaaaatatataatttgaattgattaaaattggtcgttactaaaatagtatagtaaccacaagtgattggcttataaatgaagtagaaatgctttttaatattccaaaatagagttccttttgatctgttggtgctgagccttggttaaaccagggagaaggggagcagaaaggaaacgttgttactgatgagtaccacagactcatcttaaaaaaaactctcattatggtgatcatagaattgaccatccaaactgggacactcttgagagtaaatggagggcattattaataattatcttgtaatgaacttaaatctggactgttccaggcaaaccagacttatcttgcaatatgagaatgctgacacaatgcaggaaagccagtttcccttttgttgatctacttgaccaagcaaaggggctgaaaaactgaataaggaaacaactttataagagaaacagtggtcttcaatcttttaaagacatgaaatcctatatggcattctgtctcagtgagtcagttaacaaatacgtatgtgcaacccttctgctagtagtgcacataagtgattatccctgccaggtatcgagttggaatatccagttatttcatgtcacacatcggcacgtatgatggtggtttggtcagatggataatacagcagacacacttagaacactcactgcactggtggctgttcattttgaggaactccaaagtcaattcaaggaaataaggaatgacctggaacaggccttagaaacaattgatttattccaatagttaaccactggctggctcccaactctaggtgataggcatctaattgagacatgtgtgagtcaatagccatcggggtcctttttggtgagaagaaataagacattttctcccttttaaagatcatctcttcagagctgcatggtaaatttgaatttccccattgttctctagagctaggtcaaaaaaacaactgtttcttttcttattccactattaataaattgaaagcttgctgtacaaaggcaacagcaacttaaaaaagaaaatctggacaatagatgtggactccaaggggccactgccatcccttcctgtgtgctctttttgacaagtaaatcactccagttagctgatgtcctgaaatgacatttgtacctgaggcaattcttattagagcttactcaggacttttcaaacatcaggacacacatagcaatttggatgttgtaaaactacgtgttacatttggagaggtcttgttgagaaggcaaaattttctaaatattttgatatcaatttgggtaaagaaaggaatacttttgttagaatgagaattaaagagaaaacaaaagaatcttggcaaaattttccctctgaaattacaaactttaggaacttttccagatgtatcgaatttaatttgacattgatgtcactcttcataccaagtgaatctattctcatgaactttgaacccatgttaattttggaccctataactaatttcctttctgtatcccatggtggtcaaagcagtaaaggagtttagagatacttagcaaatgccattcatatagtattgttagccaaactattattccttccttagaagttgatgtatcagaaaatttataagttatttgtatttatatataagtacatcagaacttgcccacatgataactcatgtttgctttaataaggaaaatatgttatttgaggttaattatatgatagtgaggaacattttacaattatttacagtgtttgacattaattgctgtcctatgatacagtagtaatgttaacagagagtttaatatgtttagcattatctttatggaatttatattcaccaatttcaggaaaaccaaccatagaactttataataggacagttataacctgactgaaccaaatccatcagcataatgactgtgtgttctgagaaatgcaaacaactttatgaaagtgtggtcatcttgacccccaaagagccacagtagctgtcaattattgagatttttaaatggtaaatattgcaaaagttaaacaagggtaccacaatatcatttataattgatgtcaatattagtagtccactttatgcttaaaataaaatcataaaaaatcaagttttaaggttatattttttaaaataatgaattttctatctctaggcaacatgtctttattattcaagctgaatgtttaagagagattttggtcttaaaggcttcacatcatgaaagtgtacatgcatatgcaagtgtgaattacgtggtatggatgtttgcttgtttattaactaaagatgtacagcaaactgcccgtttagagtcctgttaatattgatgtcctaacactgggtctgcttatgctagttcagtatttggtctaggcttcattttgatatgactgaattgcaatctatatttttaaaaagaaaaatcaaaatacattagggtttacttggttgtggcaaacaaacaaaaaatgctttcagtgttgaaatatctctattttccaaagatgataaactttcatcgttcttagcctacattgtcatttatatcaccaaatgagtttatagattaatgcaataaactttctaataaaaaa

SEQ ID NO: 155853 - DNA, 5707 bp, Homo sapiens
  Payload ID: 10614
  Gene Symbol: MEGF11
  Gene Name: multiple EGF-like-domains 11
  Uniprot ID: A6BM72
  ENST ID: ENST00000288745
  CDS Start-End: 160-3069
gcccgctgcccgccgcccggctcccggctgctcgcggccccctgctcctgcctggcgctctggccaggctcgggctccggaggacaggaccgcgcgactggccggccgatccctgggccggccgcgggagcagctatgctgtgactgtccaggaatcgtatgcacaccccttcgatcagatctattacacacgatgcacagacatcctcaactggttcaagtgcaccaggcaccgccctgtgtacggaggagtgtgtgcacggccgctgcgtttccccggacacctgccactgcgagcctggctggggagggcccgactgctccagcggctgcgacagcgaccactgggggccccactgcagcaaccggtgccagtgccagaacggcgccctgtgtaaccccatcacaggcgcctgcgtgtgcgccgccggcttccgtggatggcgctgcgaggagctctgcgcacctggcacccacggcaagggatgccagctgccgtgccagtgccgacacggtgccagctgcgacccccgcgccggcgagtgcctctgcgcacctggctacaccggcgtctactgcgaggagctgtgccctcctgggagccatggagctcactgtgagctgcgctgcccctgtcagaatgggggcacctgccaccacatcactggcgagtgtgcctgccccccaggctggacgggagcagtgtgtgcccagccctgcccaccagggacatttggccagaactgcagccaggattgtccttgccaccatggagggcagtgtgaccacgtgactggacagtgccactgtacagctggatacatgggggacaggtgccaagaggagtgccccttcgggtccttcggcttccagtgctcacagcactgtgactgccacaatggggggcagtgttcacccaccacgggtgcctgcgagtgtgagcctggctacaagggcccacgctgccaggagcgactgtgcccggagggcctgcatggcccaggctgcaccctgccctgcccctgtgacgctgacaacaccatcagctgccacccagtaactggagcttgtacctgccagccaggctggtctggtcaccactgcaatgaatcctgccctgttggctactatggcgatggctgccagctgccttgcacctgtcagaatggcgccgactgccacagcatcactgggggctgcacttgtgctccgggcttcatgggagaggtctgtgccgtttcctgtgcagcagggacctatggccccaactgctcgtccatctgtagctgtaacaatggtggcacctgctccccagtagatggctcctgtacctgcaaggaagggtggcagggcctggactgcaccctgccatgtcccagtgggacgtggggcctgaactgcaacgagagctgcacctgtgccaatggggcagcctgcagccccatagacggctcctgctcctgcactcctggctggctgggagacacctgtgagctgccttgcccggatggcacatttgggctgaactgcagtgaacactgtgactgcagccatgctgatggatgtgaccccgtcacaggccactgctgctgcctggccggatggacaggcatccgctgtgacagcacgtgtccacctggccgctggggccccaactgctctgtctcctgcagctgtgagaatggaggctcctgctccccagaggatgggagctgcgagtgtgcccctggcttccgaggacccttatgccagagaatctgcccccctgggttctatggccacggctgcgcccagccatgccccctctgcgtgcacagcagcaggccctgccaccacatcagcggcatctgtgagtgcctcccaggattctctggagctctctgcaaccaagtgtgtgctggaggatactttgggcaggactgtgcccagctctgctcctgtgccaacaacgggacctgcagccctatcgatggctcctgccagtgctttcctggatggattggcaaggactgctcacaggcttgcccacccgggttctggggccccgcctgcttccacgcatgcagctgccacaacggggcgagctgcagcgccgaggacggggcctgccactgcacccctggctggactggactcttctgcacacagcgctgcccagcagcattttttgggaaggactgtgggcgcgtatgccagtgtcagaatggcgccagctgtgaccacatcagtggcaagtgcacctgccgcacaggcttcaccgggcaacactgtgagcagagatgtgccccaggaacctttggctatgggtgtcagcagctatgtgagtgcatgaacaactccacctgtgaccatgtcaccggcacctgttactgcagccctggcttcaaaggaatcaggtgtgaccaagctgccctcatgatggaggagctgaatccctacaccaagatcagcccagcactgggtgcagagcggcactcggtgggtgctgtcacaggcatcatgctcctgttattcctcattgtggtgctgctgggcctatttgcctggcatcggcggcggcagaaagagaagggccgagacctggctccccgtgtctcctacacacctgccatgaggatgaccagcaccgactactccctctcaggtgcttgtggaatggatagacgtcagaacacatacattatggacaaaggcttcaaagattacatgaaagaatccgtgtgcagttctagtacttgttccttgaatagcagtgaaaacccttacgccacaattaaggacccacccatcctcacctgcaagcttccagaaagcagctatgtagaaatgaagtcgcctgtgcacatggggtctccgtacacagatgtgccatccttgtcgacatctaataaaaatatatatgaagttgagcccacagtcagtgtggtccaagaaggttgcggtcataactccagctatatccagaatgcatacgacctacctaggaacagccatattcctggtcattatgacctcctcccagtaagacagagccctgccaatgggccgtcccaggacaagcaatcttaagagggataagcttctctcttgcagtgtgctctactgaatattctgactctgaaagaagacagtcccttgacttgaagtaatggtacagactggctccagctgcatgttagttattacgttcacctggaactaaagaagagcgtccaggtgggactgggataattgttcaaggaattgtgttctcaaaggcaaatcctatcacccactcagccccaaatgccctggattatatgatttttaaaacattttaagatacagctactcatcaacatcagctaaatatagctgatatatatatatatatttatctgaaacgtgatattttaaaaacatgtaggtttaacaaaccttcctaggacaaaaaggagactggggagggaagaggattactttaaagcacctgaaacgtatatgtacttttggttgctgttaccatcaacatctgttttattaccgaagacaattagtacacagacatgaactgttcttaaacagaacagtcttaaaatgtctgtacatatctgtctggtccatcaaattacaacagccaagattacagaatctatatagtctaatgctgacaacttctattttaaaaaacaagactttactttcttctgccccctaagtgataggtttaaacacacagagacacacacacacgtttccaaagtgcagcagtgtctctttcagtctacaataagattcctagggcagctttatcaaattttgccaattcaaagttcaaggacattacaagttagtcctggctttgtcatatctacttagtccatccgacacctgaatcattccatgtaaaacagagctctaagatgatcctttaagcaagcagtcatagactggtcgggattaagtaaaagacggctagttggcctcctcattttatttggtcagcatcccttgactcaagagtacttgctttcaagttcttcataaatcttgagattgacgtagtatgaaacctaaaagtatacaggaaattggacaaatgtggatacagcaagtttacactgcttaaagtacattatgctttttaatggaactaaatgatcaaaaaaagaatggactgtaaccagttgctgtaacgtgatgtaaaaacgttactgtaaacagcatgaggatatgaagtccttccaccttctatcttaaaactactacttactgagctagcccaatatgcattacaatgagctaatgctccagatcccagtattcagatgtgtctataccttccactatgaacacagataaactgaggctcagataagtccaaatgaaatgaaatcaactcccaagccctaaagagaaccttctcacaagaattaaaaacaaaaagggcaaacctaggaagctaacggctactcctgtaccactctattcactggtacagtccagccagtaaaaaacacttccaaaaagatacacagaagaggaactaaatgactgcgaagctggaatactgctacaggaagtatgagagttctgaaacccttgatagaaactggaagcctgccatggaacacaatactttgggcaataatcagaaaaagcaaaaaaataaataaatgagtacatctccccttcccacatcactcaaggcataagcagattttactgttagaggaaaatatgtaatacttacatgaatgttgcatgtgtgcatgggagcaactgagtagcaatagtaaatttactttccaaaaaagccttattaaaatataaatattagaaaattactttggagacccaagtaaatatttctcatacatatgtagaaagaaatataggtaagcagcttacctcagtatttcagggcagcaagtgtttgtgaagcaaggatgagcagcatgaagatgtcagatcagcaaggagaaacttcaactcaatcccaggttttctcttcttcccttatcctgcatgtacaataactgctgcctggcaaactgcaaacaagcagcatcactcaagtttgaagtttcgccgcttttgtcaactatcctctgggcaaaggtattcagcaagaggtggaatggctagacactgaatcaagagatttcagtgttactctggtcaagttagtcgccctctctgggctcccttttttcctatgcataaaaaggggagaagcagagagtgggaagacagctctactaacccttcagctctagcagtccatgactttttaaggaaatgtaatacaagtcaaaccaggcaatacagaggagaagggaaaggcagagggtgtgattatggtgacaatagctgccttcccctatcgaacagttatcagtaaaagacatttcaatcttacaaagcaactgttagaaacttctgtctaacaccatcacaaataggttcatggtcagcctaaacatgtatactgtgcattttatgggtgactttgaaagatctgttcaattatttttcagaaactaaattttcaaaaaattaatatgtgtacaattaaaatgaatgaaagaaaaaccattattgtacagaggtattaatgagactatgaaacggcaatacttttttaaatcacagatttgtaatatatgttcactgtgcagagggattgtaccttgtacaaaataaaacaaatttctcaaactaattt

SEQ ID NO: 155854 - DNA, 3423 bp, Homo sapiens
  Payload ID: 10614
  Gene Symbol: MEGF11
  Gene Name: multiple EGF-like-domains 11
  ENST ID: ENST00000395614
  CDS Start-End: 1-3423
atggtgctctccctgacggggctcattgccttctccttcctgcaagccacccttgccctgaaccccgaggaccccaacgtgtgcagccactgggagagctatgctgtgactgtccaggaatcgtatgcacaccccttcgatcagatctattacacacgatgcacagacatcctcaactggttcaagtgcaccaggcaccggatcagttataagacggcgtatcggagaggcctccggaccatgtaccggcggaggtcccagtgctgccctggctactatgagagcggagacttctgcatacccctgtgtacggaggagtgtgtgcacggccgctgcgtttccccggacacctgccactgcgagcctggctggggagggcccgactgctccagcggctgcgacagcgaccactgggggccccactgcagcaaccggtgccagtgccagaacggcgccctgtgtaaccccatcacaggcgcctgcgtgtgcgccgccggcttccgtggatggcgctgcgaggagctctgcgcacctggcacccacggcaagggatgccagctgccgtgccagtgccgacacggtgccagctgcgacccccgcgccggcgagtgcctctgcgcacctggctacaccggcgtctactgcgaggagctgtgccctcctgggagccatggagctcactgtgagctgcgctgcccctgtcagaatgggggcacctgccaccacatcactggcgagtgtgcctgccccccaggctggacgggagcagtgtgtgcccagccctgcccaccagggacatttggccagaactgcagccaggattgtccttgccaccatggagggcagtgtgaccacgtgactggacagtgccactgtacagctggatacatgggggacaggtgccaagaggagtgccccttcgggtccttcggcttccagtgctcacagcactgtgactgccacaatggggggcagtgttcacccaccacgggtgcctgcgagtgtgagcctggctacaagggcccacgctgccaggagcgactgtgcccggagggcctgcatggcccaggctgcaccctgccctgcccctgtgacgctgacaacaccatcagctgccacccagtaactggagcttgtacctgccagccaggctggtctggtcaccactgcaatgaatcctgccctgttggctactatggcgatggctgccagctgccttgcacctgtcagaatggcgccgactgccacagcatcactgggggctgcacttgtgctccgggcttcatgggagaggtctgtgccgtttcctgtgcagcagggacctatggccccaactgctcgtccatctgtagctgtaacaatggtggcacctgctccccagtagatggctcctgtacctgcaaggaagggtggcagggcctggactgcaccctgccatgtcccagtgggacgtggggcctgaactgcaacgagagctgcacctgtgccaatggggcagcctgcagccccatagacggctcctgctcctgcactcctggctggctgggagacacctgtgagctgccttgcccggatggcacatttgggctgaactgcagtgaacactgtgactgcagccatgctgatggatgtgaccccgtcacaggccactgctgctgcctggccggatggacaggcatccgctgtgacagcacgtgtccacctggccgctggggccccaactgctctgtctcctgcagctgtgagaatggaggctcctgctccccagaggatgggagctgcgagtgtgcccctggcttccgaggacccttatgccagagaatctgcccccctgggttctatggccacggctgcgcccagccatgccccctctgcgtgcacagcagcaggccctgccaccacatcagcggcatctgtgagtgcctcccaggattctctggagctctctgcaaccaagtgtgtgctggaggatactttgggcaggactgtgcccagctctgctcctgtgccaacaacgggacctgcagccctatcgatggctcctgccagtgctttcctggatggattggcaaggactgctcacaggcttgcccacccgggttctggggccccgcctgcttccacgcatgcagctgccacaacggggcgagctgcagcgccgaggacggggcctgccactgcacccctggctggactggactcttctgcacacagcgctgcccagcagcattttttgggaaggactgtgggcgcgtatgccagtgtcagaatggcgccagctgtgaccacatcagtggcaagtgcacctgccgcacaggcttcaccgggcaacactgtgagcagagatgtgccccaggaacctttggctatgggtgtcagcagctatgtgagtgcatgaacaactccacctgtgaccatgtcaccggcacctgttactgcagccctggcttcaaaggaatcaggtgtgaccaagctgccctcatgatggaggagctgaatccctacaccaagatcagcccagcactgggtgcagagcggcactcggtgggtgctgtcacaggcatcatgctcctgttattcctcattgtggtgctgctgggcctatttgcctggcatcggcggcggcagaaagagaagggccgagacctggctccccgtgtctcctacacacctgccatgaggatgaccagcaccgactactccctctcagatttgtctcaaagtagcagccatgcccactgcttttccaattccagctaccacgcactggcatgtggggggcctgccaccagccaggccagcactctggacaggaacagccccaccaagctcagtaacaagtcccttgacagagacacagcaggctggaccccctacagctatgtgaacgtgttagactcccatttccagatcagtgccctggaggccaggtacccgcccgaggacttctacattgaacttagacacctcagccgccccgctgagccacactcaccaggtgcttgtggaatggatagacgtcagaacacatacattatggacaaaggcttcaaagattacatgaaagaatccgtgtgcagttctagtacttgttccttgaatagcagtgaaaacccttacgccacaattaaggacccacccatcctcacctgcaagcttccagaaagcagctatgtagaaatgaagtcgcctgtgcacatggggtctccgtacacagatgtgccatccttgtcgacatctaataaaaatatatatgaagttgagcccacagtcagtgtggtccaagaaggttgcggtcataactccagctatatccagaatgcatacgacctacctaggaacagccatattcctggtcattatgacctcctcccagtaagacagagccctgccaatgggccgtcccaggacaagcaatcttaa

SEQ ID NO: 155855 - DNA, 6163 bp, Homo sapiens
  Payload ID: 10614
  Gene Symbol: MEGF11
  Gene Name: multiple EGF-like-domains 11
  Uniprot ID: A6BM72
  ENST ID: ENST00000409699
  CDS Start-End: 174-3308
cgctcccggtgcccgctgcccgccgcccggctcccggctgctcgcggccccctgctcctgcctggcgctctggccaggctcgggctccggaggacaggaccgcgcgactggccggccgatccctgggccggccgcgggagcagcctcctttgttctcctgtgcagggcccgggatggtgctctccctgacggggctcattgccttctccttcctgcaagccacccttgccctgaaccccgaggaccccaacgtgtgcagccactgggagagctatgctgtgactgtccaggaatcgtatgcacaccccttcgatcagatctattacacacgatgcacagacatcctcaactggttcaagtgcaccaggcaccggatcagttataagacggcgtatcggagaggcctccggaccatgtaccggcggaggtcccagtgctgccctggctactatgagagcggagacttctgcatacccctgtgtacggaggagtgtgtgcacggccgctgcgtttccccggacacctgccactgcgagcctggctggggagggcccgactgctccagcggctgcgacagcgaccactgggggccccactgcagcaaccggtgccagtgccagaacggcgccctgtgtaaccccatcacaggcgcctgcgtgtgcgccgccggcttccgtggatggcgctgcgaggagctctgcgcacctggcacccacggcaagggatgccagctgccgtgccagtgccgacacggtgccagctgcgacccccgcgccggcgagtgcctctgcgcacctggctacaccggcgtctactgcgaggagctgtgccctcctgggagccatggagctcactgtgagctgcgctgcccctgtcagaatgggggcacctgccaccacatcactggcgagtgtgcctgccccccaggctggacgggagcagtgtgtgcccagccctgcccaccagggacatttggccagaactgcagccaggattgtccttgccaccatggagggcagtgtgaccacgtgactggacagtgccactgtacagctggatacatgggggacaggtgccaagaggagtgccccttcgggtccttcggcttccagtgctcacagcactgtgactgccacaatggggggcagtgttcacccaccacgggtgcctgcgagtgtgagcctggctacaagggcccacgctgccaggagcgactgtgcccggagggcctgcatggcccaggctgcaccctgccctgcccctgtgacgctgacaacaccatcagctgccacccagtaactggagcttgtacctgccagccaggctggtctggtcaccactgcaatgaatcctgccctgttggctactatggcgatggctgccagctgccttgcacctgtcagaatggcgccgactgccacagcatcactgggggctgcacttgtgctccgggcttcatgggagaggtctgtgccgtttcctgtgcagcagggacctatggccccaactgctcgtccatctgtagctgtaacaatggtggcacctgctccccagtagatggctcctgtacctgcaaggaagggtggcagggcctggactgcaccctgccatgtcccagtgggacgtggggcctgaactgcaacgagagctgcacctgtgccaatggggcagcctgcagccccatagacggctcctgctcctgcactcctggctggctgggagacacctgtgagctgccttgcccggatggcacatttgggctgaactgcagtgaacactgtgactgcagccatgctgatggatgtgaccccgtcacaggccactgctgctgcctggccggatggacaggcatccgctgtgacagcacgtgtccacctggccgctggggccccaactgctctgtctcctgcagctgtgagaatggaggctcctgctccccagaggatgggagctgcgagtgtgcccctggcttccgaggacccttatgccagagaatctgcccccctgggttctatggccacggctgcgcccagccatgccccctctgcgtgcacagcagcaggccctgccaccacatcagcggcatctgtgagtgcctcccaggattctctggagctctctgcaaccaagtgtgtgctggaggatactttgggcaggactgtgcccagctctgctcctgtgccaacaacgggacctgcagccctatcgatggctcctgccagtgctttcctggatggattggcaaggactgctcacaggcttgcccacccgggttctggggccccgcctgcttccacgcatgcagctgccacaacggggcgagctgcagcgccgaggacggggcctgccactgcacccctggctggactggactcttctgcacacagcgctgcccagcagcattttttgggaaggactgtgggcgcgtatgccagtgtcagaatggcgccagctgtgaccacatcagtggcaagtgcacctgccgcacaggcttcaccgggcaacactgtgagcagagatgtgccccaggaacctttggctatgggtgtcagcagctatgtgagtgcatgaacaactccacctgtgaccatgtcaccggcacctgttactgcagccctggcttcaaaggaatcaggtgtgaccaagctgccctcatgatggaggagctgaatccctacaccaagatcagcccagcactgggtgcagagcggcactcggtgggtgctgtcacaggcatcatgctcctgttattcctcattgtggtgctgctgggcctatttgcctggcatcggcggcggcagaaagagaagggccgagacctggctccccgtgtctcctacacacctgccatgaggatgaccagcaccgactactccctctcaggtgcttgtggaatggatagacgtcagaacacatacattatggacaaaggcttcaaagattacatgaaagaatccgtgtgcagttctagtacttgttccttgaatagcagtgaaaacccttacgccacaattaaggacccacccatcctcacctgcaagcttccagaaagcagctatgtagaaatgaagtcgcctgtgcacatggggtctccgtacacagatgtgccatccttgtcgacatctaataaaaatatatatgaagttgagcccacagtcagtgtggtccaagaaggttgcggtcataactccagctatatccagaatgcatacgacctacctaggaacagccatattcctggtcattatgacctcctcccagtaagacagagccctgccaatgggccgtcccaggacaagcaatcttaagagggataagcttctctcttgcagtgtgctctactgaatattctgactctgaaagaagacagtcccttgacttgaagtaatggtacagactggctccagctgcatgttagttattacgttcacctggaactaaagaagagcgtccaggtgggactgggataattgttcaaggaattgtgttctcaaaggcaaatcctatcacccactcagccccaaatgccctggattatatgatttttaaaacattttaagatacagctactcatcaacatcagctaaatatagctgatatatatatatatatttatctgaaacgtgatattttaaaaacatgtaggtttaacaaaccttcctaggacaaaaaggagactggggagggaagaggattactttaaagcacctgaaacgtatatgtacttttggttgctgttaccatcaacatctgttttattaccgaagacaattagtacacagacatgaactgttcttaaacagaacagtcttaaaatgtctgtacatatctgtctggtccatcaaattacaacagccaagattacagaatctatatagtctaatgctgacaacttctattttaaaaaacaagactttactttcttctgccccctaagtgataggtttaaacacacagagacacacacacacgtttccaaagtgcagcagtgtctctttcagtctacaataagattcctagggcagctttatcaaattttgccaattcaaagttcaaggacattacaagttagtcctggctttgtcatatctacttagtccatccgacacctgaatcattccatgtaaaacagagctctaagatgatcctttaagcaagcagtcatagactggtcgggattaagtaaaagacggctagttggcctcctcattttatttggtcagcatcccttgactcaagagtacttgctttcaagttcttcataaatcttgagattgacgtagtatgaaacctaaaagtatacaggaaattggacaaatgtggatacagcaagtttacactgcttaaagtacattatgctttttaatggaactaaatgatcaaaaaaagaatggactgtaaccagttgctgtaacgtgatgtaaaaacgttactgtaaacagcatgaggatatgaagtccttccaccttctatcttaaaactactacttactgagctagcccaatatgcattacaatgagctaatgctccagatcccagtattcagatgtgtctataccttccactatgaacacagataaactgaggctcagataagtccaaatgaaatgaaatcaactcccaagccctaaagagaaccttctcacaagaattaaaaacaaaaagggcaaacctaggaagctaacggctactcctgtaccactctattcactggtacagtccagccagtaaaaaacacttccaaaaagatacacagaagaggaactaaatgactgcgaagctggaatactgctacaggaagtatgagagttctgaaacccttgatagaaactggaagcctgccatggaacacaatactttgggcaataatcagaaaaagcaaaaaaataaataaatgagtacatctccccttcccacatcactcaaggcataagcagattttactgttagaggaaaatatgtaatacttacatgaatgttgcatgtgtgcatgggagcaactgagtagcaatagtaaatttactttccaaaaaagccttattaaaatataaatattagaaaattactttggagacccaagtaaatatttctcatacatatgtagaaagaaatataggtaagcagcttacctcagtatttcagggcagcaagtgtttgtgaagcaaggatgagcagcatgaagatgtcagatcagcaaggagaaacttcaactcaatcccaggttttctcttcttcccttatcctgcatgtacaataactgctgcctggcaaactgcaaacaagcagcatcactcaagtttgaagtttcgccgcttttgtcaactatcctctgggcaaaggtattcagcaagaggtggaatggctagacactgaatcaagagatttcagtgttactctggtcaagttagtcgccctctctgggctcccttttttcctatgcataaaaaggggagaagcagagagtgggaagacagctctactaacccttcagctctagcagtccatgactttttaaggaaatgtaatacaagtcaaaccaggcaatacagaggagaagggaaaggcagagggtgtgattatggtgacaatagctgccttcccctatcgaacagttatcagtaaaagacatttcaatcttacaaagcaactgttagaaacttctgtctaacaccatcacaaataggttcatggtcagcctaaacatgtatactgtgcattttatgggtgactttgaaagatctgttcaattatttttcagaaactaaattttcaaaaaattaatatgtgtacaattaaaatgaatgaaagaaaaaccattattgtacagaggtattaatgagactatgaaacggcaatacttttttaaatcacagatttgtaatatatgttcactgtgcagagggattgtaccttgtacaaaataaaacaaatttctcaaactaatttaacaagaatgcctactgttgtgttgcaaatggaaaacgtgcttataatctacaccttaagtttaagggtagaactaacctacatcctgcttgggcactttgaacacctggaagaatgaaaattattctagtagatgtttgaaaataagtgaaaaacttgtatcaaatttttgatagacgagtctctttctttaaagtaataaatgtgagcaccatat

SEQ ID NO: 155856 - DNA, 864 bp, Homo sapiens
  Payload ID: 10614
  Gene Symbol: MEGF11
  Gene Name: multiple EGF-like-domains 11
  ENST ID: ENST00000455812
  CDS Start-End: 182-864
tgcttttccatcttccagtgtgtgacatcctttgtctcctattcctcttttctttggagcagtgtgtgcccagccctgcccaccagggacatttggccagaactgcagccaggattgtccttgccaccatggagggcagtgtgaccacgtgactggacagtgccactgtacagctggatacatgggggacaggtgccaagaggagtgccccttcgggtccttcggcttccagtgctcacagcactgtgactgccacaatggggggcagtgttcacccaccacgggtgcctgcgagtgtgagcctggctacaagggcccacgctgccaggagcgactgtgcccggagggcctgcatggcccaggctgcaccctgccctgcccctgtgacgctgacaacaccatcagctgccacccagtaactggagcttgtacctgccagccaggctggtctggtcaccactgcaatgaatcctgccctgttggctactatggcgatggctgccagctgccttgcacctgtcagaatggcgccgactgccacagcatcactgggggctgcacttgtgctccgggcttcatgggagaggtctgtgccgtttcctgtgcagcagggacctatggccccaactgctcgtccatctgtagctgtaacaatggtggcacctgctccccagtagatggctcctgtacctgcaaggaagggtggcagggcctggactgcaccctgccatgtcccagtgggacgtggggcctgaactgcaacgagagctgcacctgtgccaatggggcagcctgcagccccatagacggctcctgctcctgcactcctggctggctgggagacacctgtgagctgccttgccc

SEQ ID NO: 155857 - DNA, 5914 bp, Homo sapiens
  Payload ID: 10614
  Gene Symbol: MEGF11
  Gene Name: multiple EGF-like-domains 11
  Uniprot ID: A6BM72
  ENST ID: ENST00000422354
  CDS Start-End: 142-3276
gcccgctgcccgccgcccggctcccggctgctcgcggccccctgctcctgcctggcgctctggccaggctcgggctccggaggacaggaccgcgcgactggccggccgatccctgggccggccgcgggagcagggcccgggatggtgctctccctgacggggctcattgccttctccttcctgcaagccacccttgccctgaaccccgaggaccccaacgtgtgcagccactgggagagctatgctgtgactgtccaggaatcgtatgcacaccccttcgatcagatctattacacacgatgcacagacatcctcaactggttcaagtgcaccaggcaccggatcagttataagacggcgtatcggagaggcctccggaccatgtaccggcggaggtcccagtgctgccctggctactatgagagcggagacttctgcatacccctgtgtacggaggagtgtgtgcacggccgctgcgtttccccggacacctgccactgcgagcctggctggggagggcccgactgctccagcggctgcgacagcgaccactgggggccccactgcagcaaccggtgccagtgccagaacggcgccctgtgtaaccccatcacaggcgcctgcgtgtgcgccgccggcttccgtggatggcgctgcgaggagctctgcgcacctggcacccacggcaagggatgccagctgccgtgccagtgccgacacggtgccagctgcgacccccgcgccggcgagtgcctctgcgcacctggctacaccggcgtctactgcgaggagctgtgccctcctgggagccatggagctcactgtgagctgcgctgcccctgtcagaatgggggcacctgccaccacatcactggcgagtgtgcctgccccccaggctggacgggagcagtgtgtgcccagccctgcccaccagggacatttggccagaactgcagccaggattgtccttgccaccatggagggcagtgtgaccacgtgactggacagtgccactgtacagctggatacatgggggacaggtgccaagaggagtgccccttcgggtccttcggcttccagtgctcacagcactgtgactgccacaatggggggcagtgttcacccaccacgggtgcctgcgagtgtgagcctggctacaagggcccacgctgccaggagcgactgtgcccggagggcctgcatggcccaggctgcaccctgccctgcccctgtgacgctgacaacaccatcagctgccacccagtaactggagcttgtacctgccagccaggctggtctggtcaccactgcaatgaatcctgccctgttggctactatggcgatggctgccagctgccttgcacctgtcagaatggcgccgactgccacagcatcactgggggctgcacttgtgctccgggcttcatgggagaggtctgtgccgtttcctgtgcagcagggacctatggccccaactgctcgtccatctgtagctgtaacaatggtggcacctgctccccagtagatggctcctgtacctgcaaggaagggtggcagggcctggactgcaccctgccatgtcccagtgggacgtggggcctgaactgcaacgagagctgcacctgtgccaatggggcagcctgcagccccatagacggctcctgctcctgcactcctggctggctgggagacacctgtgagctgccttgcccggatggcacatttgggctgaactgcagtgaacactgtgactgcagccatgctgatggatgtgaccccgtcacaggccactgctgctgcctggccggatggacaggcatccgctgtgacagcacgtgtccacctggccgctggggccccaactgctctgtctcctgcagctgtgagaatggaggctcctgctccccagaggatgggagctgcgagtgtgcccctggcttccgaggacccttatgccagagaatctgcccccctgggttctatggccacggctgcgcccagccatgccccctctgcgtgcacagcagcaggccctgccaccacatcagcggcatctgtgagtgcctcccaggattctctggagctctctgcaaccaagtgtgtgctggaggatactttgggcaggactgtgcccagctctgctcctgtgccaacaacgggacctgcagccctatcgatggctcctgccagtgctttcctggatggattggcaaggactgctcacaggcttgcccacccgggttctggggccccgcctgcttccacgcatgcagctgccacaacggggcgagctgcagcgccgaggacggggcctgccactgcacccctggctggactggactcttctgcacacagcgctgcccagcagcattttttgggaaggactgtgggcgcgtatgccagtgtcagaatggcgccagctgtgaccacatcagtggcaagtgcacctgccgcacaggcttcaccgggcaacactgtgagcagagatgtgccccaggaacctttggctatgggtgtcagcagctatgtgagtgcatgaacaactccacctgtgaccatgtcaccggcacctgttactgcagccctggcttcaaaggaatcaggtgtgaccaagctgccctcatgatggaggagctgaatccctacaccaagatcagcccagcactgggtgcagagcggcactcggtgggtgctgtcacaggcatcatgctcctgttattcctcattgtggtgctgctgggcctatttgcctggcatcggcggcggcagaaagagaagggccgagacctggctccccgtgtctcctacacacctgccatgaggatgaccagcaccgactactccctctcaggtgcttgtggaatggatagacgtcagaacacatacattatggacaaaggcttcaaagattacatgaaagaatccgtgtgcagttctagtacttgttccttgaatagcagtgaaaacccttacgccacaattaaggacccacccatcctcacctgcaagcttccagaaagcagctatgtagaaatgaagtcgcctgtgcacatggggtctccgtacacagatgtgccatccttgtcgacatctaataaaaatatatatgaagttgagcccacagtcagtgtggtccaagaaggttgcggtcataactccagctatatccagaatgcatacgacctacctaggaacagccatattcctggtcattatgacctcctcccagtaagacagagccctgccaatgggccgtcccaggacaagcaatcttaagagggataagcttctctcttgcagtgtgctctactgaatattctgactctgaaagaagacagtcccttgacttgaagtaatggtacagactggctccagctgcatgttagttattacgttcacctggaactaaagaagagcgtccaggtgggactgggataattgttcaaggaattgtgttctcaaaggcaaatcctatcacccactcagccccaaatgccctggattatatgatttttaaaacattttaagatacagctactcatcaacatcagctaaatatagctgatatatatatatatatttatctgaaacgtgatattttaaaaacatgtaggtttaacaaaccttcctaggacaaaaaggagactggggagggaagaggattactttaaagcacctgaaacgtatatgtacttttggttgctgttaccatcaacatctgttttattaccgaagacaattagtacacagacatgaactgttcttaaacagaacagtcttaaaatgtctgtacatatctgtctggtccatcaaattacaacagccaagattacagaatctatatagtctaatgctgacaacttctattttaaaaaacaagactttactttcttctgccccctaagtgataggtttaaacacacagagacacacacacacgtttccaaagtgcagcagtgtctctttcagtctacaataagattcctagggcagctttatcaaattttgccaattcaaagttcaaggacattacaagttagtcctggctttgtcatatctacttagtccatccgacacctgaatcattccatgtaaaacagagctctaagatgatcctttaagcaagcagtcatagactggtcgggattaagtaaaagacggctagttggcctcctcattttatttggtcagcatcccttgactcaagagtacttgctttcaagttcttcataaatcttgagattgacgtagtatgaaacctaaaagtatacaggaaattggacaaatgtggatacagcaagtttacactgcttaaagtacattatgctttttaatggaactaaatgatcaaaaaaagaatggactgtaaccagttgctgtaacgtgatgtaaaaacgttactgtaaacagcatgaggatatgaagtccttccaccttctatcttaaaactactacttactgagctagcccaatatgcattacaatgagctaatgctccagatcccagtattcagatgtgtctataccttccactatgaacacagataaactgaggctcagataagtccaaatgaaatgaaatcaactcccaagccctaaagagaaccttctcacaagaattaaaaacaaaaagggcaaacctaggaagctaacggctactcctgtaccactctattcactggtacagtccagccagtaaaaaacacttccaaaaagatacacagaagaggaactaaatgactgcgaagctggaatactgctacaggaagtatgagagttctgaaacccttgatagaaactggaagcctgccatggaacacaatactttgggcaataatcagaaaaagcaaaaaaataaataaatgagtacatctccccttcccacatcactcaaggcataagcagattttactgttagaggaaaatatgtaatacttacatgaatgttgcatgtgtgcatgggagcaactgagtagcaatagtaaatttactttccaaaaaagccttattaaaatataaatattagaaaattactttggagacccaagtaaatatttctcatacatatgtagaaagaaatataggtaagcagcttacctcagtatttcagggcagcaagtgtttgtgaagcaaggatgagcagcatgaagatgtcagatcagcaaggagaaacttcaactcaatcccaggttttctcttcttcccttatcctgcatgtacaataactgctgcctggcaaactgcaaacaagcagcatcactcaagtttgaagtttcgccgcttttgtcaactatcctctgggcaaaggtattcagcaagaggtggaatggctagacactgaatcaagagatttcagtgttactctggtcaagttagtcgccctctctgggctcccttttttcctatgcataaaaaggggagaagcagagagtgggaagacagctctactaacccttcagctctagcagtccatgactttttaaggaaatgtaatacaagtcaaaccaggcaatacagaggagaagggaaaggcagagggtgtgattatggtgacaatagctgccttcccctatcgaacagttatcagtaaaagacatttcaatcttacaaagcaactgttagaaacttctgtctaacaccatcacaaataggttcatggtcagcctaaacatgtatactgtgcattttatgggtgactttgaaagatctgttcaattatttttcagaaactaaattttcaaaaaattaatatgtgtacaattaaaatgaatgaaagaaaaaccattattgtacagaggtattaatgagactatgaaacggcaatacttttttaaatcacagatttgtaatatatgttcactgtgcagagggattgtaccttgtacaaaataaaacaaatttctcaaactaattt

SEQ ID NO: 155858 - DNA, 3216 bp, Homo sapiens
  Payload ID: 10614
  Gene Symbol: MEGF11
  Gene Name: multiple EGF-like-domains 11
  ENST ID: ENST00000490495
  CDS Start-End: 127-1866
ggagcagtgtgtgcccagccctgcccaccagggacatttggccagaactgcagccaggattgtccttgccaccatggagggcagtgtgaccacgtgactggacagtgccactgtacagctggatacatgggggacaggtgccaagaggagtgccccttcgggtccttcggcttccagtgctcacagcactgtgactgccacaatggggggcagtgttcacccaccacgggtgcctgcgagtgtgagcctggctacaagggcccacgctgccaggagcgactgtgcccggagggcctgcatggcccaggctgcaccctgccctgcccctgtgacgctgacaacaccatcagctgccacccagtaactggagcttgtacctgccagccaggctggtctggtcaccactgcaatgaatcctgccctgttggctactatggcgatggctgccagctgccttgcacctgtcagaatggcgccgactgccacagcatcactgggggctgcacttgtgctccgggcttcatgggagaggtctgtgccgtttcctgtgcagcagggacctatggccccaactgctcgtccatctgtagctgtaacaatggtggcacctgctccccagtagatggctcctgtacctgcaaggaagggtggcagggcctggactgcaccctgccatgtcccagtgggacgtggggcctgaactgcaacgagagctgcacctgtgccaatggggcagcctgcagccccatagacggctcctgctcctgcactcctggctggctgggagacacctgtgagctgccttgcccggatggcacatttgggctgaactgcagtgaacactgtgactgcagccatgctgatggatgtgaccccgtcacaggccactgctgctgcctggccggatggacaggcatccgctgtgacagcacgtgtccacctggccgctggggccccaactgctctgtctcctgcagctgtgagaatggaggctcctgctccccagaggatgggagctgcgagtgtgcccctggcttccgaggacccttatgccagagaatctgcccccctgggttctatggccacggctgcgcccagccatgccccctctgcgtgcacagcagcaggccctgccaccacatcagcggcatctgtgagtgcctcccaggattctctggagctctctgcaaccaagtgtgtgctggaggatactttgggcaggactgtgcccagctctgctcctgtgccaacaacgggacctgcagccctatcgatggctcctgccagtgctttcctggatggattggcaaggactgctcacaggcttgcccacccgggttctggggccccgcctgcttccacgcatgcagctgccacaacggggcgagctgcagcgccgaggacggggcctgccactgcacccctggctggactggactcttctgcacacagcgtaagccccacctcctggcctcccagccacttagaataccatgctgcggcctactggccactgtgggcattgtccagaccagcagggagggaggaatgcaggcagccccaggactggtggtacctgactcctgccccacgagaactgaggagctctgcaggggcagctccagacctgactggattcaggggattgacaagcccaaagtcctggaaggtcagggctgcaaggctgcccagcagcattttttgggaaggactgtgggcgcgtatgccagtgtcagaatggcgccagctgtgaccacatcagtggcaagtgcacctgccgcacaggcttcaccgggcaacactgtgagcagagatgtgccccaggaacctttggctatgggtgtcagcagctatgtgagtgcatgaacaactccacctgtgaccatgtcaccggcacctgttactgcagccctggcttcaaaggaatcaggtgtgaccaagctgccctcatgatggaggagctgaatccctacaccaagatcagcccagcactgggtgcagagcggcactcggtgggtgctgtcacaggcatcatgctcctgttattcctcattgtggtgctgctgggcctatttgcctggcatcggcggcggcagaaagagaagggccgagacctggctccccgtgtctcctacacacctgccatgaggatgaccagcaccgactactccctctcagctcagtaacaagtcccttgacagagacacagcaggctggaccccctacagctatgtgaacgtgttagactcccatttccagatcagtgccctggaggccaggtacccgcccgaggacttctacattgaacttagacacctcagccgccccgctgagccacactcaccagataagccttggatccaggagaggacagacaggaccagagctgagaggtgcttgtggaatggatagacgtcagaacacatacattatggacaaaggcttcaaaggcaggtggatgactcagctggagaacaaagtggcttcctgaggtggagtttccagcttgcccagcccttccccattctccagtcccagtagagatggggtacagaagagtccataattcaacacccttttctcaccacccagccaacacatacatgcactgctccatcctctgctcctgtatggaagatacttccccctgagcttagcccctccccacagacatcaacttctcttttatccatttaggatcatcccctgctccagagccaacaattgattccccaaaactttaaagtagccccgacttttctggtgaaaatgagaagaggcactatcaactggccgaggttcttttaggcattgaacttcaaggctctcctactgccctaactcagtcatgggatatccacaaaaaacttaagagcttagcctttttctctcagctgggcttagccccatagatgaaagacattccttgttaagggtaaggtgtagctgctgcagatacagtttgcctttagagatatggacaggagccctggataacaagacacgtagtgagggaaaacatcttgattggtatcaagagaagacaggggttgagtcctgactaaactatttactaacattaggaattatattagcaaattttctgagcttcagattcctcattctaaagtagaaacaacagtcctttctgcccagccctattcacgatgtaacaagtttcaaatgacctaattggaatgaagactatacgtgcta

SEQ ID NO: 155859 - DNA, 454 bp, Homo sapiens
  Payload ID: 10614
  Gene Symbol: MEGF11
  Gene Name: multiple EGF-like-domains 11
  ENST ID: ENST00000564573
  CDS Start-End: 1-91
gtgcctcccaggattctctggagctctctgcaaccaagctagcaagtggcagaaacaaattctgattccgacatgcatgctgaagggatgaaaagtgaaacaagcacagagatctgcatcagaagtggcaccatgtggtctgtgccgagtgccaagggtaaaggcagagaatgctgtgggagtgcagaggagctggctctggctggagatggcaacttccaagcccttctccccgtcatattcaggccaccatccctaatccctccccatatgctttcctgacttgacctcagaatccttcacaataccgactccaagaactgctaccactcagcaggagttgaaaagagatataaagcttatttgcattggtgttccaccctaccagctctttgtgggggaaaaaccctgatctgtaacatctgcagatttttaaaatataaatattcctacc

SEQ ID NO: 155860 - DNA, 2644 bp, Homo sapiens
  Payload ID: 10614
  Gene Symbol: MEGF11
  Gene Name: multiple EGF-like-domains 11
  ENST ID: ENST00000615866
  CDS Start-End: 160-2644
gcccgctgcccgccgcccggctcccggctgctcgcggccccctgctcctgcctggcgctctggccaggctcgggctccggaggacaggaccgcgcgactggccggccgatccctgggccggccgcgggagcagctatgctgtgactgtccaggaatcgtatgcacaccccttcgatcagatctattacacacgatgcacagacatcctcaactggttcaagtgcaccaggcaccgccctgtgtacggaggagtgtgtgcacggccgctgcgtttccccggacacctgccactgcgagcctggctggggagggcccgactgctccagcggctgcgacagcgaccactgggggccccactgcagcaaccggtgccagtgccagaacggcgccctgtgtaaccccatcacaggcgcctgcgtgtgcgccgccggcttccgtggatggcgctgcgaggagctctgcgcacctggcacccacggcaagggatgccagctgccgtgccagtgccgacacggtgccagctgcgacccccgcgccggcgagtgcctctgcgcacctggctacaccggcgtctactgcgaggagctgtgccctcctgggagccatggagctcactgtgagctgcgctgcccctgtcagaatgggggcacctgccaccacatcactggcgagtgtgcctgccccccaggctggacgggagcagtgtgtgcccagccctgcccaccagggacatttggccagaactgcagccaggattgtccttgccaccatggagggcagtgtgaccacgtgactggacagtgccactgtacagctggatacatgggggacaggtgccaagaggagtgccccttcgggtccttcggcttccagtgctcacagcactgtgactgccacaatggggggcagtgttcacccaccacgggtgcctgcgagtgtgagcctggctacaagggcccacgctgccaggagcgactgtgcccggagggcctgcatggcccaggctgcaccctgccctgcccctgtgacgctgacaacaccatcagctgccacccagtaactggagcttgtacctgccagccaggctggtctggtcaccactgcaatgaatcctgccctgttggctactatggcgatggctgccagctgccttgcacctgtcagaatggcgccgactgccacagcatcactgggggctgcacttgtgctccgggcttcatgggagaggtctgtgccgtttcctgtgcagcagggacctatggccccaactgctcgtccatctgtagctgtaacaatggtggcacctgctccccagtagatggctcctgtacctgcaaggaagggtggcagggcctggactgcaccctgccatgtcccagtgggacgtggggcctgaactgcaacgagagctgcacctgtgccaatggggcagcctgcagccccatagacggctcctgctcctgcactcctggctggctgggagacacctgtgagctgccttgcccggatggcacatttgggctgaactgcagtgaacactgtgactgcagccatgctgatggatgtgaccccgtcacaggccactgctgctgcctggccggatggacaggcatccgctgtgacagcacgtgtccacctggccgctggggccccaactgctctgtctcctgcagctgtgagaatggaggctcctgctccccagaggatgggagctgcgagtgtgcccctggcttccgaggacccttatgccagagaatctgcccccctgggttctatggccacggctgcgcccagccatgccccctctgcgtgcacagcagcaggccctgccaccacatcagcggcatctgtgagtgcctcccaggattctctggagctctctgcaaccaagtgtgtgctggaggatactttgggcaggactgtgcccagctctgctcctgtgccaacaacgggacctgcagccctatcgatggctcctgccagtgctttcctggatggattggcaaggactgctcacaggcttgcccacccgggttctggggccccgcctgcttccacgcatgcagctgccacaacggggcgagctgcagcgccgaggacggggcctgccactgcacccctggctggactggactcttctgcacacagcgctgcccagcagcattttttgggaaggactgtgggcgcgtatgccagtgtcagaatggcgccagctgtgaccacatcagtggcaagtgcacctgccgcacaggcttcaccgggcaacactgtgagcagagatgtgccccaggaacctttggctatgggtgtcagcagctatgtgagtgcatgaacaactccacctgtgaccatgtcaccggcacctgttactgcagccctggcttcaaaggaatcaggtgtgaccaagctgccctcatgatggaggagctgaatccctacaccaagatcagcccagcactgggtgcagagcggcactcggtgggtgctgtcacaggcatcatgctcctgttattcctcattgtggtgctgctgggcctatttgcctggcatcggcggcggcagaaagagaagggccgagacctggctccccgtgtctcctacacacctgccatgaggatgaccagcaccgactactccctctcag

SEQ ID NO: 155861 - DNA, 733 bp, Homo sapiens
  Payload ID: 10614
  Gene Symbol: MEGF11
  Gene Name: multiple EGF-like-domains 11
  ENST ID: ENST00000489275
  CDS Start-End: 1-353
atttgtctcaaagtagcagccatgcccactgcttttccaattccagctaccacgcactggcatgtggggggcctgccaccagccaggccagcactctggacaggaacagccccaccaagctcagtaacaagtcccttgacagagacacagcaggctggaccccctacagctatgtgaacgtgttagactcccatttccagatcagtgccctggaggccaggtacccgcccgaggacttctacattgaacttagacacctcagccgccccgctgagccacactcaccagataagccttggatccaggagaggacagacaggaccagagctgagaggtgcttgtggaatggatagacgtcagaacacatacattatggacaaaggcttcaaaggcaggtggatgactcagctggagaacaaagtggcttcctgaggtggagtttccagcttgcccagcccttccccattctccagtcccagtagagatggggtacagaagagtccataattcaacacccttttctcaccacccagccaacacatacatgcactgctccatcctctgctcctgtatggaagatacttccccctgagcttagcccctccccacagacatcaacttctcttttatccatttaggatcatcccctgctccagagccaacaattgattccccaaaactttaaagtagccccgacttttctggtgaaaatgagaagaggcactatcaactg

SEQ ID NO: 155862 - DNA, 2347 bp, Homo sapiens
  Payload ID: 10614
  Gene Symbol: MEGF11
  Gene Name: multiple EGF-like-domains 11
  ENST ID: ENST00000614417
  CDS Start-End: 1-1866
ggagcagtgtgtgcccagccctgcccaccagggacatttggccagaactgcagccaggattgtccttgccaccatggagggcagtgtgaccacgtgactggacagtgccactgtacagctggatacatgggggacaggtgccaagaggagtgccccttcgggtccttcggcttccagtgctcacagcactgtgactgccacaatggggggcagtgttcacccaccacgggtgcctgcgagtgtgagcctggctacaagggcccacgctgccaggagcgactgtgcccggagggcctgcatggcccaggctgcaccctgccctgcccctgtgacgctgacaacaccatcagctgccacccagtaactggagcttgtacctgccagccaggctggtctggtcaccactgcaatgaatcctgccctgttggctactatggcgatggctgccagctgccttgcacctgtcagaatggcgccgactgccacagcatcactgggggctgcacttgtgctccgggcttcatgggagaggtctgtgccgtttcctgtgcagcagggacctatggccccaactgctcgtccatctgtagctgtaacaatggtggcacctgctccccagtagatggctcctgtacctgcaaggaagggtggcagggcctggactgcaccctgccatgtcccagtgggacgtggggcctgaactgcaacgagagctgcacctgtgccaatggggcagcctgcagccccatagacggctcctgctcctgcactcctggctggctgggagacacctgtgagctgccttgcccggatggcacatttgggctgaactgcagtgaacactgtgactgcagccatgctgatggatgtgaccccgtcacaggccactgctgctgcctggccggatggacaggcatccgctgtgacagcacgtgtccacctggccgctggggccccaactgctctgtctcctgcagctgtgagaatggaggctcctgctccccagaggatgggagctgcgagtgtgcccctggcttccgaggacccttatgccagagaatctgcccccctgggttctatggccacggctgcgcccagccatgccccctctgcgtgcacagcagcaggccctgccaccacatcagcggcatctgtgagtgcctcccaggattctctggagctctctgcaaccaagtgtgtgctggaggatactttgggcaggactgtgcccagctctgctcctgtgccaacaacgggacctgcagccctatcgatggctcctgccagtgctttcctggatggattggcaaggactgctcacaggcttgcccacccgggttctggggccccgcctgcttccacgcatgcagctgccacaacggggcgagctgcagcgccgaggacggggcctgccactgcacccctggctggactggactcttctgcacacagcgtaagccccacctcctggcctcccagccacttagaataccatgctgcggcctactggccactgtgggcattgtccagaccagcagggagggaggaatgcaggcagccccaggactggtggtacctgactcctgccccacgagaactgaggagctctgcaggggcagctccagacctgactggattcaggggattgacaagcccaaagtcctggaaggtcagggctgcaaggctgcccagcagcattttttgggaaggactgtgggcgcgtatgccagtgtcagaatggcgccagctgtgaccacatcagtggcaagtgcacctgccgcacaggcttcaccgggcaacactgtgagcagagatgtgccccaggaacctttggctatgggtgtcagcagctatgtgagtgcatgaacaactccacctgtgaccatgtcaccggcacctgttactgcagccctggcttcaaaggaatcaggtgtgaccaagctgccctcatgatggaggagctgaatccctacaccaagatcagcccagcactgggtgcagagcggcactcggtgggtgctgtcacaggcatcatgctcctgttattcctcattgtggtgctgctgggcctatttgcctggcatcggcggcggcagaaagagaagggccgagacctggctccccgtgtctcctacacacctgccatgaggatgaccagcaccgactactccctctcagctcagtaacaagtcccttgacagagacacagcaggctggaccccctacagctatgtgaacgtgttagactcccatttccagatcagtgccctggaggccaggtacccgcccgaggacttctacattgaacttagacacctcagccgccccgctgagccacactcaccag

SEQ ID NO: 155863 - DNA, 2883 bp, Homo sapiens
  Payload ID: 10614
  Gene Symbol: MEGF11
  Gene Name: multiple EGF-like-domains 11
  ENST ID: ENST00000614717
  CDS Start-End: 174-2883
cgctcccggtgcccgctgcccgccgcccggctcccggctgctcgcggccccctgctcctgcctggcgctctggccaggctcgggctccggaggacaggaccgcgcgactggccggccgatccctgggccggccgcgggagcagcctcctttgttctcctgtgcagggcccgggatggtgctctccctgacggggctcattgccttctccttcctgcaagccacccttgccctgaaccccgaggaccccaacgtgtgcagccactgggagagctatgctgtgactgtccaggaatcgtatgcacaccccttcgatcagatctattacacacgatgcacagacatcctcaactggttcaagtgcaccaggcaccggatcagttataagacggcgtatcggagaggcctccggaccatgtaccggcggaggtcccagtgctgccctggctactatgagagcggagacttctgcatacccctgtgtacggaggagtgtgtgcacggccgctgcgtttccccggacacctgccactgcgagcctggctggggagggcccgactgctccagcggctgcgacagcgaccactgggggccccactgcagcaaccggtgccagtgccagaacggcgccctgtgtaaccccatcacaggcgcctgcgtgtgcgccgccggcttccgtggatggcgctgcgaggagctctgcgcacctggcacccacggcaagggatgccagctgccgtgccagtgccgacacggtgccagctgcgacccccgcgccggcgagtgcctctgcgcacctggctacaccggcgtctactgcgaggagctgtgccctcctgggagccatggagctcactgtgagctgcgctgcccctgtcagaatgggggcacctgccaccacatcactggcgagtgtgcctgccccccaggctggacgggagcagtgtgtgcccagccctgcccaccagggacatttggccagaactgcagccaggattgtccttgccaccatggagggcagtgtgaccacgtgactggacagtgccactgtacagctggatacatgggggacaggtgccaagaggagtgccccttcgggtccttcggcttccagtgctcacagcactgtgactgccacaatggggggcagtgttcacccaccacgggtgcctgcgagtgtgagcctggctacaagggcccacgctgccaggagcgactgtgcccggagggcctgcatggcccaggctgcaccctgccctgcccctgtgacgctgacaacaccatcagctgccacccagtaactggagcttgtacctgccagccaggctggtctggtcaccactgcaatgaatcctgccctgttggctactatggcgatggctgccagctgccttgcacctgtcagaatggcgccgactgccacagcatcactgggggctgcacttgtgctccgggcttcatgggagaggtctgtgccgtttcctgtgcagcagggacctatggccccaactgctcgtccatctgtagctgtaacaatggtggcacctgctccccagtagatggctcctgtacctgcaaggaagggtggcagggcctggactgcaccctgccatgtcccagtgggacgtggggcctgaactgcaacgagagctgcacctgtgccaatggggcagcctgcagccccatagacggctcctgctcctgcactcctggctggctgggagacacctgtgagctgccttgcccggatggcacatttgggctgaactgcagtgaacactgtgactgcagccatgctgatggatgtgaccccgtcacaggccactgctgctgcctggccggatggacaggcatccgctgtgacagcacgtgtccacctggccgctggggccccaactgctctgtctcctgcagctgtgagaatggaggctcctgctccccagaggatgggagctgcgagtgtgcccctggcttccgaggacccttatgccagagaatctgcccccctgggttctatggccacggctgcgcccagccatgccccctctgcgtgcacagcagcaggccctgccaccacatcagcggcatctgtgagtgcctcccaggattctctggagctctctgcaaccaagtgtgtgctggaggatactttgggcaggactgtgcccagctctgctcctgtgccaacaacgggacctgcagccctatcgatggctcctgccagtgctttcctggatggattggcaaggactgctcacaggcttgcccacccgggttctggggccccgcctgcttccacgcatgcagctgccacaacggggcgagctgcagcgccgaggacggggcctgccactgcacccctggctggactggactcttctgcacacagcgctgcccagcagcattttttgggaaggactgtgggcgcgtatgccagtgtcagaatggcgccagctgtgaccacatcagtggcaagtgcacctgccgcacaggcttcaccgggcaacactgtgagcagagatgtgccccaggaacctttggctatgggtgtcagcagctatgtgagtgcatgaacaactccacctgtgaccatgtcaccggcacctgttactgcagccctggcttcaaaggaatcaggtgtgaccaagctgccctcatgatggaggagctgaatccctacaccaagatcagcccagcactgggtgcagagcggcactcggtgggtgctgtcacaggcatcatgctcctgttattcctcattgtggtgctgctgggcctatttgcctggcatcggcggcggcagaaagagaagggccgagacctggctccccgtgtctcctacacacctgccatgaggatgaccagcaccgactactccctctcag

SEQ ID NO: 155864 - DNA, 740 bp, Homo sapiens
  Payload ID: 10614
  Gene Symbol: MEGF11
  Gene Name: multiple EGF-like-domains 11
  ENST ID: ENST00000562154
  CDS Start-End: 1-79
ctggaccccctacagctatgtgaacgtgttagatcagtgccctggaggccaggtacccgcccgaggacttctacattgaacttagacacctcagccgccccgctgagccacactcaccaggtgcttgtggaatggatagacgtcagaacacatacattatggacaaaggcttcaaagatgccaactaaatgtcttcggaaatgtaaagcgtcattatccaaccaattagtacgagttaaattgattataaaatctgaaataaagttgatctacctgccccagaggcctcctgtcgttgcactagcaaggaatgccaccctgcacctgctggctttctgggggcacaaggaatgaaaatgatacgcagtgttaatattgtatggcactccaacctcaagagatctctgcctccaagagcagagaagccaagacaaatccctaacacatgggaactgcaagttggatcatccctctaggaagtctacaggtgaagccaaagatgaaaggtcaggtcctgccctaggtttaaatgccggaatgtgtgaaatagggggctttggaactctgtcacttgccactctgttgctcattaactgtgaccttagactggactgtgagctttccaaggctcagtttcctcatctgcaaggttgggataattttgcctgtcctattgtctaatgcctgtcctactgtctaacaaggttatcatgagtaaccaataaaatcaccaatgggaa

SEQ ID NO: 155865 - DNA, 454 bp, Homo sapiens; identical to SEQ ID NO: 155859
  Payload ID: 10614
  Gene Symbol: MEGF11
  Gene Name: multiple EGF-like-domains 11
  ENST ID: ENST00000622356
  CDS Start-End: 1-91

SEQ ID NO: 155866 - DNA, 4501 bp, Homo sapiens
  Payload ID: 10615
  Gene Symbol: MEGF6
  Gene Name: multiple EGF-like-domains 6
  Uniprot ID: O75095
  ENST ID: ENST00000294599
  CDS Start-End: 204-3893
gagaacttaaaggcgaggggcggggcgcgcccggcccagagcggctcccgggcggcgccgagcggagcggatcccggggctgggattgcgcgcccgcccggaacccagaaccagcccgagccgcctgccccgtcgcccggccgccggcttagggcgcagcgcggttggtcctcgccccctcccgcccgccggcctaccaggccatgggggcgtcccgggaccgcgggctggccgcgctctggtgccttgggctcctggggggcctggcgcgcgtcgcgggcacgcactaccgctacctctggaggggctgctacccatgtcacctgggccaggccggctaccccgtgagcgccggtgaccagaggccagatgtggacgaatgccgaacccacaacggtggctgccagcaccggtgcgtgaacaccccaggctcctacctctgtgagtgcaagcccggcttccggctccacactgacagcaggacctgcctggccattaactcctgcgccctgggcaatggcggctgccagcaccactgtgtccagctcacaatcactcggcatcgctgccagtgccggcccgggttccagctccaggaggacggcaggcattgtgtccgtagaagcccgtgtgccaacaggaacggcagctgcatgcacaggtgccaggtggtccggggcctcgcccgctgtgagtgccacgtgggctatcagctagcagcggacggcaaggcctgtgaagatgtggacgaatgtgccgcagggctggcccagtgtgcccatggctgcctcaacacccaggggtccttcaagtgcgtgtgtcacgcgggctatgagctgggcgccgatggccggcagtgctaccggattgagatggaaatcgtgaacagctgtgaggccaacaacggcggctgctcccatggctgcagccacaccagtgctgggcccctgtgcacatgtccccgcggctacgagctggacacagatcagaggacctgcatcgatgtcgacgactgtgcagacagcccgtgctgccagcaggtgtgcaccaacaaccctggcgggtacgagtgcggctgctacgccggctaccggctcagtgccgatggctgcggctgtgaggatgtggatgagtgcgcctccagccgtggcggctgcgagcaccactgcaccaacctggccggctccttccagtgctcctgcgaggccggctaccggctgcacgaggaccgtaggggctgcagccccctggaggagccgatggtggacctggacggcgagctgcctttcgtgcggcccctgccccacattgccgtgctccaggacgagctgccgcaactcttccaggatgacgacgtcggggccgatgaggaagaggcagagttgcggggcgaacacacgctcacagagaagtttgtctgcctggatgactcctttggccatgactgcagcttgacctgtgatgactgcaggaacggagggacctgcctcctgggcctggatggctgtgattgccccgagggctggactgggctcatctgcaatgagacttgtcctccggacacctttgggaagaactgcagcttctcctgcagctgtcagaatggtgggacctgcgactctgtcacgggggcctgccgctgccccccgggtgtcagtggaactaactgtgaggatggctgccccaagggctactatggcaagcactgtcgcaagaaatgcaactgtgccaaccggggccggtgccaccgcctctacggggcctgcctctgcgacccagggctctacggccgcttctgccacctcacctgcccgccgtgggcctttgggccgggctgctcggaggagtgccagtgtgtgcagccccacacgcagtcctgtgacaagagggatggcagctgctcctgcaaggctggcttccggggcgagcgctgtcaggcagagtgtgagctgggctactttgggccggggtgctggcaggcatgcacctgcccagtgggcgtggcctgtgactccgtgagcggcgagtgtgggaagcggtgtcctgctggcttccagggagaggactgtggccaagagtgcccggtggggacgtttggcgtgaactgctcgagctcctgctcctgtgggggggccccctgccacggggtcacggggcagtgccggtgtccgccggggaggactggggaagactgtgaggcagattgtcccgagggccgctgggggctgggctgccaggagatctgcccagcatgccagcacgctgcccgctgcgaccctgagaccggagcctgcctgtgcctccctggcttcgtcggcagccgctgccaggacgtgtgcccagcaggctggtatggtcccagctgccagacaaggtgctcttgtgccaatgatgggcactgccacccagccaccggacactgcagctgtgcccccgggtggaccggctttagctgccagagagcctgtgatactgggcactggggacctgactgcagccacccctgcaactgcagcgctggccacgggagctgtgatgccatcagcggcctgtgtctgtgtgaggctggctacgtgggcccgcggtgcgagcagcagtgtccccagggccactttgggcccggctgtgagcagcggtgccagtgtcagcatggagcagcctgtgaccacgtcagcggggcctgcacctgcccggccggctggaggggcaccttctgcgagcatgcctgcccggccggcttctttggattggactgtcgcagtgcctgcaactgcaccgccggagctgcctgtgatgccgtgaatggctcctgcctctgccccgctggccgccggggcccccgctgtgccgagaagtgcctcccccgggacgtcagagctggctgccggcacagcggcggttgcctcaacgggggcctgtgtgacccgcacacgggccgctgcctctgcccagccggctggactggggacaagtgtcagagcccctgcctgcggggctggtttggagaggcctgtgcccagcgctgcagctgcccgcctggcgctgcctgccaccacgtcactggggcctgccgctgtccccctggcttcactggctccggctgcgagcagggatgtccgcccgggcggtatgggccaggctgtgaacagctgtgtgggtgtctcaacgggggctcctgtgatgcggccacgggggcctgccgctgccccactgggttcctcgggacggactgcaacctcacctgtccgcagggccgcttcggccccaactgcacccacgtgtgtgggtgtgggcagggggcggcctgcgaccctgtgaccggcacctgcctctgccccccggggagagccggcgtccgctgtgagcgaggctgcccccagaaccggtttggcgtgggctgcgagcacacctgctcctgcagaaatgggggcctgtgccacgccagcaacggcagctgctcctgtggcctgggctggacggggcggcactgcgagctggcctgtccccctgggcgctacggagccgcctgccatctggagtgctcctgccacaacaacagcacgtgtgagcctgccacgggcacctgccgctgcggccccggcttctatggccaggcctgcgagcaccggcgctcaggagccacctgtaacctggattgcagaaggggccagtttgggcccagctgcaccctgcactgtgactgcgggggtggggctgactgcgaccctgtcagtgggcagtgtcactgtgtggatggctacatggggcccacgtgccgggaaggtgggcccctccggctccccgagaacccgtccttagcccagggctcagcgggcacactgcccgcctccagcagacccacatcccggagcggtggaccagcgaggcactagtagaggcagtcccgtggagcccgcctctccagtcccagccagaggggaccctggcctttggtgaccactgagaaggacacttcacgggcccagagctcctggtactgcccttcctttgagggccgtggagggctgtggacagcccagcaacctgtcgctcttggaggctggtgtggccttgaggagggaagcctcgcatggccgctggaagagaggcgcctcctggcctggctctgcagaacccaggggcacgctctgggcctgggctgaggaagtcccgctctccccgcggctctgagttggactgaggacaggtgtgggcgccagtgtgggtgcaggcgcaggtgcaggcacagggccactgtcctccaggcaggctttttggtgctaggccctgggactggaagtcgcccagcccgtatttatgtaaaggtatttatgggccactgcacatgcccgctgcagccctgggatcagctggaagctgcctgtcatctcctgcccaatccccagaaaccctgattcaggtctgcaggctcctgcgggctcaccaggctgctggctccggtaccatgtaaacctaggaaggtaaaggagcaggcaacctc

SEQ ID NO: 155867 - DNA, 5455 bp, Homo sapiens
  Payload ID: 10615
  Gene Symbol: MEGF6
  Gene Name: multiple EGF-like-domains 6
  Uniprot ID: O75095
  ENST ID: ENST00000356575
  CDS Start-End: 228-4853
cgccggggcgagttcctgcagggtggacccggcgatcaggtctccgcggtgccactttgggcgcgggcgggaagccgggacgctccgcacctgcagcgaccttgggctccgcggagcgggcgcgggcacctgtggctgcgtcctatggcgcacgtggaggcggaggctccggggagccgccggggccgcctgtgagccggagagcggaggaggcaccggcgcgcacgatgtcgttccttgaagaggcgagggcagcggggcgcgcggtggtcctggcgttggtgctgctgctgctccccgccgtgcccgtgggcgccagcgttccgccgcggcccctgctcccgctgcagcccggcatgccccacgtgtgtgctgagcaggagctgaccctggtgggccgccgccagccgtgcgtgcaggccttaagccacacggtgccggtgtggaaggccggctgtgggtggcaggcgtggtgcgtgggtcatgagcggagaaccgtctactacatgggctacaggcaggtgtataccacggaggcccggaccgtgctcaggtgctgccgagggtggatgcagcagcccgacgaggagggctgcctctcggctgaatgcagcgccagcctctgttttcacggtggccgttgtgtgccaggctcagcccagccgtgtcactgtccccccggcttccagggaccccgctgtcagtatgatgtggacgaatgccgaacccacaacggtggctgccagcaccggtgcgtgaacaccccaggctcctacctctgtgagtgcaagcccggcttccggctccacactgacagcaggacctgcctggccattaactcctgcgccctgggcaatggcggctgccagcaccactgtgtccagctcacaatcactcggcatcgctgccagtgccggcccgggttccagctccaggaggacggcaggcattgtgtccgtagaagcccgtgtgccaacaggaacggcagctgcatgcacaggtgccaggtggtccggggcctcgcccgctgtgagtgccacgtgggctatcagctagcagcggacggcaaggcctgtgaagatgtggacgaatgtgccgcagggctggcccagtgtgcccatggctgcctcaacacccaggggtccttcaagtgcgtgtgtcacgcgggctatgagctgggcgccgatggccggcagtgctaccggattgagatggaaatcgtgaacagctgtgaggccaacaacggcggctgctcccatggctgcagccacaccagtgctgggcccctgtgcacatgtccccgcggctacgagctggacacagatcagaggacctgcatcgatgtcgacgactgtgcagacagcccgtgctgccagcaggtgtgcaccaacaaccctggcgggtacgagtgcggctgctacgccggctaccggctcagtgccgatggctgcggctgtgaggatgtggatgagtgcgcctccagccgtggcggctgcgagcaccactgcaccaacctggccggctccttccagtgctcctgcgaggccggctaccggctgcacgaggaccgtaggggctgcagccccctggaggagccgatggtggacctggacggcgagctgcctttcgtgcggcccctgccccacattgccgtgctccaggacgagctgccgcaactcttccaggatgacgacgtcggggccgatgaggaagaggcagagttgcggggcgaacacacgctcacagagaagtttgtctgcctggatgactcctttggccatgactgcagcttgacctgtgatgactgcaggaacggagggacctgcctcctgggcctggatggctgtgattgccccgagggctggactgggctcatctgcaatgagacttgtcctccggacacctttgggaagaactgcagcttctcctgcagctgtcagaatggtgggacctgcgactctgtcacgggggcctgccgctgccccccgggtgtcagtggaactaactgtgaggatggctgccccaagggctactatggcaagcactgtcgcaagaaatgcaactgtgccaaccggggccggtgccaccgcctctacggggcctgcctctgcgacccagggctctacggccgcttctgccacctcacctgcccgccgtgggcctttgggccgggctgctcggaggagtgccagtgtgtgcagccccacacgcagtcctgtgacaagagggatggcagctgctcctgcaaggctggcttccggggcgagcgctgtcaggcagagtgtgagctgggctactttgggccggggtgctggcaggcatgcacctgcccagtgggcgtggcctgtgactccgtgagcggcgagtgtgggaagcggtgtcctgctggcttccagggagaggactgtggccaagagtgcccggtggggacgtttggcgtgaactgctcgagctcctgctcctgtgggggggccccctgccacggggtcacggggcagtgccggtgtccgccggggaggactggggaagactgtgaggcagattgtcccgagggccgctgggggctgggctgccaggagatctgcccagcatgccagcacgctgcccgctgcgaccctgagaccggagcctgcctgtgcctccctggcttcgtcggcagccgctgccaggacgtgtgcccagcaggctggtatggtcccagctgccagacaaggtgctcttgtgccaatgatgggcactgccacccagccaccggacactgcagctgtgcccccgggtggaccggctttagctgccagagagcctgtgatactgggcactggggacctgactgcagccacccctgcaactgcagcgctggccacgggagctgtgatgccatcagcggcctgtgtctgtgtgaggctggctacgtgggcccgcggtgcgagcagcagtgtccccagggccactttgggcccggctgtgagcagcggtgccagtgtcagcatggagcagcctgtgaccacgtcagcggggcctgcacctgcccggccggctggaggggcaccttctgcgagcatgcctgcccggccggcttctttggattggactgtcgcagtgcctgcaactgcaccgccggagctgcctgtgatgccgtgaatggctcctgcctctgccccgctggccgccggggcccccgctgtgccgagacctgcccagcccacacctacgggcacaattgcagccaggcctgtgcctgctttaacggggcctcctgtgaccctgtccacgggcagtgccactgtgcccctggctggatggggccctcctgcctgcaggcctgccctgccggcctgtacggcgacaactgtcggcattcctgcctctgccagaacggagggacctgtgaccctgtctcaggccactgtgcgtgcccagagggctgggccggcctggcctgtgagaaggagtgcctcccccgggacgtcagagctggctgccggcacagcggcggttgcctcaacgggggcctgtgtgacccgcacacgggccgctgcctctgcccagccggctggactggggacaagtgtcagagcccctgcctgcggggctggtttggagaggcctgtgcccagcgctgcagctgcccgcctggcgctgcctgccaccacgtcactggggcctgccgctgtccccctggcttcactggctccggctgcgagcaggcctgcccacccggcagctttggggaggactgtgcgcagatgtgccagtgtcccggtgagaacccggcctgccaccctgccaccgggacctgctcatgtgctgctggctaccacggccccagctgccagcaacgatgtccgcccgggcggtatgggccaggctgtgaacagctgtgtgggtgtctcaacgggggctcctgtgatgcggccacgggggcctgccgctgccccactgggttcctcgggacggactgcaacctcacctgtccgcagggccgcttcggccccaactgcacccacgtgtgtgggtgtgggcagggggcggcctgcgaccctgtgaccggcacctgcctctgccccccggggagagccggcgtccgctgtgagcgaggctgcccccagaaccggtttggcgtgggctgcgagcacacctgctcctgcagaaatgggggcctgtgccacgccagcaacggcagctgctcctgtggcctgggctggacggggcggcactgcgagctggcctgtccccctgggcgctacggagccgcctgccatctggagtgctcctgccacaacaacagcacgtgtgagcctgccacgggcacctgccgctgcggccccggcttctatggccaggcctgcgagcacccctgtccccctggcttccacggggctggctgccaggggttgtgctggtgtcaacatggagccccctgcgaccccatcagtggccgatgcctctgccctgccggcttccacggccacttctgtgagagggggtgtgagccaggttcatttggagagggctgccaccagcgctgtgactgtgacgggggggcaccctgtgaccctgtcaccggtctctgcctttgcccaccagggcgctcaggagccacctgtaacctggattgcagaaggggccagtttgggcccagctgcaccctgcactgtgactgcgggggtggggctgactgcgaccctgtcagtgggcagtgtcactgtgtggatggctacatggggcccacgtgccgggaaggtgggcccctccggctccccgagaacccgtccttagcccagggctcagcgggcacactgcccgcctccagcagacccacatcccggagcggtggaccagcgaggcactagtagaggcagtcccgtggagcccgcctctccagtcccagccagaggggaccctggcctttggtgaccactgagaaggacacttcacgggcccagagctcctggtactgcccttcctttgagggccgtggagggctgtggacagcccagcaacctgtcgctcttggaggctggtgtggccttgaggagggaagcctcgcatggccgctggaagagaggcgcctcctggcctggctctgcagaacccaggggcacgctctgggcctgggctgaggaagtcccgctctccccgcggctctgagttggactgaggacaggtgtgggcgccagtgtgggtgcaggcgcaggtgcaggcacagggccactgtcctccaggcaggctttttggtgctaggccctgggactggaagtcgcccagcccgtatttatgtaaaggtatttatgggccactgcacatgcccgctgcagccctgggatcagctggaagctgcctgtcatctcctgcccaatccccagaaaccctgattcaggtctgcaggctcctgcgggctcaccaggctgctggctccggtaccatgtaaacctaggaaggtaaaggagcaggc

SEQ ID NO: 155868 - DNA, 4705 bp, Homo sapiens
  Payload ID: 10615
  Gene Symbol: MEGF6
  Gene Name: multiple EGF-like-domains 6
  ENST ID: ENST00000485002
  CDS Start-End: 10-3981
gcgcgcacgatgtcgttccttgaagaggcgagggcagcggggcgcgcggtggtcctggcgttggtgctgctgctgctccccgccgtgcccgtgggcgccagcgttccgccgcggcccctgctcccgctgcagcccggcatgccccacgtgtgtgctgagcaggagctgaccctggtgggccgccgccagccgtgcgtgcaggccttaagccacacggtgccggtgtggaaggccggctgtgggtggcaggcgtggtgcgtgggtcatgagcggagaaccgtctactacatgggctacaggcaggtgtataccacggaggcccggaccgtgctcaggtgctgccgagggtggatgcagcagcccgacgaggagggctgcctctcggatgtgggtgagtgtgccaacgccaacgggggctgtgcgggtcggtgccgggacaccgtggggggcttctactgccgctggcccccccccagccaccagctgcagggtgatggcgagacttgccaagatgtggacgaatgccgaacccacaacggtggctgccagcaccggtgcgtgaacaccccaggctcctacctctgtgagtgcaagcccggcttccggctccacactgacagcaggacctgcctggccattaactcctgcgccctgggcaatggcggctgccagcaccactgtgtccagctcacaatcactcggcatcgctgccagtgccggcccgggttccagctccaggaggacggcaggcattgtgtccgtagaagcccgtgtgccaacaggaacggcagctgcatgcacaggtgccaggtggtccggggcctcgcccgctgtgagtgccacgtgggctatcagctagcagcggacggcaaggcctgtgaagatgtggacgaatgtgccgcagggctggcccagtgtgcccatggctgcctcaacacccaggggtccttcaagtgcgtgtgtcacgcgggctatgagctgggcgccgatggccggcagtgctaccggattgagatggaaatcgtgaacagctgtgaggccaacaacggcggctgctcccatggctgcagccacaccagtgctgggcccctgtgcacatgtccccgcggctacgagctggacacagatcagaggacctgcatcgatgtcgacgactgtgcagacagcccgtgctgccagcaggtgtgcaccaacaaccctggcgggtacgagtgcggctgctacgccggctaccggctcagtgccgatggctgcggctgtgaggatgtggatgagtgcgcctccagccgtggcggctgcgagcaccactgcaccaacctggccggctccttccagtgctcctgcgaggccggctaccggctgcacgaggaccgtaggggctgcagccccctggaggagccgatggtggacctggacggcgagctgcctttcgtgcggcccctgccccacattgccgtgctccaggacgagctgccgcaactcttccaggatgacgacgtcggggccgatgaggaagaggcagagttgcggggcgaacacacgctcacagagaagtttgtctgcctggatgactcctttggccatgactgcagcttgacctgtgatgactgcaggaacggagggacctgcctcctgggcctggatggctgtgattgccccgagggctggactgggctcatctgcaatgagacttgtcctccggacacctttgggaagaactgcagcttctcctgcagctgtcagaatggtgggacctgcgactctgtcacgggggcctgccgctgccccccgggtgtcagtggaactaactgtgaggatggctgccccaagggctactatggcaagcactgtcgcaagaaatgcaactgtgccaaccggggccggtgccaccgcctctacggggcctgcctctgcgacccagggctctacggccgcttctgccacctcacctgcccgccgtgggcctttgggccgggctgctcggaggagtgccagtgtgtgcagccccacacgcagtcctgtgacaagagggatggcagctgctcctgcaaggctggcttccggggcgagcgctgtcaggcagagtgtgagctgggctactttgggccggggtgctggcaggcatgcacctgcccagtgggcgtggcctgtgactccgtgagcggcgagtgtgggaagcggtgtcctgctggcttccagggagaggactgtggccaagagtgcccggtggggacgtttggcgtgaactgctcgagctcctgctcctgtgggggggccccctgccacggggtcacggggcagtgccggtgtccgccggggaggactggggaagactgtgaggcagattgtcccgagggccgctgggggctgggctgccaggagatctgcccagcatgccagcacgctgcccgctgcgaccctgagaccggagcctgcctgtgcctccctggcttcgtcggcagccgctgccaggacgtgtgcccagcaggctggtatggtcccagctgccagacaaggtgctcttgtgccaatgatgggcactgccacccagccaccggacactgcagctgtgcccccgggtggaccggctttagctgccagagagcctgtgatactgggcactggggacctgactgcagccacccctgcaactgcagcgctggccacgggagctgtgatgccatcagcggcctgtgtctgtgtgaggctggctacgtgggcccgcggtgcgagcagcagtgtccccagggccactttgggcccggctgtgagcagcggtgccagtgtcagcatggagcagcctgtgaccacgtcagcggggcctgcacctgcccggccggctggaggggcaccttctgcgagcatgcctgcccggccggcttctttggattggactgtcgcagtgcctgcaactgcaccgccggagctgcctgtgatgccgtgaatggctcctgcctctgccccgctggccgccggggcccccgctgtgccgagacctgcccagcccacacctacgggcacaattgcagccaggcctgtgcctgctttaacggggcctcctgtgaccctgtccacgggcagtgccactgtgcccctggctggatggggccctcctgcctgcaggcctgccctgccggcctgtacggcgacaactgtcggcattcctgcctctgccagaacggagggacctgtgaccctgtctcaggccactgtgcgtgcccagagggctgggccggcctggcctgtgagaaggagtgcctcccccgggacgtcagagctggctgccggcacagcggcggttgcctcaacgggggcctgtgtgacccgcacacgggccgctgcctctgcccagccggctggactggggacaagtgtcagagcccctgtgccaagggcacattcgggcctcactgtgaggggcgctgtgcctgccggtggggaggcccctgccaccttgccaccggggcctgcctctgccctccggggtggcggggggctccaggtgtgagaatgcctgcctgcggggctggtttggagaggcctgtgcccagcgctgcagctgcccgcctggcgctgcctgccaccacgtcactggggcctgccgctgtccccctggcttcactggctccggctgcgagcaggcctgcccacccggcagctttggggaggactgtgcgcagatgtgccagtgtcccggtgagaacccggcctgccaccctgccaccgggacctgctcatgtgctgctggctaccacggccccagctgccagcaacgatgtccgcccgggcggtatgggccaggctgtgaacagctgtgtgggtgtctcaacgggggctcctgtgatgcggccacgggggcctgccgctgccccactgggttcctcgggacggactgcaacctcacctgtccgcagggccgcttcggccccaactgcacccacgtgtgtgggtgtgggcagggggcggcctgcgaccctgtgaccggcacctgcctctgccccccggggagagccggcgtccgctgtgagcgaggctgcccccagaaccggtttggcgtgggctgcgagcacacctgctcctgcagaaatgggggcctgtgccacgccagcaacggcagctgctcctgtggcctgggctggacggggcggcactgcgagctggcctgtccccctgggcgctacggagccgcctgccatctggagtgctcctgccacaacaacagcacgtgtgagcctgccacgggcacctgccgctgcggccccggcttctatggccaggcctgcgagcacccctgtccccctggcttccacggggctggctgccaggggttgtgctggtgtcaacatggagccccctgcgaccccatcagtggccgatgcctctgccctgccggcttccacggccacttctgtgagagggggtgtgagccaggttcatttggagagggctgccaccagcgctgtgactgtgacgggggggcaccctgtgaccctgtcaccggtctctgcctttgcccaccagggcgctcaggagccacctgtaacctggattgcagaaggggccagtttgggcccagctgcaccctgcactgtgactgcgggggtggggctgactgcgaccctgtcagtgggcagtgtcactgtgtggatggctacatggggcccacgtgccgggaagcgggcacactgcccgcctccagcagacc

SEQ ID NO: 155869 - DNA, 743 bp, Homo sapiens
  Payload ID: 10615
  Gene Symbol: MEGF6
  Gene Name: multiple EGF-like-domains 6
  ENST ID: ENST00000491842
  CDS Start-End: 1-743
gtgatgcggccacgggggcctgccgctgccccactgggttcctcgggacggactgcaacctcacctgtccgcagggccgcttcggccccaactgcacccacgtgtgtgggtgtgggcagggggcggcctgcgaccctgtgaccggcacctgcctctgccccccggggagagccggcgtccgctgtgagcgaggctgcccccagaaccggtttggcgtgggctgcgagcacacctgctcctgcagaaatgggggcctgtgccacgccagcaacggcagctgctcctgtggcctgggctggacggggcggcactgcgagctggcctgtccccctgggcgctacggagccgcctgccatctggagtgctcctgccacaacaacagcacgtgtgagcctgccacgggcacctgccgctgcggccccggcttctatggccaggcctgcgagcacccctgtccccctggcttccacggggctggctgccaggggttgtgctggtgtcaacatggagccccctgcgaccccatcagtggccgatgcctctgccctgccggcttccacggccacttctgtgagagggattgcagaaggggccagtttgggcccagctgcaccctgcactgtgactgcgggggtggggctgactgcgaccctgtcagtgggcagtgtcactgtgtggatggctacatggggcccacgtgccgggaaggtgggcccctccggctccccgagaacccgtcctta

SEQ ID NO: 155870 - DNA, 9549 bp, Homo sapiens
  Payload ID: 10616
  Gene Symbol: MEGF8
  Gene Name: multiple EGF-like-domains 8
  Uniprot ID: Q7Z7M0
  ENST ID: ENST00000251268
  CDS Start-End: 1-8538
atggccctgggcaaggttctggccatggcactggttttggccttggccgtgctggggtcgctgtcccctggggcccgggcgggggactgcaaggggcagcggcaggtgctgcgggaggcgccaggcttcgtgacggatggtgcgggcaactacagcgtcaatggcaactgcgagtggctcatcgaggccccaagcccccagcaccggatcctgctggacttccttttcctggacacagagtgcacgtatgactacctgttcgtgtatgacggtgactccccgcgagggccgctgcttgccagtctaagtgggagcacccgacctccgcccatcgaagcttcctcaggcaagatgctgctgcacctcttcagtgatgccaactacaacctgctgggctttaacgcctcattccgcttctccctgtgcccgggtggctgccagagccacgggcagtgccagccaccgggtgtgtgtgcctgcgagccgggctgggggggtcctgactgtggcctgcaggagtgctcagcctactgtggcagccacggcacctgcgcctcgcccctgggaccatgccgctgtgagcctggcttcttgggacgtgcctgtgacctgcacctgtgggagaaccagggggctgggtggtggcacaacgtgagtgccagggaccctgccttctctgcccgtattggggcagctggcgccttcctgtccccaccagggctgctggcagttttcggaggccaggacctcaacaatgccctgggtgacctcgtcctatacaacttctccgccaacacctgggagtcttgggacctgagtcctgccccggctgcccgtcactcccatgtggccgtggcctgggccggctccctggtactgatgggtggtgagctggctgacggctcgctcaccaacgacgtgtgggccttcagtccactgggcaggggccactgggagctcctggcaccacctgcctccagctcctcggggcccccaggcctggcaggtcacgcggctgccctggtggatgatgtctggctatatgtgtctggaggccgcaccccgcacgacctcttctcctctggcctcttccgtttccgccttgacagcaccagcgggggctattgggagcaggtgattccggcaggcggacggccccctgctgccactggccactccatggtgttccatgccccctcccgtgccctgctggtccatggtggacaccggccctccactgcccggttctctgtgcgagtgaactccactgagcttttccacgtggatcggcatgtgtggacgacgctgaaggggcgggatgggcttcagggcccaagggagcgagccttccacacagccagtgttctgggcaattacatggtggtctatgggggcaatgtgcacacccattaccaggaggaaaagtgctacgaagatggcatcttcttctaccaccttggctgccatcaatgggtgtcaggagctgagcttgccccgccaggaacccctgagggccgagcagcgcctcccagtggtcggtactcacatgtagctgcggtgcttggtggcagcgtcctgttggtggctggggggtacagcggccggccccgtggggacttgatggcgtacaaggtgcccccctttgtgttccaggcacctgcccctgactaccacttggactactgctccatgtacacagaccacagcgtctgctcccgggacccggaatgcagttggtgccaaggagcctgccaagctgcaccccctcctgggacccccttgggggcttgtccagccgccagctgcctgggcctgggccgcctcctgggtgactgccaggcctgcctggccttcagcagccccacagcccctccacggggacctggcaccctgggctggtgcgtgcacaatgagagctgcctccctaggcctgagcaggcccgctgccgaggggagcagatctcaggcactgtgggctggtgggggcctgcgcctgtcttcgtcacgtccctggaggcctgcgtcacccagagcttcctgcctggcctgcacttgctcacctttcagcagccgcccaatacctcccagcctgacaaggtctcaattgtccgcagcacgaccatcaccctaacacccagcgcagagacagatgtgtccctggtctaccgtggcttcatctacccaatgctgcctggagggccaggtggaccaggggctgaggacgtggccgtgtggacgcgggcccagcgcctacacgtcctggcccggatggcccgtggccctgacacggagaacatggaggaggtggggcgctgggtggctcatcaggagaaggagacgcggcggctgcagcgccctgggtctgctcgcctcttccctctgcctgggcgggaccacaagtatgcagtagagatccagggccagctcaatggctcggcaggccctgggcacagcgagctaactctgctgtgggatcggactggtgtgccaggaggcagcgagatctccttcttcttcctggagccctaccgctcgtcgtcctgcacctcctattcttcctgcctgggctgcttggcagaccagggctgtggctggtgcctgaccagtgccacctgccacctgcgccagggcggagcccattgcggggatgacggggctggtgggtccctgctggtgctggtgcctaccctctgcccactctgcgaggagcatcgggactgccacgcctgcacccaggaccccttctgtgagtggcatcagagcaccagccgcaaaggggacgcggcatgcagccggcggggccggggtcggggtgccctgaagagtccagaggagtgtcccccgctctgcagccagcgactgacctgtgaggactgcctggccaactctagccagtgcgcctggtgccagtccacccacacctgcttcctgtttgctgcctacttggcccggtacccacacgggggctgtcgaggctgggacgacagtgtacactcggagccacggtgccggagctgcgatggcttcctgacctgccatgagtgtctgcagagccacgagtgtggctggtgtggcaatgaggacaaccccacactgggacggtgcctacagggggacttctcagggcccctcggtgggggtaactgctccctgtgggtgggggagggcctggggcttcccgtggccctccctgcccgctgggcatacgcccgctgtcctgacgtggatgagtgtcgcctgggcctggcccggtgccacccgcgggcgacctgcctgaacacgcccctcagctacgagtgtcactgccagcggggctaccagggtgatggcatctcacactgcaaccgcacgtgcttggaggactgtggccatggtgtgtgcagtggccccccggactttacctgcgtgtgtgacctaggctggacatcagacctgccccctcccacacccgccccgggtccgccagccccccgctgctcccgggactgtggctgcagcttccacagccactgccgcaagcggggccctggcttctgcgacgagtgccaggactggacatggggggagcactgcgaacgatgccggcccggcagcttcggcaacgccacaggctctaggggctgccggccctgccagtgcaacgggcacggggacccacgccgtggccactgcgacaacctcagtgggctctgcttctgccaggaccacaccgagggtgcccactgccagctctgctccccaggctattatggggatccccgggccggtggttcctgctttcgggagtgtgggggtcgcgccctcctcaccaacgtgtcctcagtggcactgggctcacgccgggtcggggggctgctgcctccaggtggcggggctgcaagagccgggcctggcctgtcctactgtgtgtgggttgtctcggccactgaggagctacagccctgtgctcccgggaccctctgtcccccactcaccctcaccttctcccccgacagcagcaccccctgcacgctgagctacgtcctggcgtttgatggattcccacgcttcctggacactggtgttgtccagtcggaccgcagcctcatagctgccttctgcggccagcgacgggacaggcccctcactgttcaggccctgtctgggctgctcgtgctgcactgggaggccaatggctcctcatcctggggcttcaatgcttcggtgggctctgcccgctgtgggtcagggggccccgggagctgtcccgtcccccaggaatgcgtgccccaggacggtgctgcaggtgcggggctctgccgatgtcctcagggctgggctggcccacactgccgcatggctctgtgtcctgagaactgcaatgcccacactggggcaggaacttgtaaccagagcctgggtgtgtgcatctgtgccgagggcttcgggggccccgactgcgccaccaagctggatggcgggcagctggtctgggagaccctcatggacagccgcctctcagccgacactgccagccgcttcctgcaccgcctgggccacaccatggtggatggacccgatgccaccttgtggatgtttgggggcctgggcctgccccaggggctgctgggaaacctgtacaggtactcagtgagtgagcggcggtggacacagatgctggcgggagccgaggacgggggcccaggcccatcgccccgctccttccatgcagccgcatatgtgcccgctggccgtggtgccatgtatctgctggggggacttaccgctggaggcgtcacccgtgatttctgggtcctcaacctcaccaccctgcaatggcggcaggagaaggccccccagaccgtggagctgccagccgttgctggtcacacccttactgcccgccgaggcctgtctctgctcctggtgggcggttactccccggaaaatggcttcaaccagcagctgctggagtaccagctggcaaccggcacctgggtgtcaggagcccagagtgggacaccccccacaggtctctatggtcactctgctgtctaccacgaggccaccgactccctctacgtgtttggggggttccgattccatgtggagctggcggccccatcccccgagctctactccctgcactgtcctgaccgcacctggagtctgctggccccttctcagggggcaaagcgagatcgtatgaggaatgtgcgtggctcatctcggggtctgggccaagttcctggggagcagcctgggtcatgggggttccgggaagtcaggaagaagatggctctgtgggctgctcttgctggtacaggaggtttcctggaggaaatctcacctcacctgaaggagccccgcccccggcttttccacgcctcagccctgttaggggacaccatggtggttcttggggggcgctcggaccctgacgagttcagcagcgacgttctgctctaccaggtcaactgcaatgcctggcttctgcccgacctcacccgctcggcctctgtggggcccccaatggaggagtctgtggcccatgctgtggcagcagtcgggagccgcctgtatatctctgggggtttcgggggagtggccctgggccgcctgctggcactgaccctgccccctgacccctgccgcctgctgtcctcacctgaagcttgtaaccagtctggggcctgcacctggtgccatggggcctgcttgtccggggatcaggcccacaggctgggctgcgggggctccccctgctccccaatgcctcgctccccggaggaatgtcgacgtctccggacctgcagtgagtgcctggcccgccatcctcggaccctgcaacctggagatggagaggcgtccaccccccgctgtaagtggtgtaccaactgccccgaaggtgcttgcattggacgcaatgggtcctgcacctctgagaatgactgtcggatcaaccagcgagaggtcttctgggcagggaactgctccgaggctgcgtgcggggctgctgactgcgagcagtgcacgcgggagggcaagtgcatgtggacgcggcagttcaagaggacaggggagacccgccgcatcctctccgtgcagcccacctatgactggacgtgcttcagccactctctgctgaatgtgtcccccatgccggtggaatcatcacccccactgccctgccccaccccttgtcacctcctacccaactgtacctcctgcctggactctaagggagcagatgggggctggcagcactgtgtttggagcagcagcctgcagcagtgtctgagcccttcctacctgcccctgcgatgtatggccggaggctgtgggcggctgctccggggacctgagagctgctccctgggctgtgctcaggcaactcagtgcgccttgtgcctgcggcgcccccattgcggctggtgtgcctgggggggccaggatgggggtggccgctgcatggagggtggactcagcggcccccgtgatgggctgacatgtgggcgtccgggggcctcctgggccttcctgtcctgcccccctgaggacgagtgtgcaaacgggcaccacgactgcaacgagacgcagaattgccacgaccagccccacggctatgagtgcagctgcaagaccggctataccatggacaacatgacagggctgtgccgccctgtgtgcgcccagggctgcgtgaacggctcatgtgtggagcccgaccactgccgctgccactttggctttgtgggccgcaactgctccacggaatgccgctgcaaccgccacagtgaatgcgctggtgttggggcgcgtgaccactgcttgctctgccgcaaccacaccaagggcagccactgtgagcagtgcctcccgctgtttgtgggttcagctgtcggaggcgggacctgccggccctgccacgccttttgtcgtggaaatagccacatctgcatctccaggaaggagttacaaatgtccaagggagagccaaagaagtactcactggacccagaggagattgaaaactgggtgacagagggtcctagtgaagacgaggccgtgtgcgtgaactgccagaataacagctatggggagaaatgcgagagctgcctgcagggctacttcctcctggacgggaagtgcaccaaatgccagtgtaatggccacgcggacacatgtaacgagcaggatgggacgggctgtccatgtcagaataacacagagacgggcacatgccagggcagctcccccagtgaccgtcgagactgctacaagtaccagtgcgccaagtgccgggaatcatttcacgggagtccgctgggcggccagcagtgctaccgcctcatctcggtggagcaggagtgctgcctggaccccacgtcccagaccaactgcttccatgagcccaaacgccgggcgctaggccccggccgcactgtcctctttggcgtgcagcccaaattcaccaacgtggacatccgcctgacgctggacgtgaccttcggggccgtggacctctatgtctccacctcctatgacaccttcgtggtccgtgtggcccctgacactggcgtccatactgtacacatccagccacccccagccccaccacctccaccaccccctgcagatggtgggccccggggggctggggatccaggaggagcaggggccagcagtgggccgggcgccccagcagagccacgggtacgggaggtatggccgcggggcctgattacctacgtgacggtgacggagccgtcggcagtgctggtggtccgcggcgtgcgggaccggctggtcatcacctacccacacgagcaccatgccctcaagtcgagccgcttctacctgctgctgctgggcgtgggagacccaagtgggcccggcgccaacggctcagccgactcgcagggcctgctcttcttccggcaggaccaggcccacattgacctgtttgtcttcttctccgtcttcttctcctgcttcttcctcttcctctcactctgtgtgctcctctggaaggccaagcaggctctggaccagcggcaggagcagcgccggcacttgcaggagatgaccaagatggccagccgccccttcgccaaggtcaccgtctgcttcccacctgaccctactgccccggcctccgcctggaagccggctgggctcccacctcccgccttccgccgctctgagcccttcctggcacccctgctgctgacaggggccggtgggccctggggacccatgggagggggctgctgcccaccagccatccccgccaccactgctgggctgcgagctgggcccatcactctcgagcccacagaagatggcatggctggcgtggccacactgctgctccagctgcctggcgggccccatgcacccaacggcgcctgcctggggtcagccctcgtcacactgcggcacaggctgcacgagtactgtgggggtggtgggggtgctgggggcagtgggcatgggactggtgcgggccggaagggactgttgagccaggacaacctcaccagcatgtccctctgacatgcccagggttctcatccacagcagctgggtcacctgatagggccgccctggacttggggtccctccacctgggggcccctggacactgtctacttggagaccactggcccccttcccccagggttgcccagatggggcctcctttgttctgcattcagcagctatttatcgagtacctactctgtcaggcactgtcataggcgtggggcaaagcaggaaccaagagacgaggttccctgatctcatgggacttaggttctggtgaagggagacaatcagtgcacatgcacacaccccacacgcatacacacatgaacacatgcacatgtgcacacacaagtaagatggcttcagagagggagaagcactgtgaggcctccagaggatgtggcagtgagggacgatggggtgaagtcagctgggcattcaaagaagctagactgagaacgcctgagaagaaccagctacgggaagagctttgggaagcaaaggcagaggccctggggtgggagcaggcttgttttattggaaggaccagaaaactggtaagtgtgacccagatcaagtgtgaggagatgaggctggggatagtcaggggctggatcacccagggccttgtgggccccacatagggttttgggttttattctcagggcaatgggaagctgttggatggtttgatgaaggggagtgacaggatccgatgtacctatttaagaatttaagagggtcgggtgcggtggctcatgcctataatcctagcactttgagaggccaaggtgggctgatcacaaggtcaagagttcgtgaccagcctggccaatatggtgaaaccccatgtctactaaaaatacaaaaattagctgggcatggtggcacacacttgtagtccgagctactcgggaggctgaggcagaagaatcgcttgaacccaggaggcggaggttgcagtgagctcagattgcgtcactgcactccaacctgggtgacagagcgagactccacctc

SEQ ID NO: 155871 - DNA, 10966 bp, Homo sapiens
  Payload ID: 10616
  Gene Symbol: MEGF8
  Gene Name: multiple EGF-like-domains 8
  Uniprot ID: Q7Z7M0
  ENST ID: ENST00000334370
  CDS Start-End: 636-8972
ggccgctctggcccaagcgtcccctcgtctctctgatctggcccatccggcttcggagggaggcgagggtgggtgagcaaagggattgggtctgtggggtccaggcccgaacccctgaagacgggctccgcccccggcacccgctcgcgccccgcccccggctggaggagtctctcctggaccatccgaacctagcctgtcccggcccgcagcctctatggaggctcctgccgggccgtagagcccttcgccccctggggacccacccgtctataaggtccgtttggcctgcagcagcctgagtccgtaatgctgggcactgttcatgggatcggccccctatggagccctgtgtctataggggactcctacggtccctagggttcggccccgtccataatgactccatatacagggccttccatcgctctatagggctcagccctcggcttccagagcctgtcagcagtggccgtacccttcgccgggactgccgggtctccgggacctcttcgatctacaaggtcatgttatgcctatagaggtcgcatttgcagggcctcaccccgggtagagggtcctctccaggtttttacggcctgtccccgctctaagggtcagtgcaggaggcggcgatggccctgggcaaggttctggccatggcactggttttggccttggccgtgctggggtcgctgtcccctggggcccgggcgggggactgcaaggggcagcggcaggtgctgcgggaggcgccaggcttcgtgacggatggtgcgggcaactacagcgtcaatggcaactgcgagtggctcatcgaggccccaagcccccagcaccggatcctgctggacttccttttcctggacacagagtgcacgtatgactacctgttcgtgtatgacggtgactccccgcgagggccgctgcttgccagtctaagtgggagcacccgacctccgcccatcgaagcttcctcaggcaagatgctgctgcacctcttcagtgatgccaactacaacctgctgggctttaacgcctcattccgcttctccctgtgcccgggtggctgccagagccacgggcagtgccagccaccgggtgtgtgtgcctgcgagccgggctgggggggtcctgactgtggcctgcaggagtgctcagcctactgtggcagccacggcacctgcgcctcgcccctgggaccatgccgctgtgagcctggcttcttgggacgtgcctgtgacctgcacctgtgggagaaccagggggctgggtggtggcacaacgtgagtgccagggaccctgccttctctgcccgtattggggcagctggcgccttcctgtccccaccagggctgctggcagttttcggaggccaggacctcaacaatgccctgggtgacctcgtcctatacaacttctccgccaacacctgggagtcttgggacctgagtcctgccccggctgcccgtcactcccatgtggccgtggcctgggccggctccctggtactgatgggtggtgagctggctgacggctcgctcaccaacgacgtgtgggccttcagtccactgggcaggggccactgggagctcctggcaccacctgcctccagctcctcggggcccccaggcctggcaggtcacgcggctgccctggtggatgatgtctggctatatgtgtctggaggccgcaccccgcacgacctcttctcctctggcctcttccgtttccgccttgacagcaccagcgggggctattgggagcaggtgattccggcaggcggacggccccctgctgccactggccactccatggtgttccatgccccctcccgtgccctgctggtccatggtggacaccggccctccactgcccggttctctgtgcgagtgaactccactgagcttttccacgtggatcggcatgtgtggacgacgctgaaggggcgggatgggcttcagggcccaagggagcgagccttccacacagccagtgttctgggcaattacatggtggtctatgggggcaatgtgcacacccattaccaggaggaaaagtgctacgaagatggcatcttcttctaccaccttggctgccatcaatgggtgtcaggagctgagcttgccccgccaggaacccctgagggccgagcagcgcctcccagtggtcggtactcacatgtagctgcggtgcttggtggcagcgtcctgttggtggctggggggtacagcggccggccccgtggggacttgatggcgtacaaggtgcccccctttgtgttccaggcacctgcccctgactaccacttggactactgctccatgtacacagaccacagcgtctgctcccgggacccggaatgcagttggtgccaaggagcctgccaagctgcaccccctcctgggacccccttgggggcttgtccagccgccagctgcctgggcctgggccgcctcctgggtgactgccaggcctgcctggccttcagcagccccacagcccctccacggggacctggcaccctgggctggtgcgtgcacaatgagagctgcctccctaggcctgagcaggcccgctgccgaggggagcagatctcaggcactgtgggctggtgggggcctgcgcctgtcttcgtcacgtccctggaggcctgcgtcacccagagcttcctgcctggcctgcacttgctcacctttcagcagccgcccaatacctcccagcctgacaaggaggaggtggggcgctgggtggctcatcaggagaaggagacgcggcggctgcagcgccctgggtctgctcgcctcttccctctgcctgggcgggaccacaagtatgcagtagagatccagggccagctcaatggctcggcaggccctgggcacagcgagctaactctgctgtgggatcggactggtgtgccaggaggcagcgagatctccttcttcttcctggagccctaccgctcgtcgtcctgcacctcctattcttcctgcctgggctgcttggcagaccagggctgtggctggtgcctgaccagtgccacctgccacctgcgccagggcggagcccattgcggggatgacggggctggtgggtccctgctggtgctggtgcctaccctctgcccactctgcgaggagcatcgggactgccacgcctgcacccaggaccccttctgtgagtggcatcagagcaccagccgcaaaggggacgcggcatgcagccggcggggccggggtcggggtgccctgaagagtccagaggagtgtcccccgctctgcagccagcgactgacctgtgaggactgcctggccaactctagccagtgcgcctggtgccagtccacccacacctgcttcctgtttgctgcctacttggcccggtacccacacgggggctgtcgaggctgggacgacagtgtacactcggagccacggtgccggagctgcgatggcttcctgacctgccatgagtgtctgcagagccacgagtgtggctggtgtggcaatgaggacaaccccacactgggacggtgcctacagggggacttctcagggcccctcggtgggggtaactgctccctgtgggtgggggagggcctggggcttcccgtggccctccctgcccgctgggcatacgcccgctgtcctgacgtggatgagtgtcgcctgggcctggcccggtgccacccgcgggcgacctgcctgaacacgcccctcagctacgagtgtcactgccagcggggctaccagggtgatggcatctcacactgcaaccgcacgtgcttggaggactgtggccatggtgtgtgcagtggccccccggactttacctgcgtgtgtgacctaggctggacatcagacctgccccctcccacacccgccccgggtccgccagccccccgctgctcccgggactgtggctgcagcttccacagccactgccgcaagcggggccctggcttctgcgacgagtgccaggactggacatggggggagcactgcgaacgatgccggcccggcagcttcggcaacgccacaggctctaggggctgccggccctgccagtgcaacgggcacggggacccacgccgtggccactgcgacaacctcagtgggctctgcttctgccaggaccacaccgagggtgcccactgccagctctgctccccaggctattatggggatccccgggccggtggttcctgctttcgggagtgtgggggtcgcgccctcctcaccaacgtgtcctcagtggcactgggctcacgccgggtcggggggctgctgcctccaggtggcggggctgcaagagccgggcctggcctgtcctactgtgtgtgggttgtctcggccactgaggagctacagccctgtgctcccgggaccctctgtcccccactcaccctcaccttctcccccgacagcagcaccccctgcacgctgagctacgtcctggcgtttgatggattcccacgcttcctggacactggtgttgtccagtcggaccgcagcctcatagctgccttctgcggccagcgacgggacaggcccctcactgttcaggccctgtctgggctgctcgtgctgcactgggaggccaatggctcctcatcctggggcttcaatgcttcggtgggctctgcccgctgtgggtcagggggccccgggagctgtcccgtcccccaggaatgcgtgccccaggacggtgctgcaggtgcggggctctgccgatgtcctcagggctgggctggcccacactgccgcatggctctgtgtcctgagaactgcaatgcccacactggggcaggaacttgtaaccagagcctgggtgtgtgcatctgtgccgagggcttcgggggccccgactgcgccaccaagctggatggcgggcagctggtctgggagaccctcatggacagccgcctctcagccgacactgccagccgcttcctgcaccgcctgggccacaccatggtggatggacccgatgccaccttgtggatgtttgggggcctgggcctgccccaggggctgctgggaaacctgtacaggtactcagtgagtgagcggcggtggacacagatgctggcgggagccgaggacgggggcccaggcccatcgccccgctccttccatgcagccgcatatgtgcccgctggccgtggtgccatgtatctgctggggggacttaccgctggaggcgtcacccgtgatttctgggtcctcaacctcaccaccctgcaatggcggcaggagaaggccccccagaccgtggagctgccagccgttgctggtcacacccttactgcccgccgaggcctgtctctgctcctggtgggcggttactccccggaaaatggcttcaaccagcagctgctggagtaccagctggcaaccggcacctgggtgtcaggagcccagagtgggacaccccccacaggtctctatggtcactctgctgtctaccacgaggccaccgactccctctacgtgtttggggggttccgattccatgtggagctggcggccccatcccccgagctctactccctgcactgtcctgaccgcacctggagtctgctggccccttctcagggggcaaagcgagatcgtatgaggaatgtgcgtggctcatctcggggtctgggccaagttcctggggagcagcctgggtcatgggggttccgggaagtcaggaagaagatggctctgtgggctgctcttgctggtacaggaggtttcctggaggaaatctcacctcacctgaaggagccccgcccccggcttttccacgcctcagccctgttaggggacaccatggtggttcttggggggcgctcggaccctgacgagttcagcagcgacgttctgctctaccaggtcaactgcaatgcctggcttctgcccgacctcacccgctcggcctctgtggggcccccaatggaggagtctgtggcccatgctgtggcagcagtcgggagccgcctgtatatctctgggggtttcgggggagtggccctgggccgcctgctggcactgaccctgccccctgacccctgccgcctgctgtcctcacctgaagcttgtaaccagtctggggcctgcacctggtgccatggggcctgcttgtccggggatcaggcccacaggctgggctgcgggggctccccctgctccccaatgcctcgctccccggaggaatgtcgacgtctccggacctgcagtgagtgcctggcccgccatcctcggaccctgcaacctggagatggagaggcgtccaccccccgctgtaagtggtgtaccaactgccccgaaggtgcttgcattggacgcaatgggtcctgcacctctgagaatgactgtcggatcaaccagcgagaggtcttctgggcagggaactgctccgaggctgcgtgcggggctgctgactgcgagcagtgcacgcgggagggcaagtgcatgtggacgcggcagttcaagaggacaggggagacccgccgcatcctctccgtgcagcccacctatgactggacgtgcttcagccactctctgctgaatgtgtcccccatgccggtggaatcatcacccccactgccctgccccaccccttgtcacctcctacccaactgtacctcctgcctggactctaagggagcagatgggggctggcagcactgtgtttggagcagcagcctgcagcagtgtctgagcccttcctacctgcccctgcgatgtatggccggaggctgtgggcggctgctccggggacctgagagctgctccctgggctgtgctcaggcaactcagtgcgccttgtgcctgcggcgcccccattgcggctggtgtgcctgggggggccaggatgggggtggccgctgcatggagggtggactcagcggcccccgtgatgggctgacatgtgggcgtccgggggcctcctgggccttcctgtcctgcccccctgaggacgagtgtgcaaacgggcaccacgactgcaacgagacgcagaattgccacgaccagccccacggctatgagtgcagctgcaagaccggctataccatggacaacatgacagggctgtgccgccctgtgtgcgcccagggctgcgtgaacggctcatgtgtggagcccgaccactgccgctgccactttggctttgtgggccgcaactgctccacggaatgccgctgcaaccgccacagtgaatgcgctggtgttggggcgcgtgaccactgcttgctctgccgcaaccacaccaagggcagccactgtgagcagtgcctcccgctgtttgtgggttcagctgtcggaggcgggacctgccggccctgccacgccttttgtcgtggaaatagccacatctgcatctccaggaaggagttacaaatgtccaagggagagccaaagaagtactcactggacccagaggagattgaaaactgggtgacagagggtcctagtgaagacgaggccgtgtgcgtgaactgccagaataacagctatggggagaaatgcgagagctgcctgcagggctacttcctcctggacgggaagtgcaccaaatgccagtgtaatggccacgcggacacatgtaacgagcaggatgggacgggctgtccatgtcagaataacacagagacgggcacatgccagggcagctcccccagtgaccgtcgagactgctacaagtaccagtgcgccaagtgccgggaatcatttcacgggagtccgctgggcggccagcagtgctaccgcctcatctcggtggagcaggagtgctgcctggaccccacgtcccagaccaactgcttccatgagcccaaacgccgggcgctaggccccggccgcactgtcctctttggcgtgcagcccaaattcaccaacgtggacatccgcctgacgctggacgtgaccttcggggccgtggacctctatgtctccacctcctatgacaccttcgtggtccgtgtggcccctgacactggcgtccatactgtacacatccagccacccccagccccaccacctccaccaccccctgcagatggtgggccccggggggctggggatccaggaggagcaggggccagcagtgggccgggcgccccagcagagccacgggtacgggaggtatggccgcggggcctgattacctacgtgacggtgacggagccgtcggcagtgctggtggtccgcggcgtgcgggaccggctggtcatcacctacccacacgagcaccatgccctcaagtcgagccgcttctacctgctgctgctgggcgtgggagacccaagtgggcccggcgccaacggctcagccgactcgcagggcctgctcttcttccggcaggaccaggcccacattgacctgtttgtcttcttctccgtcttcttctcctgcttcttcctcttcctctcactctgtgtgctcctctggaaggccaagcaggctctggaccagcggcaggagcagcgccggcacttgcaggagatgaccaagatggccagccgccccttcgccaaggtcaccgtctgcttcccacctgaccctactgccccggcctccgcctggaagccggctgggctcccacctcccgccttccgccgctctgagcccttcctggcacccctgctgctgacaggggccggtgggccctggggacccatgggagggggctgctgcccaccagccatccccgccaccactgctgggctgcgagctgggcccatcactctcgagcccacagaagatggcatggctggcgtggccacactgctgctccagctgcctggcgggccccatgcacccaacggcgcctgcctggggtcagccctcgtcacactgcggcacaggctgcacgagtactgtgggggtggtgggggtgctgggggcagtgggcatgggactggtgcgggccggaagggactgttgagccaggacaacctcaccagcatgtccctctgacatgcccagggttctcatccacagcagctgggtcacctgatagggccgccctggacttggggtccctccacctgggggcccctggacactgtctacttggagaccactggcccccttcccccagggttgcccagatggggcctcctttgttctgcattcagcagctatttatcgagtacctactctgtcaggcactgtcataggcgtggggcaaagcaggaaccaagagacgaggttccctgatctcatgggacttaggttctggtgaagggagacaatcagtgcacatgcacacaccccacacgcatacacacatgaacacatgcacatgtgcacacacaagtaagatggcttcagagagggagaagcactgtgaggcctccagaggatgtggcagtgagggacgatggggtgaagtcagctgggcattcaaagaagctagactgagaacgcctgagaagaaccagctacgggaagagctttgggaagcaaaggcagaggccctggggtgggagcaggcttgttttattggaaggaccagaaaactggtaagtgtgacccagatcaagtgtgaggagatgaggctggggatagtcaggggctggatcacccagggccttgtgggccccacatagggttttgggttttattctcagggcaatgggaagctgttggatggtttgatgaaggggagtgacaggatccgatgtacctatttaagaatttaagagggtcgggtgcggtggctcatgcctataatcctagcactttgagaggccaaggtgggctgatcacaaggtcaagagttcgtgaccagcctggccaatatggtgaaaccccatgtctactaaaaatacaaaaattagctgggcatggtggcacacacttgtagtccgagctactcgggaggctgaggcagaagaatcgcttgaacccaggaggcggaggttgcagtgagctcagattgcgtcactgcactccaacctgggtgacagagcgagactccacctcaaaaaaaaaaaaaaaatttaagaggtcactcagttgtgctgtggagaatggaccggagggacaagaggggcagcagggatggtgggctggagtagggtgctggcaatgagggagtctggctcagatgtgggatgtgtatggaagaatataaatgatggtgtggatgtcagggtgagggaggagacaaaaccacgatgacccctagctttgtggcctgaactgtgggtggctgaggggatcgttaattgaatggggcagactgaggcttgtgaggaagatcagagtctggttcttgacatgagatgcccttcagacatctcttcactcaggtccaactagggatacagaaacactgaatatttcaacagcagaaattgaatggggggattgatagcgctggcgagggaagcagctggaaagagacagatggcaccctgagacagcccagaggtgaataggacccccaggctgcagggataaagctcagtggtggtgttacctcaccggggaccagggtcacacagcaaagctggaacaacagaggcgtgttgtgggggagcctcagaggggacaaaacctctgcctgagatcccaccccaggtgggcatgggggccactgaggttggggatgaaaatgccggtaccgtcagtgcacagccctgttccagacagtgctgcctggaagatttctgggctctcctgaggcgccaccccgcacctgagccacctccttggactcctgtcctctaccccttgaggacctccctcccttctaccctagctgtcttcttgaacttgggactctcctttcccaagacttccatcactagctcctggagggactggactttgcatcttcccttcgcgtggagcctcagtgtgagaggccctagccaatgcgtgcatgtcagaggtggtggggaccacatcagaagaagaggggggtgatgaaattaacaaataaaaagtatggggaaaaccca

SEQ ID NO: 155872 - DNA, 11034 bp, Homo sapiens
  Payload ID: 10616
  Gene Symbol: MEGF8
  Gene Name: multiple EGF-like-domains 8
  ENST ID: ENST00000378073
  CDS Start-End: 7721-9040
ggccgctctggcccaagcgtcccctcgtctctctgatctggcccatccggcttcggagggaggcgagggtgggtgagcaaagggattgggtctgtggggtccaggcccgaacccctgaagacgggctccgcccccggcacccgctcgcgccccgcccccggctggaggagtctctcctggaccatccgaacctagcctgtcccggcccgcagcctctatggaggctcctgccgggccgtagagcccttcgccccctggggacccacccgtctataaggtccgtttggcctgcagcagcctgagtccgtaatgctgggcactgttcatgggatcggccccctatggagccctgtgtctataggggactcctacggtccctagggttcggccccgtccataatgactccatatacagggccttccatcgctctatagggctcagccctcggcttccagagcctgtcagcagtggccgtacccttcgccgggactgccgggtctccgggacctcttcgatctacaaggtcatgttatgcctatagaggtcgcatttgcagggcctcaccccgggtagagggtcctctccaggtttttacggcctgtccccgctctaagggtcagtgcaggaggcggcgatggccctgggcaaggttctggccatggcactggttttggccttggccgtgctggggtcgctgtcccctggggcccgggcgggggactgcaaggggcagcggcaggtgctgcgggaggcgccaggcttcgtgacggatggtgcgggcaactacagcgtcaatggcaactgcgagtggctcatcgaggccccaagcccccagcaccggatcctgctggacttccttttcctggacacagagtgcacgtatgactacctgttcgtgtatgacggtgactccccgcgagggccgctgcttgccagtctaagtgggagcacccgacctccgcccatcgaagcttcctcaggcaagatgctgctgcacctcttcagtgatgccaactacaacctgctgggctttaacgcctcattccgcttctccctgtgcccgggtggctgccagagccacgggcagtgccagccaccgggtgtgtgtgcctgcgagccgggctgggggggtcctgactgtggcctgcaggagtgctcagcctactgtggcagccacggcacctgcgcctcgcccctgggaccatgccgctgtgagcctggcttcttgggacgtgcctgtgacctgcacctgtgggagaaccagggggctgggtggtggcacaacgtgagtgccagggaccctgccttctctgcccgtattggggcagctggcgccttcctgtccccaccagggctgctggcagttttcggaggccaggacctcaacaatgccctgggtgacctcgtcctatacaacttctccgccaacacctgggagtcttgggacctgagtcctgccccggctgcccgtcactcccatgtggccgtggcctgggccggctccctggtactgatgggtggtgagctggctgacggctcgctcaccaacgacgtgtgggccttcagtccactgggcaggggccactgggagctcctggcaccacctgcctccagctcctcggggcccccaggcctggcaggtcacgcggctgccctggtggatgatgtctggctatatgtgtctggaggccgcaccccgcacgacctcttctcctctggcctcttccgtttccgccttgacagcaccagcgggggctattgggagcaggtgattccggcaggcggacggccccctgctgccactggccactccatggtgttccatgccccctcccgtgccctgctggtccatggtggacaccggccctccactgcccggttctctgtgcgagtgaactccactgagcttttccacgtggatcggcatgtgtggacgacgctgaaggggcgggatgggcttcagggcccaagggagcgagccttccacacagccagtgttctgggcaattacatggtggtctatgggggcaatgtgcacacccattaccaggaggaaaagtgctacgaagatggcatcttcttctaccaccttggctgccatcaatgggtgtcaggagctgagcttgccccgccaggaacccctgagggccgagcagcgcctcccagtggtcggtactcacatgtagctgcggtgcttggtggcagcgtcctgttggtggctggggggtacagcggccggccccgtggggacttgatggcgtacaaggtgcccccctttgtgttccaggcacctgcccctgactaccacttggactactgctccatgtacacagaccacagcgtctgctcccgggacccggaatgcagttggtgccaaggagcctgccaagctgcaccccctcctgggacccccttgggggcttgtccagccgccagctgcctgggcctgggccgcctcctgggtgactgccaggcctgcctggccttcagcagccccacagcccctccacggggacctggcaccctgggctggtgcgtgcacaatgagagctgcctccctaggcctgagcaggcccgctgccgaggggagcagatctcaggcactgtgggctggtgggggcctgcgcctgtcttcgtcacgtccctggaggcctgcgtcacccagagcttcctgcctggcctgcacttgctcacctttcagcagccgcccaatacctcccagcctgacaaggtctcaattgtccgcagcacgaccatcaccctaacacccagcgcagagacagatgtgtccctggtctaccgtggcttcatctacccaatgctgcctggagggccaggtggaccaggggctgaggacgtggccgtgtggacgcgggcccagcgcctacacgtcctggcccggatggcccgtggccctgacacggagaacatggaggaggtggggcgctgggtggctcatcaggagaaggagacgcggcggctgcagcgccctgggtctgctcgcctcttccctctgcctgggcgggaccacaagtatgcagtagagatccagggccagctcaatggctcggcaggccctgggcacagcgagctaactctgctgtgggatcggactggtgtgccaggaggcagcgagatctccttcttcttcctggagccctaccgctcgtcgtcctgcacctcctattcttcctgcctgggctgcttggcagaccagggctgtggctggtgcctgaccagtgccacctgccacctgcgccagggcggagcccattgcggggatgacggggctggtgggtccctgctggtgctggtgcctaccctctgcccactctgcgaggagcatcgggactgccacgcctgcacccaggaccccttctgtgagtggcatcagagcaccagccgcaaaggggacgcggcatgcagccggcggggccggggtcggggtgccctgaagagtccagaggagtgtcccccgctctgcagccagcgactgacctgtgaggactgcctggccaactctagccagtgcgcctggtgccagtccacccacacctgcttcctgtttgctgcctacttggcccggtacccacacgggggctgtcgaggctgggacgacagtgtacactcggagccacggtgccggagctgcgatggcttcctgacctgccatgagtgtctgcagagccacgagtgtggctggtgtggcaatgaggacaaccccacactgggacggtgcctacagggggacttctcagggcccctcggtgggggtaactgctccctgtgggtgggggagggcctggggcttcccgtggccctccctgcccgctgggcatacgcccgctgtcctgacgtggatgagtgtcgcctgggcctggcccggtgccacccgcgggcgacctgcctgaacacgcccctcagctacgagtgtcactgccagcggggctaccagggtgatggcatctcacactgcaaccgcacgtgcttggaggactgtggccatggtgtgtgcagtggccccccggactttacctgcgtgtgtgacctaggctggacatcagacctgccccctcccacacccgccccgggtccgccagccccccgctgctcccgggactgtggctgcagcttccacagccactgccgcaagcggggccctggcttctgcgacgagtgccaggactggacatggggggagcactgcgaacgatgccggcccggcagcttcggcaacgccacaggctctaggggctgccggccctgccagtgcaacgggcacggggacccacgccgtggccactgcgacaacctcagtgggctctgcttctgccaggaccacaccgagggtgcccactgccagctctgctccccaggctattatggggatccccgggccggtggttcctgctttcgggagtgtgggggtcgcgccctcctcaccaacgtgtcctcagtggcactgggctcacgccgggtcggggggctgctgcctccaggtggcggggctgcaagagccgggcctggcctgtcctactgtgtgtgggttgtctcggccactgaggagctacagccctgtgctcccgggaccctctgtcccccactcaccctcaccttctcccccgacagcagcaccccctgcacgctgagctacgtcctggcgtttgatggattcccacgcttcctggacactggtgttgtccagtcggaccgcagcctcatagctgccttctgcggccagcgacgggacaggcccctcactgttcaggccctgtctgggctgctcgtgctgcactgggaggccaatggctcctcatcctggggcttcaatgcttcggtgggctctgcccgctgtgggtcagggggccccgggagctgtcccgtcccccaggaatgcgtgccccaggacggtgctgcaggtgcggggctctgccgatgtcctcagggctgggctggcccacactgccgcatggctctgtgtcctgagaactgcaatgcccacactggggcaggaacttgtaaccagagcctgggtgtgtgcatctgtgccgagggcttcgggggccccgactgcgccaccaagctggatggcgggcagctggtctgggagaccctcatggacagccgcctctcagccgacactgccagccgcttcctgcaccgcctgggccacaccatggtggatggacccgatgccaccttgtggatgtttgggggcctgggcctgccccaggggctgctgggaaacctgtacaggtactcagtgagtgagcggcggtggacacagatgctggcgggagccgaggacgggggcccaggcccatcgccccgctccttccatgcagccgcatatgtgcccgctggccgtggtgccatgtatctgctggggggacttaccgctggaggcgtcacccgtgatttctgggtcctcaacctcaccaccctgcaatggcggcaggagaaggccccccagaccgtggagctgccagccgttgctggtcacacccttactgcccgccgaggcctgtctctgctcctggtgggcggttactccccggaaaatggcttcaaccagcagctgctggagtaccagctggcaaccggcacctgggtgtcaggagcccagagtgggacaccccccacaggtctctatggtcactctgctgtctaccacgaggccaccgactccctctacgtgtttggggggttccgattccatgtggagctggcggccccatcccccgagctctactccctgcactgtcctgaccgcacctggagtctgctggccccttctcagggggcaaagcgagatcgtatgaggaatgtgcgtggctcatctcggggtctgggccaagttcctggggagcagcctgggtcatgggggttccgggaagtcaggaagaagatggctctgtgggctgctcttgctggtacaggaggtttcctggaggaaatctcacctcacctgaaggagccccgcccccggcttttccacgcctcagccctgttaggggacaccatggtggttcttggggggcgctcggaccctgacgagttcagcagcgacgttctgctctaccaggtcaactgcaatgcctggcttctgcccgacctcacccgctcggcctctgtggggcccccaatggaggagtctgtggcccatgctgtggcagcagtcgggagccgcctgtatatctctgggggtttcgggggagtggccctgggccgcctgctggcactgaccctgccccctgacccctgccgcctgctgtcctcacctgaagcttgtaaccagtctggggcctgcacctggtgccatggggcctgcttgtccggggatcaggcccacaggctgggctgcgggggctccccctgctccccaatgcctcgctccccggaggaatgtcgacgtctccggacctgcagtgagtgcctggcccgccatcctcggaccctgcaacctggagatggagaggcgtccaccccccgctgtaagtggtgtaccaactgccccgaaggtgcttgcattggacgcaatgggtcctgcacctctgagaatgactgtcggatcaaccagcgagaggtcttctgggcagggaactgctccgaggctgcgtgcggggctgctgactgcgagcagtgcacgcgggagggcaagtgcatgtggacgcggcagttcaagaggacaggggagacccgccgcatcctctccgtgcagcccacctatgactggacgtgcttcagccactctctgctgaatgtgtcccccatgccggtggaatcatcacccccactgccctgccccaccccttgtcacctcctacccaactgtacctcctgcctggactctaagggagcagatgggggctggcagcactgtgtttggagcagcagcctgcagcagtgtctgagcccttcctacctgcccctgcgatgtatggccggaggctgtgggcggctgctccggggacctgagagctgctccctgggctgtgctcaggcaactcagtgcgccttgtgcctgcggcgcccccattgcggctggtgtgcctgggggggccaggatgggggtggccgctgcatggagggtggactcagcggcccccgtgatgggctgacatgtgggcgtccgggggcctcctgggccttcctgtcctgcccccctgaggacgagtgtgcaaacgggcaccacgactgcaacgagacgcagaattgccacgaccagccccacggctatgagtgcagctgcaagaccggctataccatggacaacatgacagggctgtgccgccctgtgtgcgcccagggctgcgtgaacggctcatgtgtggagcccgaccactgccgctgccactttggctttgtgggccgcaactgctccacggaatgccgctgcaaccgccacagtgaatgcgctggtgttggggcgcgtgaccactgcttgctctgccgcaaccacaccaagggcagccactgtgagcagtgcctcccgctgtttgtgggttcagctgtcggaggcgggacctgccggccctgccacgccttttgtcgtggaaatagccacatctgcatctccaggaaggagttacaaatgtccaagggagagccaaagaagtactcactggacccagaggagattgaaaactgggtgacagagggtcctagtgaagacgaggccgtgtgcgtgaactgccagaataacagctatggggagaaatgcgagagctgcctgcagggctacttcctcctggacgggaagtgcaccaatgcgccaagtgccgggaatcatttcacgggagtccgctgggcggccagcagtgctaccgcctcatctcggtggagcaggagtgctgcctggaccccacgtcccagaccaactgcttccatgagcccaaacgccgggcgctaggccccggccgcactgtcctctttggcgtgcagcccaaattcaccaacgtggacatccgcctgacgctggacgtgaccttcggggccgtggacctctatgtctccacctcctatgacaccttcgtggtccgtgtggcccctgacactggcgtccatactgtacacatccagccacccccagccccaccacctccaccaccccctgcagatggtgggccccggggggctggggatccaggaggagcaggggccagcagtgggccgggcgccccagcagagccacgggtacgggaggtatggccgcggggcctgattacctacgtgacggtgacggagccgtcggcagtgctggtggtccgcggcgtgcgggaccggctggtcatcacctacccacacgagcaccatgccctcaagtcgagccgcttctacctgctgctgctgggcgtgggagacccaagtgggcccggcgccaacggctcagccgactcgcagggcctgctcttcttccggcaggaccaggcccacattgacctgtttgtcttcttctccgtcttcttctcctgcttcttcctcttcctctcactctgtgtgctcctctggaaggccaagcaggctctggaccagcggcaggagcagcgccggcacttgcaggagatgaccaagatggccagccgccccttcgccaaggtcaccgtctgcttcccacctgaccctactgccccggcctccgcctggaagccggctgggctcccacctcccgccttccgccgctctgagcccttcctggcacccctgctgctgacaggggccggtgggccctggggacccatgggagggggctgctgcccaccagccatccccgccaccactgctgggctgcgagctgggcccatcactctcgagcccacagaagatggcatggctggcgtggccacactgctgctccagctgcctggcgggccccatgcacccaacggcgcctgcctggggtcagccctcgtcacactgcggcacaggctgcacgagtactgtgggggtggtgggggtgctgggggcagtgggcatgggactggtgcgggccggaagggactgttgagccaggacaacctcaccagcatgtccctctgacatgcccagggttctcatccacagcagctgggtcacctgatagggccgccctggacttggggtccctccacctgggggcccctggacactgtctacttggagaccactggcccccttcccccagggttgcccagatggggcctcctttgttctgcattcagcagctatttatcgagtacctactctgtcaggcactgtcataggcgtggggcaaagcaggaaccaagagacgaggttccctgatctcatgggacttaggttctggtgaagggagacaatcagtgcacatgcacacaccccacacgcatacacacatgaacacatgcacatgtgcacacacaagtaagatggcttcagagagggagaagcactgtgaggcctccagaggatgtggcagtgagggacgatggggtgaagtcagctgggcattcaaagaagctagactgagaacgcctgagaagaaccagctacgggaagagctttgggaagcaaaggcagaggccctggggtgggagcaggcttgttttattggaaggaccagaaaactggtaagtgtgacccagatcaagtgtgaggagatgaggctggggatagtcaggggctggatcacccagggccttgtgggccccacatagggttttgggttttattctcagggcaatgggaagctgttggatggtttgatgaaggggagtgacaggatccgatgtacctatttaagaatttaagagggtcgggtgcggtggctcatgcctataatcctagcactttgagaggccaaggtgggctgatcacaaggtcaagagttcgtgaccagcctggccaatatggtgaaaccccatgtctactaaaaatacaaaaattagctgggcatggtggcacacacttgtagtccgagctactcgggaggctgaggcagaagaatcgcttgaacccaggaggcggaggttgcagtgagctcagattgcgtcactgcactccaacctgggtgacagagcgagactccacctcaaaaaaaaaaaaaaaatttaagaggtcactcagttgtgctgtggagaatggaccggagggacaagaggggcagcagggatggtgggctggagtagggtgctggcaatgagggagtctggctcagatgtgggatgtgtatggaagaatataaatgatggtgtggatgtcagggtgagggaggagacaaaaccacgatgacccctagctttgtggcctgaactgtgggtggctgaggggatcgttaattgaatggggcagactgaggcttgtgaggaagatcagagtctggttcttgacatgagatgcccttcagacatctcttcactcaggtccaactagggatacagaaacactgaatatttcaacagcagaaattgaatggggggattgatagcgctggcgagggaagcagctggaaagagacagatggcaccctgagacagcccagaggtgaataggacccccaggctgcagggataaagctcagtggtggtgttacctcaccggggaccagggtcacacagcaaagctggaacaacagaggcgtgttgtgggggagcctcagaggggacaaaacctctgcctgagatcccaccccaggtgggcatgggggccactgaggttggggatgaaaatgccggtaccgtcagtgcacagccctgttccagacagtgctgcctggaagatttctgggctctcctgaggcgccaccccgcacctgagccacctccttggactcctgtcctctaccccttgaggacctccctcccttctaccctagctgtcttcttgaacttgggactctcctttcccaagacttccatcactagctcctggagggactggactttgcatcttcccttcgcgtggagcctcagtgtgagaggccctagccaatgcgtgcatgtcagaggtggtggggaccacatcagaagaagaggggggtgatgaaattaacaaataaaaagtatggggaaaaccca

SEQ ID NO: 155873 - DNA, 2691 bp, Homo sapiens
  Payload ID: 10616
  Gene Symbol: MEGF8
  Gene Name: multiple EGF-like-domains 8
  ENST ID: ENST00000593647
  CDS Start-End: 1-537
aactgctccacggaatgccgctgcaaccgccacagtgaatgcgctggtgttggggcgcgtgaccactgcttgctctgccgcaaccacaccaagggcagccactgtgagcagtgcctcccgctgtttgtgggttcagctgtcggaggcgggacctgccggccctgccacgccttttgtcgtggaaatagccacatctgcatctccaggaaggagttacaaatgtccaagggagagccaaagaagtactcactggacccagaggagattgaaaactgggtgacagagggtcctagtgaagacgaggccgtgtgcgtgaactgccagaataacagctatggggagaaatgcgagagctgcctgcagggctacttcctcctggacgggaagtgcaccaatgcgccaagtgccgggaatcatttcacgggagtccgctgggcggccagcagtgctaccgcctcatctcggtggagcaggagtgctgcctggaccccacgtcccagaccaactgcttccatgagcccaaacgccgggcgctaggccccggccgcactgtcctctttggcgtgcagcccaaattcaccaacgtggacatccgcctgacgctggacgtgaccttcggggccgtggacctctatgtctccacctcctatgacaccttcgtggtccgtgtggcccctgacactggcgtccatactgtacacatccagccacccccagccccaccacctccaccaccccctgcagatggtgggccccggggggctggggatccaggaggagcaggggccagcagtgggccgggcgccccagcagagccacgggtacgggaggtatggccgcggggcctgattacctacgtgacggtgacggagccgtcggcagtgctggtggtccgcggcgtgcgggaccggctggtcatcacctacccacacgagcaccatgccctcaagtcgagccgcttctacctgctgctgctgggcgtgggagacccaagtgggcccggcgccaacggctcagccgactcgcagggcctgctcttcttccggcaggaccaggcccacattgacctgtttgtcttcttctccgtcttcttctcctgcttcttcctcttcctctcactctgtgtgctcctctggaaggccaagcaggctctggaccagcggcaggagcagcgccggcacttgcaggagatgaccaagatggccagccgccccttcgccaaggtcaccgtctgcttcccacctgaccctactgccccggcctccgcctggaagccggctgggctcccacctcccgccttccgccgctctgagcccttcctggcacccctgctgctgacaggggccggtgggccctggggacccatgggagggggctgctgcccaccagccatccccgccaccactgctgggctgcgagctgggcccatcactctcgagcccacagaagatggcatggctggcgtggccacactgctgctccagctgcctggcgggccccatgcacccaacggcgcctgcctggggtcagccctcgtcacactgcggcacaggctgcacgagtactgtgggggtggtgggggtgctgggggcagtgggcatgggactggtgcgggccggaagggactgttgagccaggacaacctcaccagcatgtccctctgacatgcccagggttctcatccacagcagctgggtcacctgatagggccgccctggacttggggtccctccacctgggggcccctggacactgtctacttggagaccactggcccccttcccccagggttgcccagatggggcctcctttgttctgcattcagcagctatttatcgagtacctactctgtcaggcactgtcataggcgtggggcaaagcaggaaccaagagacgaggttccctgatctcatgggacttaggttctggtgaagggagacaatcagtgcacatgcacacaccccacacgcatacacacatgaacacatgcacatgtgcacacacaagtaagatggcttcagagagggagaagcactgtgaggcctccagaggatgtggcagtgagggacgatggggtgaagtcagctgggcattcaaagaagctagactgagaacgcctgagaagaaccagctacgggaagagctttgggaagcaaaggcagaggccctggggtgggagcaggcttgttttattggaaggaccagaaaactggtaagtgtgacccagatcaagtgtgaggagatgaggctggggatagtcaggggctggatcacccagggccttgtgggccccacatagggttttgggttttattctcagggcaatgggaagctgttggatggtttgatgaaggggagtgacaggatccgatgtacctatttaagaatttaagagggtcgggtgcggtggctcatgcctataatcctagcactttgagaggccaaggtgggctgatcacaaggtcaagagttcgtgaccagcctggccaatatggtgaaaccccatgtctactaaaaatacaaaaattagctgggcatggtggcacacacttgtagtccgagctactcgggaggctgaggcagaagaatcgcttgaacccaggaggcggaggttgcagtgagctcagattgcgtcactgcactccaacctgggtgacagagcgagactccacctcaaaaaaaaaaaaaaaa

SEQ ID NO: 155874 - DNA, 225 bp, Homo sapiens
  Payload ID: 10616
  Gene Symbol: MEGF8
  Gene Name: multiple EGF-like-domains 8
  ENST ID: ENST00000598762
  CDS Start-End: 1-212
gccatggggcctgcttgtccggggatcaggcccacaggctgggctgcgggggctccccctgctccccaatgcctcgctccccggaggaatgtcgacgtctccggacctgcagtgagtgcctggcccgccatcctcggaccctgcaacctggagatggagaggtggtggggaccacatcagaagaagaggggggtgatgaaattaacaaataaaaagtatggggaa

SEQ ID NO: 155875 - DNA, 6298 bp, Homo sapiens
  Payload ID: 10617
  Gene Symbol: MEGF9
  Gene Name: multiple EGF-like-domains 9
  Uniprot ID: Q9H1U4
  ENST ID: ENST00000373930
  CDS Start-End: 113-1921
agagggaggtggcgatggtgcgcccggtggcggtggcggcggcggttgcggaggcttccttggtcggattgcaacgaggagaagatgactgaccaaccgactggctgaatgaatgaatggcggagccgagcgcgccatgaggagcctgccgagcctgggcggcctcgccctgttgtgctgcgccgccgccgccgccgccgccgccgtcgcctcagccgcctcggcggggaatgtcaccggtggcggcggggccgcggggcaggtggacgcgtcgccgggccccgggttgcggggcgagcccagccaccccttccctagggcgacggctcccacggcccaggccccgaggaccgggcccccgcgcgccaccgtccaccgacccctggctgcgacttctccagcccagtccccggagaccacccctctttgggcgactgctggaccctcttccaccacctttcaggcgccgctcggcccctcgccgaccacccctccggcggcggaacgcacttcgaccacctctcaggcgccgaccagacccgcgccgaccaccctttcgacgaccactggcccggcgccgaccacccctgtagcgaccaccgtaccggcgcccacgactccccggaccccgacccccgatctccccagcagcagcaacagcagcgtcctccccaccccacctgccaccgaggccccctcttcgcctcctccagagtatgtatgtaactgctctgtggttggaagcctgaatgtgaatcgctgcaaccagaccacagggcagtgtgagtgtcggccaggttatcaggggcttcactgtgaaacctgcaaagagggcttttacctaaattacacttctgggctctgtcagccatgtgactgtagtccacatggagctctcagcataccgtgcaacagttctgggaaatgccagtgcaaagtgggtgtcattggctctatatgtgaccgatgccaagatggatattatggctttagtaagaatggctgcttgccctgccaatgcaataatcggtctgccagttgcgatgccctcacaggtgcttgtttaaactgccaggaaaatagcaaaggaaatcactgtgaagaatgtaaagaaggattttatcagagtcctgatgccactaaagaatgtcttcgctgcccttgttcagcagtgacatctacaggcagctgctctataaaatcgagtgaattggaacctgaatgtgaccagtgtaaagatggttacataggcccgaactgcaataaatgtgaaaatggctattacaattttgacagcatctgtagaaagtgccaatgtcacggccatgtggacccagttaaaactccaaagatttgtaagcccgagagtggtgagtgcatcaactgcctccataacaccactgggttttggtgtgagaactgcctagaaggttatgttcacgacctcgagggaaattgcatcaagaaagaagttattcttccaacacctgaaggttctaccattttggtttccaatgcctctttgaccacatcagtgcccacccctgttataaatagtacttttacccctacaaccctgcagactatcttttcagtaagcacttctgaaaacagcacttcagctttagctgatgtatcatggacccaatttaacatcatcattttgacagtcatcatcattgttgtggtgctgctaatgggatttgtgggggctgtatatatgtaccgcgagtaccaaaaccggaaactcaatgcccccttttggaccatcgagctgaaagaagacaatatcagtttcagcagctaccatgacagcattcccaatgcagatgtttcgggattgttggaagatgatggcaatgaagtggctcccaatgggcagctgaccctgacgacgcccatacataactacaaagcctaaggagctagaactgttctgaattgttaaaccacagtgcttgctaagacagagtcagcccctgggccagacaaagcctggctagagtttgctgagaaagcaaaggcaaatagtgcatctgaaattttcaggtacaaatttgtaatgcgcttagcctatctattgctcttagttttcccatgaagatctgaagcgttcactgtcattaggacttgaagtaaagtatatttttgtaccaaaccacatgggagtatggaaaggctgaaccccatagtgcagcccaaaaccactttgacctccagatagactcctggggaagcattcaccaagccagtggtaacaagatgatgaatgtggagggggaaaagactgctggaagacttcatctccattcctgaaacattttttttaaaacagtgtcagggattatattcgttttactatacaaaaggacatcattgaggaaaagcttgtttctaggctgtatcacagtaaataatcttgattgtttctagaacaggggtagaaaagtcccaagatcttcagaagggcttggttttttcctcccaggattcttgctcagtgatgagttgaaagcacaggataagcttctaagggaggaaggcagcattggggagcaggaggctgatggtcctcctcagggtctcagtgtaaatgataaattgtctaaaaataaggaatattcctgcctctagagaaataaggtgtacatagttaatgtagcatatctggtcgacgttgtatttgtatctatttgtaaaaaaaaaatcatgtcatattttatcatctggaatttatttgtacagcagttaatggtgttgtaaaaagaaaaatatggggattgcttaaaatactgtaaaatagatggcaatattgctagagctgggactctggtgagcatccgtcatttttagtccttcttgaggacattgctgaaatttataagaggtcgaatgtttctttctttcctttctcagtctaaaagtagagttatatgctctttgacttactatgattcaagcaatagattttgaagtcagtaatcgttaagctgggacataggatgcattctccaaaaacattaatctaattagacattagccaccctatatattttacatagattaatataaaacatatcctcattaaaaaatgtttttcttgaatgtaaaagatagtcttccaaaggatagaaatattttagttccaagagaaaagccatcatattacttgggatctgtagttttcatgcctatgaaatatttataatcctccctcaccccaaataaaaaatctcctacatgtgaacatagcctgtcactcatttgccatgaggtatgtgccatctccctgcagtgctatagttctcccattgtcttcctgtctggttaatgagcagctttgtagatgggtgtgtctagttagttcttgctttttgatggagttttttcctagaggccaactactgttgctctcgtttattatgatattgacattttgggttaagcaaggtgggtgggaaaggtggtcagatgttaaatataacttattaggaggaacagtgaactgtgaagtggttagaaaaaaaataaaaacttcttattagattagacctaggaaattcaagctgacccctttgcctaacttccctagagaaaaacctagaacttggtcatccctttataggagacccctaagttgttctcagggtttggagatgatgttctggagggagtacaagcaaataatctacttctggtaatctgagggtgctttgcgtatttggccattgctcagaagaatagaggttacattatattacattatatgaaaattatttagtttttctatagccctttgtagtttgcaaagcacttttccatatgtgtgtcctctcttccacaccatagccccctgaggaagtaattgttgtccccattttatagatgaaaaggctgaggcacagaggagctaaatatcttgttcaaggctatacaatgtgtgtgattattaggcttggaatcagggcctctaactctaaagcacatgttttttcaactatatgcagaaattgcctagccatggacacaagaaagctgggaggaagagttctacttgtggatgtttttaattttttttaaatatcaggagcaatccagggccatacagctatgaagcacttagtgaaaagaacacaagaagatttactaactgaagttagtattagtgattagaaaacaaaactgccagtttgtgcttcattaaggtgaactcatctctccaagcaggaagggaaaatttgctttccctagcagttgctgcatatgtgtgtacagactgcacaattctaagaaattgtgcaaaatggcatacctgtctttctcccagatacaccgccccctgccccccccaaaaaaggtcaggattaaaggtggtgagaagtgaacatttattaaacagaagttaaaccaatagagagaaaggaggtttgttggagtctaagaggattttgaccatgtagaaattccttgaaacagaccttaaaaggtattgaaaaattgaatcacaaagaaagtttacctttaaatacttgttaatggctcctagatcatggttataatttttctcaatgggaaaaaaagtcttaaaatttgttttaaataagatcctctaatgtctcgagctttttgattctggaaataatttgctttaaaatataaatcaatcagaaagtgatctaccactgaaatcattctaggaaactagcatgggatgcactgcacaatgttctttcctctaaaggcatgggccccataaactgtggcatctggcagcaggatgccatcagtcctttagaaagcctaattttgggccgggtgcggtggctcacgcctgtaatcccagcactttgggaggccgaggcgggtggatcacaaggtcaggagttcgagaccagcctggtcaacatggcgaaatcccgtctctactaaaaacacaaaaattagccgggtgtacgtgcctgtagtctcagctacttgggaggctgaggcaggagaatcacttgaacctgggaggcagaggttacagtgagccgagatggcgccatttcactccagcctgggcgacagagcaagactctgtctcaaaaaaaaggaagaaaaagaaagcctaatattgggagaatgtttgtgtaaggattggaaatctgtttatttttaaataagatagcactgatgtgaatcttatttggaaattacagatactgccattaagcgatgcttttatcttcattaattcattttggtaagcgcctatgcatttctgatggttaggtgccctaggtagtgttaagtatgtccgtgtcctcccttactcccctctcgctccctctaccctctatcccctagggttcttttattaatggaatttctccagttatagagaaaaaaatgacatttgaaaactaaagctcatttatattaatactaaggtcctgtgggcctagtgcgttactcttcccagtgatacctagattttaagagtagagaacagaggaaacatgggatgagaggagagaggttttttagacaacatttgtagacacctcaaattatatcactgttctctagcgccaatattcccaggtaaattgaccattaaagcaatactcactgacctactagtttattttggtcagctgagtaccatcaggatatttaaccctttaagtgctgttttgggagtagaaaactaaagcaacaatacttcctcttgacagctttgattggaatggggttattagatcattcaccttggtcctacactttttaggatgcttggtgaacataacaccacttataatgaacatccctggttcctatattttgggctatgtgggtaggaattgttacttgttactgcagcagcagccctagaaagtaagcccagggcttcagatctaagttagtccaaaagctaaatgatttaaagtcaagttgtaatgctaggcataagcactctataatacattaaattataggccgagcaattagggaatgtttctgaaacattaaacttgtatttatgtcactaaaattctaacacaaacttaaaaaatgtgtctcatacatatgctgtactaggcttcatcatgcatttctaaatttgtgtatgatttgaatatatgaaagaatttatacaagagtgttatttaaaattattaaaaataaatgtatataatttgtacctattgtagatttgttgtttacttttttgtgtggtcagagttgtttcatgtcttcaaatacatgccaaggatcatttactttcagcccacttcataaaaatctttgaactctt

SEQ ID NO: 155876 - DNA, 2761 bp, Homo sapiens
  Payload ID: 10618
  Gene Symbol: MEN1
  Gene Name: multiple endocrine neoplasia I
  Uniprot ID: O00255
  ENST ID: ENST00000312049
  CDS Start-End: 111-1943
ggtgtccggagccgcggacctagagatcccagaagccacagcgcagcggcccggcccgccactatttccaggctcagcggggcaggggccgccgcccaccgcccgccgccatggggctgaaggccgcccagaagacgctgttcccgctgcgctccatcgacgacgtggtgcgcctgtttgctgccgagctgggccgagaggagccggacctggtgctcctttccttggtgctgggcttcgtggagcattttctggctgtcaaccgcgtcatccctaccaacgttcccgagctcaccttccagcccagccccgcccccgacccgcctggcggcctcacctactttcccgtggccgacctgtctatcatcgccgccctctatgcccgcttcaccgcccagatccgaggcgccgtcgacctgtccctctatcctcgagaagggggtgtctccagccgtgagctggtgaagaaggtctccgatgtcatatggaacagcctcagccgctcctacttcaaggatcgggcccacatccagtccctcttcagcttcatcacaggcaccaaattggacagctccggtgtggcctttgctgtggttggggcctgccaggccctgggtctccgggatgtccacctcgccctgtctgaggatcatgcctgggtagtgtttgggcccaatggggagcagacagctgaggtcacctggcacggcaagggcaacgaggaccgcaggggccagacagtcaatgccggtgtggctgagcggagctggctgtacctgaaaggatcatacatgcgctgtgaccgcaagatggaggtggcgttcatggtgtgtgccatcaacccttccattgacctgcacaccgactcgctggagcttctgcagctgcagcagaagctgctctggctgctctatgacctgggacatctggaaaggtaccccatggccttagggaacctggcagatctagaggagctggagcccacccctggccggccagacccactcaccctctaccacaagggcattgcctcagccaagacctactatcgggatgaacacatctacccctacatgtacctggctggctaccactgtcgcaaccgcaatgtgcgggaagccctgcaggcctgggcggacacggccactgtcatccaggactacaactactgccgggaagacgaggagatctacaaggagttctttgaagtagccaatgatgtcatccccaacctgctgaaggaggcagccagcttgctggaggcgggcgaggagcggccgggggagcaaagccagggcacccagagccaaggttccgccctccaggaccctgagtgcttcgcccacctgctgcgattctacgacggcatctgcaaatgggaggagggcagtcccacgcctgtgctgcatgtgggctgggccacctttcttgtgcagtccctaggccgttttgagggacaggtgcggcagaaggtgcgcatagtgagccgagaggccgaggcggccgaggccgaggagccgtggggcgaggaagcccgggaaggccggcggcggggcccacggcgggagtccaagccagaggagcccccgccgcccaagaagccagcactggacaagggcctgggcaccggccagggtgcagtgtcaggacccccccggaagcctcctgggactgtcgctggcacagcccgaggccctgaaggtggcagcacggctcaggtgccagcacccacagcatcaccaccgccggagggtccagtgctcactttccagagtgagaagatgaagggcatgaaggagctgctggtggccaccaagatcaactcgagcgccatcaagctgcaactcacggcacagtcgcaagtgcagatgaagaagcagaaagtgtccacccctagtgactacactctgtctttcctcaagcggcagcgcaaaggcctctgaactactggggacttcggaccgcttgtggggacccaggctccgcccttagtcccccaactctgagcccatgttctgcccccagcccaaaggggacaggcctcacctctacccaaaccctaggttcccggtcccgagtacagtctgtatcaaacccacgattttctccagctcagaacccagggctctgccccagtcgttagaatataggtctcttctcccagaatcccagccggccaatggaaacctcacgctgggtcctaattaccagtctttaaaggcccagcccctagaaacccaagctcctcctcggaaccgctcacctagagccagaccaacgttactcagggctcctcccagcttgtaggagctgaggtttcacccttaacccaaggagcacaggtcccacctccagcccgggagcctaggaccactcagcccctaggagtatatttccgcacttcagaattccatatcttgcgaatccaagctccctgccccaaataacttcagtcctgctccagaatttggaaatcctagtttcctctccttcgtatcccgagtctgggacacaaaactccgcccccagcctatgagcatcctgagccccgccctcttcctgacgaaactggccccggatcagagcaggacctcccttccgaccctctgggaacctcccagaggtccagcccatctcggagcatcccggaggaaatctgcagagggttaggagtgggtgacaagagcctgatctcttcctgttttgtacatagatttatttttcagttccaagaaagatgaatacattttgttaaaaaaaa

SEQ ID NO: 155877 - DNA, 3148 bp, Homo sapiens
  Payload ID: 10618
  Gene Symbol: MEN1
  Gene Name: multiple endocrine neoplasia I
  Uniprot ID: O00255
  ENST ID: ENST00000315422
  CDS Start-End: 498-2330
caatccctgagtatctcgggaaggaggtgtccggagccgcggacctagagatcccagaagccacagcgcagcggcccggcccgccactatttccaggctcagcggggcaggggtgggcccagactccacttcccggcgggtagtgcgaccctaggggcgggacttcatgtcccagcaggctccgggcggcgtgcgccgcggtgcctagtgtgggatgtaagcgcggaggtgggcgagggggaccgaggccaggactctccttggggtttgggggcttgacctgggtgcgctttctggacagactttacagccccgggggcacagtcgtagagagggggcggggcggccattggggctcctcattggggtgcttggggcgcaccccatcgggtaccgggcgtcccggaattgtgggggacaaaaaggctctgcagtctcggctgaggggtctcaccgacaaaagaggggaagccggccgccgcccaccgcccgccgccatggggctgaaggccgcccagaagacgctgttcccgctgcgctccatcgacgacgtggtgcgcctgtttgctgccgagctgggccgagaggagccggacctggtgctcctttccttggtgctgggcttcgtggagcattttctggctgtcaaccgcgtcatccctaccaacgttcccgagctcaccttccagcccagccccgcccccgacccgcctggcggcctcacctactttcccgtggccgacctgtctatcatcgccgccctctatgcccgcttcaccgcccagatccgaggcgccgtcgacctgtccctctatcctcgagaagggggtgtctccagccgtgagctggtgaagaaggtctccgatgtcatatggaacagcctcagccgctcctacttcaaggatcgggcccacatccagtccctcttcagcttcatcacaggcaccaaattggacagctccggtgtggcctttgctgtggttggggcctgccaggccctgggtctccgggatgtccacctcgccctgtctgaggatcatgcctgggtagtgtttgggcccaatggggagcagacagctgaggtcacctggcacggcaagggcaacgaggaccgcaggggccagacagtcaatgccggtgtggctgagcggagctggctgtacctgaaaggatcatacatgcgctgtgaccgcaagatggaggtggcgttcatggtgtgtgccatcaacccttccattgacctgcacaccgactcgctggagcttctgcagctgcagcagaagctgctctggctgctctatgacctgggacatctggaaaggtaccccatggccttagggaacctggcagatctagaggagctggagcccacccctggccggccagacccactcaccctctaccacaagggcattgcctcagccaagacctactatcgggatgaacacatctacccctacatgtacctggctggctaccactgtcgcaaccgcaatgtgcgggaagccctgcaggcctgggcggacacggccactgtcatccaggactacaactactgccgggaagacgaggagatctacaaggagttctttgaagtagccaatgatgtcatccccaacctgctgaaggaggcagccagcttgctggaggcgggcgaggagcggccgggggagcaaagccagggcacccagagccaaggttccgccctccaggaccctgagtgcttcgcccacctgctgcgattctacgacggcatctgcaaatgggaggagggcagtcccacgcctgtgctgcatgtgggctgggccacctttcttgtgcagtccctaggccgttttgagggacaggtgcggcagaaggtgcgcatagtgagccgagaggccgaggcggccgaggccgaggagccgtggggcgaggaagcccgggaaggccggcggcggggcccacggcgggagtccaagccagaggagcccccgccgcccaagaagccagcactggacaagggcctgggcaccggccagggtgcagtgtcaggacccccccggaagcctcctgggactgtcgctggcacagcccgaggccctgaaggtggcagcacggctcaggtgccagcacccacagcatcaccaccgccggagggtccagtgctcactttccagagtgagaagatgaagggcatgaaggagctgctggtggccaccaagatcaactcgagcgccatcaagctgcaactcacggcacagtcgcaagtgcagatgaagaagcagaaagtgtccacccctagtgactacactctgtctttcctcaagcggcagcgcaaaggcctctgaactactggggacttcggaccgcttgtggggacccaggctccgcccttagtcccccaactctgagcccatgttctgcccccagcccaaaggggacaggcctcacctctacccaaaccctaggttcccggtcccgagtacagtctgtatcaaacccacgattttctccagctcagaacccagggctctgccccagtcgttagaatataggtctcttctcccagaatcccagccggccaatggaaacctcacgctgggtcctaattaccagtctttaaaggcccagcccctagaaacccaagctcctcctcggaaccgctcacctagagccagaccaacgttactcagggctcctcccagcttgtaggagctgaggtttcacccttaacccaaggagcacaggtcccacctccagcccgggagcctaggaccactcagcccctaggagtatatttccgcacttcagaattccatatcttgcgaatccaagctccctgccccaaataacttcagtcctgctccagaatttggaaatcctagtttcctctccttcgtatcccgagtctgggacacaaaactccgcccccagcctatgagcatcctgagccccgccctcttcctgacgaaactggccccggatcagagcaggacctcccttccgaccctctgggaacctcccagaggtccagcccatctcggagcatcccggaggaaatctgcagagggttaggagtgggtgacaagagcctgatctcttcctgttttgtacatagatttatttttcagttccaagaaagatgaatacattttgttaaaaaaaa

SEQ ID NO: 155878 - DNA, 3162 bp, Homo sapiens
  Payload ID: 10618
  Gene Symbol: MEN1
  Gene Name: multiple endocrine neoplasia I
  Uniprot ID: O00255
  ENST ID: ENST00000337652
  CDS Start-End: 505-2352
tatatttatgtatatgcacatacacacaaaattaggcgggagtggtggcgcacgcctgtgatcacagctactcgggaggctgaggcacgagaatcgcttgagcccgtgaagtcgaggctgcagtgagcccagatcgagccactgcattccagcctgggcgaaagagaaagaccgtgtctcaaaacaaacaaacaaaagctactcttagcacgtgttagagtatctcgcgggcggaagtgggaaacgagtgctgcacacagagtaggcatctttatatgttaacagacactgatacccagctaaagcggctgaacacatttactctctggcagtgtttaaaagtatctgtttttctcatattgttttattttaattttttctggatcaagcaacctgatctttttcctcataacttgccgaccgacccgtgacagcaaaaccggcagaagctcggcgacctcccaccccgagtctgcaggtagccgccgcccaccgcccgccgccatggggctgaaggccgcccagaagacgctgttcccgctgcgctccatcgacgacgtggtgcgcctgtttgctgccgagctgggccgagaggagccggacctggtgctcctttccttggtgctgggcttcgtggagcattttctggctgtcaaccgcgtcatccctaccaacgttcccgagctcaccttccagcccagccccgcccccgacccgcctggcggcctcacctactttcccgtggccgacctgtctatcatcgccgccctctatgcccgcttcaccgcccagatccgaggcgccgtcgacctgtccctctatcctcgagaagggggtgtctccagccgtgagctggtgaagaaggtctccgatgtcatatggaacagcctcagccgctcctacttcaaggatcgggcccacatccagtccctcttcagcttcatcacaggttggagcccagtaggcaccaaattggacagctccggtgtggcctttgctgtggttggggcctgccaggccctgggtctccgggatgtccacctcgccctgtctgaggatcatgcctgggtagtgtttgggcccaatggggagcagacagctgaggtcacctggcacggcaagggcaacgaggaccgcaggggccagacagtcaatgccggtgtggctgagcggagctggctgtacctgaaaggatcatacatgcgctgtgaccgcaagatggaggtggcgttcatggtgtgtgccatcaacccttccattgacctgcacaccgactcgctggagcttctgcagctgcagcagaagctgctctggctgctctatgacctgggacatctggaaaggtaccccatggccttagggaacctggcagatctagaggagctggagcccacccctggccggccagacccactcaccctctaccacaagggcattgcctcagccaagacctactatcgggatgaacacatctacccctacatgtacctggctggctaccactgtcgcaaccgcaatgtgcgggaagccctgcaggcctgggcggacacggccactgtcatccaggactacaactactgccgggaagacgaggagatctacaaggagttctttgaagtagccaatgatgtcatccccaacctgctgaaggaggcagccagcttgctggaggcgggcgaggagcggccgggggagcaaagccagggcacccagagccaaggttccgccctccaggaccctgagtgcttcgcccacctgctgcgattctacgacggcatctgcaaatgggaggagggcagtcccacgcctgtgctgcatgtgggctgggccacctttcttgtgcagtccctaggccgttttgagggacaggtgcggcagaaggtgcgcatagtgagccgagaggccgaggcggccgaggccgaggagccgtggggcgaggaagcccgggaaggccggcggcggggcccacggcgggagtccaagccagaggagcccccgccgcccaagaagccagcactggacaagggcctgggcaccggccagggtgcagtgtcaggacccccccggaagcctcctgggactgtcgctggcacagcccgaggccctgaaggtggcagcacggctcaggtgccagcacccacagcatcaccaccgccggagggtccagtgctcactttccagagtgagaagatgaagggcatgaaggagctgctggtggccaccaagatcaactcgagcgccatcaagctgcaactcacggcacagtcgcaagtgcagatgaagaagcagaaagtgtccacccctagtgactacactctgtctttcctcaagcggcagcgcaaaggcctctgaactactggggacttcggaccgcttgtggggacccaggctccgcccttagtcccccaactctgagcccatgttctgcccccagcccaaaggggacaggcctcacctctacccaaaccctaggttcccggtcccgagtacagtctgtatcaaacccacgattttctccagctcagaacccagggctctgccccagtcgttagaatataggtctcttctcccagaatcccagccggccaatggaaacctcacgctgggtcctaattaccagtctttaaaggcccagcccctagaaacccaagctcctcctcggaaccgctcacctagagccagaccaacgttactcagggctcctcccagcttgtaggagctgaggtttcacccttaacccaaggagcacaggtcccacctccagcccgggagcctaggaccactcagcccctaggagtatatttccgcacttcagaattccatatcttgcgaatccaagctccctgccccaaataacttcagtcctgctccagaatttggaaatcctagtttcctctccttcgtatcccgagtctgggacacaaaactccgcccccagcctatgagcatcctgagccccgccctcttcctgacgaaactggccccggatcagagcaggacctcccttccgaccctctgggaacctcccagaggtccagcccatctcggagcatcccggaggaaatctgcagagggttaggagtgggtgacaagagcctgatctcttcctgttttgtacatagatttatttttcagttccaagaaagatgaatacattttgtt

SEQ ID NO: 155879 - DNA, 1871 bp, Homo sapiens
  Payload ID: 10618
  Gene Symbol: MEN1
  Gene Name: multiple endocrine neoplasia I
  Uniprot ID: O00255
  ENST ID: ENST00000377313
  CDS Start-End: 24-1871
gccgccgcccaccgcccgccgccatggggctgaaggccgcccagaagacgctgttcccgctgcgctccatcgacgacgtggtgcgcctgtttgctgccgagctgggccgagaggagccggacctggtgctcctttccttggtgctgggcttcgtggagcattttctggctgtcaaccgcgtcatccctaccaacgttcccgagctcaccttccagcccagccccgcccccgacccgcctggcggcctcacctactttcccgtggccgacctgtctatcatcgccgccctctatgcccgcttcaccgcccagatccgaggcgccgtcgacctgtccctctatcctcgagaagggggtgtctccagccgtgagctggtgaagaaggtctccgatgtcatatggaacagcctcagccgctcctacttcaaggatcgggcccacatccagtccctcttcagcttcatcacaggttggagcccagtaggcaccaaattggacagctccggtgtggcctttgctgtggttggggcctgccaggccctgggtctccgggatgtccacctcgccctgtctgaggatcatgcctgggtagtgtttgggcccaatggggagcagacagctgaggtcacctggcacggcaagggcaacgaggaccgcaggggccagacagtcaatgccggtgtggctgagcggagctggctgtacctgaaaggatcatacatgcgctgtgaccgcaagatggaggtggcgttcatggtgtgtgccatcaacccttccattgacctgcacaccgactcgctggagcttctgcagctgcagcagaagctgctctggctgctctatgacctgggacatctggaaaggtaccccatggccttagggaacctggcagatctagaggagctggagcccacccctggccggccagacccactcaccctctaccacaagggcattgcctcagccaagacctactatcgggatgaacacatctacccctacatgtacctggctggctaccactgtcgcaaccgcaatgtgcgggaagccctgcaggcctgggcggacacggccactgtcatccaggactacaactactgccgggaagacgaggagatctacaaggagttctttgaagtagccaatgatgtcatccccaacctgctgaaggaggcagccagcttgctggaggcgggcgaggagcggccgggggagcaaagccagggcacccagagccaaggttccgccctccaggaccctgagtgcttcgcccacctgctgcgattctacgacggcatctgcaaatgggaggagggcagtcccacgcctgtgctgcatgtgggctgggccacctttcttgtgcagtccctaggccgttttgagggacaggtgcggcagaaggtgcgcatagtgagccgagaggccgaggcggccgaggccgaggagccgtggggcgaggaagcccgggaaggccggcggcggggcccacggcgggagtccaagccagaggagcccccgccgcccaagaagccagcactggacaagggcctgggcaccggccagggtgcagtgtcaggacccccccggaagcctcctgggactgtcgctggcacagcccgaggccctgaaggtggcagcacggctcaggtgccagcacccacagcatcaccaccgccggagggtccagtgctcactttccagagtgagaagatgaagggcatgaaggagctgctggtggccaccaagatcaactcgagcgccatcaagctgcaactcacggcacagtcgcaagtgcagatgaagaagcagaaagtgtccacccctagtgactacactctgtctttcctcaagcggcagcgcaaaggcctctga

SEQ ID NO: 155880 - DNA, 2868 bp, Homo sapiens
  Payload ID: 10618
  Gene Symbol: MEN1
  Gene Name: multiple endocrine neoplasia I
  ENST ID: ENST00000377316
  CDS Start-End: 377-2044
ctccttggggtttgggggcttgacctgggtgcgctttctggacagactttacagccccgggggcacagtcgtagagagggggcggggcggccattggggctcctcattggggtgcttggggcgcaccccatcgggtaccgggcgtcccggaattgtgggggacaaaaaggctctgcagtctcggctgaggggtctcaccgacaaaagaggggaagccggtgagcagaggctgaagagggtggggaagcaggggagctgtgcgtgtgtcggggcgggtggaaccttagcggaccctgggaggaggctccccggccgaacctgcccgaccctccctcccccggcttgccttgcaggccgccgcccaccgcccgccgccatggggctgaaggccgcccagaagacgctgttcccgctgcgctccatcgacgacgtggtgcgcctgtttgctgccgagctgggccgagaggagccggacctggtgctcctttccttggtgctgggcttcgtggagcattttctggctgtcaaccgcgtcatccctaccaacgttcccgagctcaccttccagcccagccccgcccccgacccgcctggcggcctcacctactttcccgtggccgacctgtctatcatcgccgccctctatgcccgcttcaccgcccagatccgaggcgccgtcgacctgtccctctatcctcgagaagggggtgtctccagccgtgagctggtgaagaaggtctccgatgtcatatggaacagcctcagccgctcctacttcaaggatcgggcccacatccagtccctcttcagcttcatcacaggcaccaaattggacagctccggtgtggcctttgctgtggttggggcctgccaggccctgggtctccgggatgtccacctcgccctgtctgaggatcatgcctgggtagtgtttgggcccaatggggagcagacagctgaggtcacctggcacggcaagggcaacgaggaccgcaggggccagacagtcaatgccggtgtggctgagcggagctggctgtacctgaaaggatcatacatgcgctgtgaccgcaagatggaggtggcgttcatggtgtgtgccatcaacccttccattgacctgcacaccgactcgctggagcttctgcagctgcagcagaagctgctctggctgctctatgacctgggacatctggaaaggtaccccatggccttagggaacctggcagatctagaggagctggagcccacccctggccggccagacccactcaccctctaccacaagggcattgcctcagccaagacctactatcgggatgaacacatctacccctacatgtacctggctggctaccactgtcgcaaccgcaatgtgcgggaagccctgcaggcctgggcggacacggccactgtcatccaggactacaactactgccgggaagacgaggagatctacaaggagttctttgaagtagccaatgatgtcatccccaacctgctgaaggaggcagccagcttgctggaggcgggcgaggagcggccgggggagcaaagccaggtgcggcagaaggtgcgcatagtgagccgagaggccgaggcggccgaggccgaggagccgtggggcgaggaagcccgggaaggccggcggcggggcccacggcgggagtccaagccagaggagcccccgccgcccaagaagccagcactggacaagggcctgggcaccggccagggtgcagtgtcaggacccccccggaagcctcctgggactgtcgctggcacagcccgaggccctgaaggtggcagcacggctcaggtgccagcacccacagcatcaccaccgccggagggtccagtgctcactttccagagtgagaagatgaagggcatgaaggagctgctggtggccaccaagatcaactcgagcgccatcaagctgcaactcacggcacagtcgcaagtgcagatgaagaagcagaaagtgtccacccctagtgactacactctgtctttcctcaagcggcagcgcaaaggcctctgaactactggggacttcggaccgcttgtggggacccaggctccgcccttagtcccccaactctgagcccatgttctgcccccagcccaaaggggacaggcctcacctctacccaaaccctaggttcccggtcccgagtacagtctgtatcaaacccacgattttctccagctcagaacccagggctctgccccagtcgttagaatataggtctcttctcccagaatcccagccggccaatggaaacctcacgctgggtcctaattaccagtctttaaaggcccagcccctagaaacccaagctcctcctcggaaccgctcacctagagccagaccaacgttactcagggctcctcccagcttgtaggagctgaggtttcacccttaacccaaggagcacaggtcccacctccagcccgggagcctaggaccactcagcccctaggagtatatttccgcacttcagaattccatatcttgcgaatccaagctccctgccccaaataacttcagtcctgctccagaatttggaaatcctagtttcctctccttcgtatcccgagtctgggacacaaaactccgcccccagcctatgagcatcctgagccccgccctcttcctgacgaaactggccccggatcagagcaggacctcccttccgaccctctgggaacctcccagaggtccagcccatctcggagcatcccggaggaaatctgcagagggttaggagtgggtgacaagagcctgatctcttcctgttttgtacatagatttatttttcagttccaagaaagatgaatacattttgttaaaaaaaatataaa

SEQ ID NO: 155881 - DNA, 2614 bp, Homo sapiens
  Payload ID: 10618
  Gene Symbol: MEN1
  Gene Name: multiple endocrine neoplasia I
  Uniprot ID: O00255
  ENST ID: ENST00000377321
  CDS Start-End: 69-1796
gggcggcgtgcgccgcggtgcctagtgtgggatgtaagcgcggaggccgccgcccaccgcccgccgccatggggctgaaggccgcccagaagacgctgttcccgctgcgctccatcgacgacgtggtgcgcctgtttgctgccgagctgggccgagaggagccggacctggtgctcctttccttggtgctgggcttcgtggagcattttctggctgtcaaccgcgtcatccctaccaacgttcccgagctcaccttccagcccagccccgcccccgacccgcctggcggcctcacctactttcccgtggccgacctgtctatcatcgccgccctctatgcccgcttcaccgcccagatccgaggcgccgtcgacctgtccctctatcctcgagaagggggtgtctccagccgtgagctggtgaagaaggtctccgatgtcatatggaacagcctcagccgctcctacttcaaggatcgggcccacatccagtccctcttcagcttcatcacaggcaccaaattggacagctccggtgtggcctttgctgtggttggggcctgccaggccctgggtctccgggatgtccacctcgccctgtctgaggatcatgcctggagctggctgtacctgaaaggatcatacatgcgctgtgaccgcaagatggaggtggcgttcatggtgtgtgccatcaacccttccattgacctgcacaccgactcgctggagcttctgcagctgcagcagaagctgctctggctgctctatgacctgggacatctggaaaggtaccccatggccttagggaacctggcagatctagaggagctggagcccacccctggccggccagacccactcaccctctaccacaagggcattgcctcagccaagacctactatcgggatgaacacatctacccctacatgtacctggctggctaccactgtcgcaaccgcaatgtgcgggaagccctgcaggcctgggcggacacggccactgtcatccaggactacaactactgccgggaagacgaggagatctacaaggagttctttgaagtagccaatgatgtcatccccaacctgctgaaggaggcagccagcttgctggaggcgggcgaggagcggccgggggagcaaagccagggcacccagagccaaggttccgccctccaggaccctgagtgcttcgcccacctgctgcgattctacgacggcatctgcaaatgggaggagggcagtcccacgcctgtgctgcatgtgggctgggccacctttcttgtgcagtccctaggccgttttgagggacaggtgcggcagaaggtgcgcatagtgagccgagaggccgaggcggccgaggccgaggagccgtggggcgaggaagcccgggaaggccggcggcggggcccacggcgggagtccaagccagaggagcccccgccgcccaagaagccagcactggacaagggcctgggcaccggccagggtgcagtgtcaggacccccccggaagcctcctgggactgtcgctggcacagcccgaggccctgaaggtggcagcacggctcaggtgccagcacccacagcatcaccaccgccggagggtccagtgctcactttccagagtgagaagatgaagggcatgaaggagctgctggtggccaccaagatcaactcgagcgccatcaagctgcaactcacggcacagtcgcaagtgcagatgaagaagcagaaagtgtccacccctagtgactacactctgtctttcctcaagcggcagcgcaaaggcctctgaactactggggacttcggaccgcttgtggggacccaggctccgcccttagtcccccaactctgagcccatgttctgcccccagcccaaaggggacaggcctcacctctacccaaaccctaggttcccggtcccgagtacagtctgtatcaaacccacgattttctccagctcagaacccagggctctgccccagtcgttagaatataggtctcttctcccagaatcccagccggccaatggaaacctcacgctgggtcctaattaccagtctttaaaggcccagcccctagaaacccaagctcctcctcggaaccgctcacctagagccagaccaacgttactcagggctcctcccagcttgtaggagctgaggtttcacccttaacccaaggagcacaggtcccacctccagcccgggagcctaggaccactcagcccctaggagtatatttccgcacttcagaattccatatcttgcgaatccaagctccctgccccaaataacttcagtcctgctccagaatttggaaatcctagtttcctctccttcgtatcccgagtctgggacacaaaactccgcccccagcctatgagcatcctgagccccgccctcttcctgacgaaactggccccggatcagagcaggacctcccttccgaccctctgggaacctcccagaggtccagcccatctcggagcatcccggaggaaatctgcagagggttaggagtgggtgacaagagcctgatctcttcctgttttgtacatagatttatttttcagttccaagaaagatgaatacattttgttaaaaaaaa

SEQ ID NO: 155882 - DNA, 3150 bp, Homo sapiens
  Payload ID: 10618
  Gene Symbol: MEN1
  Gene Name: multiple endocrine neoplasia I
  Uniprot ID: O00255
  ENST ID: ENST00000377326
  CDS Start-End: 500-2332
cggcgggtagtgcgaccctaggggcgggacttcatgtcccagcaggctccgggcggcgtgcgccgcggtgcctagtgtgggatgtaagcgcggaggtgggcgagggggaccgaggccaggactctccttggggtttgggggcttgacctgggtgcgctttctggacagactttacagccccgggggcacagtcgtagagagggggcggggcggccattggggctcctcattggggtgcttggggcgcaccccatcgggtaccgggcgtcccggaattgtgggggacaaaaaggctctgcagtctcggctgaggggtctcaccgacaaaagaggggaagccggtgagcagaggctgaagagggtggggaagcaggggagctgtgcgtgtgtcggggcgggtggaaccttagcggaccctgggaggaggctccccggccgaacctgcccgaccctccctcccccggcttgccttgcaggccgccgcccaccgcccgccgccatggggctgaaggccgcccagaagacgctgttcccgctgcgctccatcgacgacgtggtgcgcctgtttgctgccgagctgggccgagaggagccggacctggtgctcctttccttggtgctgggcttcgtggagcattttctggctgtcaaccgcgtcatccctaccaacgttcccgagctcaccttccagcccagccccgcccccgacccgcctggcggcctcacctactttcccgtggccgacctgtctatcatcgccgccctctatgcccgcttcaccgcccagatccgaggcgccgtcgacctgtccctctatcctcgagaagggggtgtctccagccgtgagctggtgaagaaggtctccgatgtcatatggaacagcctcagccgctcctacttcaaggatcgggcccacatccagtccctcttcagcttcatcacaggcaccaaattggacagctccggtgtggcctttgctgtggttggggcctgccaggccctgggtctccgggatgtccacctcgccctgtctgaggatcatgcctgggtagtgtttgggcccaatggggagcagacagctgaggtcacctggcacggcaagggcaacgaggaccgcaggggccagacagtcaatgccggtgtggctgagcggagctggctgtacctgaaaggatcatacatgcgctgtgaccgcaagatggaggtggcgttcatggtgtgtgccatcaacccttccattgacctgcacaccgactcgctggagcttctgcagctgcagcagaagctgctctggctgctctatgacctgggacatctggaaaggtaccccatggccttagggaacctggcagatctagaggagctggagcccacccctggccggccagacccactcaccctctaccacaagggcattgcctcagccaagacctactatcgggatgaacacatctacccctacatgtacctggctggctaccactgtcgcaaccgcaatgtgcgggaagccctgcaggcctgggcggacacggccactgtcatccaggactacaactactgccgggaagacgaggagatctacaaggagttctttgaagtagccaatgatgtcatccccaacctgctgaaggaggcagccagcttgctggaggcgggcgaggagcggccgggggagcaaagccagggcacccagagccaaggttccgccctccaggaccctgagtgcttcgcccacctgctgcgattctacgacggcatctgcaaatgggaggagggcagtcccacgcctgtgctgcatgtgggctgggccacctttcttgtgcagtccctaggccgttttgagggacaggtgcggcagaaggtgcgcatagtgagccgagaggccgaggcggccgaggccgaggagccgtggggcgaggaagcccgggaaggccggcggcggggcccacggcgggagtccaagccagaggagcccccgccgcccaagaagccagcactggacaagggcctgggcaccggccagggtgcagtgtcaggacccccccggaagcctcctgggactgtcgctggcacagcccgaggccctgaaggtggcagcacggctcaggtgccagcacccacagcatcaccaccgccggagggtccagtgctcactttccagagtgagaagatgaagggcatgaaggagctgctggtggccaccaagatcaactcgagcgccatcaagctgcaactcacggcacagtcgcaagtgcagatgaagaagcagaaagtgtccacccctagtgactacactctgtctttcctcaagcggcagcgcaaaggcctctgaactactggggacttcggaccgcttgtggggacccaggctccgcccttagtcccccaactctgagcccatgttctgcccccagcccaaaggggacaggcctcacctctacccaaaccctaggttcccggtcccgagtacagtctgtatcaaacccacgattttctccagctcagaacccagggctctgccccagtcgttagaatataggtctcttctcccagaatcccagccggccaatggaaacctcacgctgggtcctaattaccagtctttaaaggcccagcccctagaaacccaagctcctcctcggaaccgctcacctagagccagaccaacgttactcagggctcctcccagcttgtaggagctgaggtttcacccttaacccaaggagcacaggtcccacctccagcccgggagcctaggaccactcagcccctaggagtatatttccgcacttcagaattccatatcttgcgaatccaagctccctgccccaaataacttcagtcctgctccagaatttggaaatcctagtttcctctccttcgtatcccgagtctgggacacaaaactccgcccccagcctatgagcatcctgagccccgccctcttcctgacgaaactggccccggatcagagcaggacctcccttccgaccctctgggaacctcccagaggtccagcccatctcggagcatcccggaggaaatctgcagagggttaggagtgggtgacaagagcctgatctcttcctgttttgtacatagatttatttttcagttccaagaaagatgaatacattttgttaaaaaaaa

SEQ ID NO: 155883 - DNA, 3155 bp, Homo sapiens
  Payload ID: 10618
  Gene Symbol: MEN1
  Gene Name: multiple endocrine neoplasia I
  Uniprot ID: O00255
  ENST ID: ENST00000394374
  CDS Start-End: 498-2345
caatccctgagtatctcgggaaggaggtgtccggagccgcggacctagagatcccagaagccacagcgcagcggcccggcccgccactatttccaggctcagcggggcaggggtgggcccagactccacttcccggcgggtagtgcgaccctaggggcgggacttcatgtcccagcaggctccgggcggcgtgcgccgcggtgcctagtgtgggatgtaagcgcggaggtgggcgagggggaccgaggccaggactctccttggggtttgggggcttgacctgggtgcgctttctggacagactttacagccccgggggcacagtcgtagagagggggcggggcggccattggggctcctcattggggtgcttggggcgcaccccatcgggtaccgggcgtcccggaattgtgggggacaaaaaggctctgcagtctcggctgaggggtctcaccgacaaaagaggggaagccggccgccgcccaccgcccgccgccatggggctgaaggccgcccagaagacgctgttcccgctgcgctccatcgacgacgtggtgcgcctgtttgctgccgagctgggccgagaggagccggacctggtgctcctttccttggtgctgggcttcgtggagcattttctggctgtcaaccgcgtcatccctaccaacgttcccgagctcaccttccagcccagccccgcccccgacccgcctggcggcctcacctactttcccgtggccgacctgtctatcatcgccgccctctatgcccgcttcaccgcccagatccgaggcgccgtcgacctgtccctctatcctcgagaagggggtgtctccagccgtgagctggtgaagaaggtctccgatgtcatatggaacagcctcagccgctcctacttcaaggatcgggcccacatccagtccctcttcagcttcatcacaggttggagcccagtaggcaccaaattggacagctccggtgtggcctttgctgtggttggggcctgccaggccctgggtctccgggatgtccacctcgccctgtctgaggatcatgcctgggtagtgtttgggcccaatggggagcagacagctgaggtcacctggcacggcaagggcaacgaggaccgcaggggccagacagtcaatgccggtgtggctgagcggagctggctgtacctgaaaggatcatacatgcgctgtgaccgcaagatggaggtggcgttcatggtgtgtgccatcaacccttccattgacctgcacaccgactcgctggagcttctgcagctgcagcagaagctgctctggctgctctatgacctgggacatctggaaaggtaccccatggccttagggaacctggcagatctagaggagctggagcccacccctggccggccagacccactcaccctctaccacaagggcattgcctcagccaagacctactatcgggatgaacacatctacccctacatgtacctggctggctaccactgtcgcaaccgcaatgtgcgggaagccctgcaggcctgggcggacacggccactgtcatccaggactacaactactgccgggaagacgaggagatctacaaggagttctttgaagtagccaatgatgtcatccccaacctgctgaaggaggcagccagcttgctggaggcgggcgaggagcggccgggggagcaaagccagggcacccagagccaaggttccgccctccaggaccctgagtgcttcgcccacctgctgcgattctacgacggcatctgcaaatgggaggagggcagtcccacgcctgtgctgcatgtgggctgggccacctttcttgtgcagtccctaggccgttttgagggacaggtgcggcagaaggtgcgcatagtgagccgagaggccgaggcggccgaggccgaggagccgtggggcgaggaagcccgggaaggccggcggcggggcccacggcgggagtccaagccagaggagcccccgccgcccaagaagccagcactggacaagggcctgggcaccggccagggtgcagtgtcaggacccccccggaagcctcctgggactgtcgctggcacagcccgaggccctgaaggtggcagcacggctcaggtgccagcacccacagcatcaccaccgccggagggtccagtgctcactttccagagtgagaagatgaagggcatgaaggagctgctggtggccaccaagatcaactcgagcgccatcaagctgcaactcacggcacagtcgcaagtgcagatgaagaagcagaaagtgtccacccctagtgactacactctgtctttcctcaagcggcagcgcaaaggcctctgaactactggggacttcggaccgcttgtggggacccaggctccgcccttagtcccccaactctgagcccatgttctgcccccagcccaaaggggacaggcctcacctctacccaaaccctaggttcccggtcccgagtacagtctgtatcaaacccacgattttctccagctcagaacccagggctctgccccagtcgttagaatataggtctcttctcccagaatcccagccggccaatggaaacctcacgctgggtcctaattaccagtctttaaaggcccagcccctagaaacccaagctcctcctcggaaccgctcacctagagccagaccaacgttactcagggctcctcccagcttgtaggagctgaggtttcacccttaacccaaggagcacaggtcccacctccagcccgggagcctaggaccactcagcccctaggagtatatttccgcacttcagaattccatatcttgcgaatccaagctccctgccccaaataacttcagtcctgctccagaatttggaaatcctagtttcctctccttcgtatcccgagtctgggacacaaaactccgcccccagcctatgagcatcctgagccccgccctcttcctgacgaaactggccccggatcagagcaggacctcccttccgaccctctgggaacctcccagaggtccagcccatctcggagcatcccggaggaaatctgcagagggttaggagtgggtgacaagagcctgatctcttcctgttttgtacatagatttatttttcagttccaagaaagatgaatacattttgtt

SEQ ID NO: 155884 - DNA, 3034 bp, Homo sapiens
  Payload ID: 10618
  Gene Symbol: MEN1
  Gene Name: multiple endocrine neoplasia I
  Uniprot ID: O00255
  ENST ID: ENST00000394376
  CDS Start-End: 377-2224
tatatttatgtatatgcacatacacacaaaattaggcgggagtggtggcgcacgcctgtgatcacagctactcgggaggctgaggcacgagaatcgcttgagcccgtgaagtcgaggctgcagtgagcccagatcgagccactgcattccagcctgggcgaaagagaaagaccgtgtctcaaaacaaacaaacaaaagctactcttagcacgtgttagagtatctcgcgggcggaagtgggaaacgagtgctgcacacagacaacctgatctttttcctcataacttgccgaccgacccgtgacagcaaaaccggcagaagctcggcgacctcccaccccgagtctgcaggtagccgccgcccaccgcccgccgccatggggctgaaggccgcccagaagacgctgttcccgctgcgctccatcgacgacgtggtgcgcctgtttgctgccgagctgggccgagaggagccggacctggtgctcctttccttggtgctgggcttcgtggagcattttctggctgtcaaccgcgtcatccctaccaacgttcccgagctcaccttccagcccagccccgcccccgacccgcctggcggcctcacctactttcccgtggccgacctgtctatcatcgccgccctctatgcccgcttcaccgcccagatccgaggcgccgtcgacctgtccctctatcctcgagaagggggtgtctccagccgtgagctggtgaagaaggtctccgatgtcatatggaacagcctcagccgctcctacttcaaggatcgggcccacatccagtccctcttcagcttcatcacaggttggagcccagtaggcaccaaattggacagctccggtgtggcctttgctgtggttggggcctgccaggccctgggtctccgggatgtccacctcgccctgtctgaggatcatgcctgggtagtgtttgggcccaatggggagcagacagctgaggtcacctggcacggcaagggcaacgaggaccgcaggggccagacagtcaatgccggtgtggctgagcggagctggctgtacctgaaaggatcatacatgcgctgtgaccgcaagatggaggtggcgttcatggtgtgtgccatcaacccttccattgacctgcacaccgactcgctggagcttctgcagctgcagcagaagctgctctggctgctctatgacctgggacatctggaaaggtaccccatggccttagggaacctggcagatctagaggagctggagcccacccctggccggccagacccactcaccctctaccacaagggcattgcctcagccaagacctactatcgggatgaacacatctacccctacatgtacctggctggctaccactgtcgcaaccgcaatgtgcgggaagccctgcaggcctgggcggacacggccactgtcatccaggactacaactactgccgggaagacgaggagatctacaaggagttctttgaagtagccaatgatgtcatccccaacctgctgaaggaggcagccagcttgctggaggcgggcgaggagcggccgggggagcaaagccagggcacccagagccaaggttccgccctccaggaccctgagtgcttcgcccacctgctgcgattctacgacggcatctgcaaatgggaggagggcagtcccacgcctgtgctgcatgtgggctgggccacctttcttgtgcagtccctaggccgttttgagggacaggtgcggcagaaggtgcgcatagtgagccgagaggccgaggcggccgaggccgaggagccgtggggcgaggaagcccgggaaggccggcggcggggcccacggcgggagtccaagccagaggagcccccgccgcccaagaagccagcactggacaagggcctgggcaccggccagggtgcagtgtcaggacccccccggaagcctcctgggactgtcgctggcacagcccgaggccctgaaggtggcagcacggctcaggtgccagcacccacagcatcaccaccgccggagggtccagtgctcactttccagagtgagaagatgaagggcatgaaggagctgctggtggccaccaagatcaactcgagcgccatcaagctgcaactcacggcacagtcgcaagtgcagatgaagaagcagaaagtgtccacccctagtgactacactctgtctttcctcaagcggcagcgcaaaggcctctgaactactggggacttcggaccgcttgtggggacccaggctccgcccttagtcccccaactctgagcccatgttctgcccccagcccaaaggggacaggcctcacctctacccaaaccctaggttcccggtcccgagtacagtctgtatcaaacccacgattttctccagctcagaacccagggctctgccccagtcgttagaatataggtctcttctcccagaatcccagccggccaatggaaacctcacgctgggtcctaattaccagtctttaaaggcccagcccctagaaacccaagctcctcctcggaaccgctcacctagagccagaccaacgttactcagggctcctcccagcttgtaggagctgaggtttcacccttaacccaaggagcacaggtcccacctccagcccgggagcctaggaccactcagcccctaggagtatatttccgcacttcagaattccatatcttgcgaatccaagctccctgccccaaataacttcagtcctgctccagaatttggaaatcctagtttcctctccttcgtatcccgagtctgggacacaaaactccgcccccagcctatgagcatcctgagccccgccctcttcctgacgaaactggccccggatcagagcaggacctcccttccgaccctctgggaacctcccagaggtccagcccatctcggagcatcccggaggaaatctgcagagggttaggagtgggtgacaagagcctgatctcttcctgttttgtacatagatttatttttcagttccaagaaagatgaatacattttgtt

SEQ ID NO: 155885 - DNA, 816 bp, Homo sapiens
  Payload ID: 10618
  Gene Symbol: MEN1
  Gene Name: multiple endocrine neoplasia I
  ENST ID: ENST00000424912
  CDS Start-End: 377-816
tatatttatgtatatgcacatacacacaaaattaggcgggagtggtggcgcacgcctgtgatcacagctactcgggaggctgaggcacgagaatcgcttgagcccgtgaagtcgaggctgcagtgagcccagatcgagccactgcattccagcctgggcgaaagagaaagaccgtgtctcaaaacaaacaaacaaaagctactcttagcacgtgttagagtatctcgcgggcggaagtgggaaacgagtgctgcacacagacaacctgatctttttcctcataacttgccgaccgacccgtgacagcaaaaccggcagaagctcggcgacctcccaccccgagtctgcaggtagccgccgcccaccgcccgccgccatggggctgaaggccgcccagaagacgctgttcccgctgcgctccatcgacgacgtggtgcgcctgtttgctgccgagctgggccgagaggagccggacctggtgctcctttccttggtgctgggcttcgtggagcattttctggctgtcaaccgcgtcatccctaccaacgttcccgagctcaccttccagcccagccccgcccccgacccgcctggcggcctcacctactttcccgtggccgacctgtctatcatcgccgccctctatgcccgcttcaccgcccagatccgaggcgccgtcgacctgtccctctatcctcgagaagggggtgtctccagccgtgagctggtgaagaaggtctccgatgtcatatggaacagcctcagccgctcctacttcaaggatcgggcccacatccagtccctcttcagcttcat

SEQ ID NO: 155886 - DNA, 922 bp, Homo sapiens
  Payload ID: 10618
  Gene Symbol: MEN1
  Gene Name: multiple endocrine neoplasia I
  ENST ID: ENST00000450708
  CDS Start-End: 80-922
gacttcatgtcccagcaggctccgggcggcgtgcgccgcggtgcctagtgtgggatgccgccgcccaccgcccgccgccatggggctgaaggccgcccagaagacgctgttcccgctgcgctccatcgacgacgtggtgcgcctgtttgctgccgagctgggccgagaggagccggacctggtgctcctttccttggtgctgggcttcgtggagcattttctggctgtcaaccgcgtcatccctaccaacgttcccgagctcaccttccagcccagccccgcccccgacccgcctggcggcctcacctactttcccgtggccgacctgtctatcatcgccgccctctatgcccgcttcaccgcccagatccgaggcgccgtcgacctgtccctctatcctcgagaagggggtgtctccagccgtgagctggtgaagaaggtctccgatgtcatatggaacagcctcagccgctcctacttcaaggatcgggcccacatccagtccctcttcagcttcatcacaggcaccaaattggacagctccggtgtggcctttgctgtggttggggcctgccaggccctgggtctccgggatgtccacctcgccctgtctgaggatcatgcctgggtagtgtttgggcccaatggggagcagacagctgaggtcacctggcacggcaagggcaacgaggaccgcaggggccagacagtcaatgccggtgtggctgagcggagctggctgtacctgaaaggatcatacatgcgctgtgaccgcaagatggaggtggcgttcatggtgtgtgccatcaacccttccattgacctgcacaccgactcgctggagcttctgcagctgcagcagaagctgctctggctgctctatgacctgggacatctggaaaggtaccccatggccttaggg

SEQ ID NO: 155887 - DNA, 944 bp, Homo sapiens
  Payload ID: 10618
  Gene Symbol: MEN1
  Gene Name: multiple endocrine neoplasia I
  ENST ID: ENST00000429702
  CDS Start-End: 505-944
tatatttatgtatatgcacatacacacaaaattaggcgggagtggtggcgcacgcctgtgatcacagctactcgggaggctgaggcacgagaatcgcttgagcccgtgaagtcgaggctgcagtgagcccagatcgagccactgcattccagcctgggcgaaagagaaagaccgtgtctcaaaacaaacaaacaaaagctactcttagcacgtgttagagtatctcgcgggcggaagtgggaaacgagtgctgcacacagagtaggcatctttatatgttaacagacactgatacccagctaaagcggctgaacacatttactctctggcagtgtttaaaagtatctgtttttctcatattgttttattttaattttttctggatcaagcaacctgatctttttcctcataacttgccgaccgacccgtgacagcaaaaccggcagaagctcggcgacctcccaccccgagtctgcaggtagccgccgcccaccgcccgccgccatggggctgaaggccgcccagaagacgctgttcccgctgcgctccatcgacgacgtggtgcgcctgtttgctgccgagctgggccgagaggagccggacctggtgctcctttccttggtgctgggcttcgtggagcattttctggctgtcaaccgcgtcatccctaccaacgttcccgagctcaccttccagcccagccccgcccccgacccgcctggcggcctcacctactttcccgtggccgacctgtctatcatcgccgccctctatgcccgcttcaccgcccagatccgaggcgccgtcgacctgtccctctatcctcgagaagggggtgtctccagccgtgagctggtgaagaaggtctccgatgtcatatggaacagcctcagccgctcctacttcaaggatcgggcccacatccagtccctcttcagcttcat

SEQ ID NO: 155888 - DNA, 870 bp, Homo sapiens
  Payload ID: 10618
  Gene Symbol: MEN1
  Gene Name: multiple endocrine neoplasia I
  ENST ID: ENST00000413626
  CDS Start-End: 88-870
gcgcggaggtgggcgagggggaccgaggccaggactctccttggggtttgggggcttgacctgggccgccgcccaccgcccgccgccatggggctgaaggccgcccagaagacgctgttcccgctgcgctccatcgacgacgtggtgcgcctgtttgctgccgagctgggccgagaggagccggacctggtgctcctttccttggtgctgggcttcgtggagcattttctggctgtcaaccgcgtcatccctaccaacgttcccgagctcaccttccagcccagccccgcccccgacccgcctggcggcctcacctactttcccgtggccgacctgtctatcatcgccgccctctatgcccgcttcaccgcccagatccgaggcgccgtcgacctgtccctctatcctcgagaagggggtgtctccagccgtgagctggtgaagaaggtctccgatgtcatatggaacagcctcagccgctcctacttcaaggatcgggcccacatccagtccctcttcagcttcatcacaggcaccaaattggacagctccggtgtggcctttgctgtggttggggcctgccaggccctgggtctccgggatgtccacctcgccctgtctgaggatcatgcctgggtagtgtttgggcccaatggggagcagacagctgaggtcacctggcacggcaagggcaacgaggaccgcaggggccagacagtcaatgccggtgtggctgagcggagctggctgtacctgaaaggatcatacatgcgctgtgaccgcaagatggaggtggcgttcatggtgtgtgccatcaacccttccattgacctgcacaccgactcgctggagcttctgcagctgcagcag

SEQ ID NO: 155889 - DNA, 1107 bp, Homo sapiens
  Payload ID: 10618
  Gene Symbol: MEN1
  Gene Name: multiple endocrine neoplasia I
  ENST ID: ENST00000440873
  CDS Start-End: 69-1107
gggcggcgtgcgccgcggtgcctagtgtgggatgtaagcgcggaggccgccgcccaccgcccgccgccatggggctgaaggccgcccagaagacgctgttcccgctgcgctccatcgacgacgtggtgcgcctgtttgctgccgagctgggccgagaggagccggacctggtgctcctttccttggtgctgggcttcgtggagcattttctggctgtcaaccgcgtcatccctaccaacgttcccgagctcaccttccagcccagccccgcccccgacccgcctggcggcctcacctactttcccgtggccgacctgtctatcatcgccgccctctatgcccgcttcaccgcccagatccgaggcgccgtcgacctgtccctctatcctcgagaagggggtgtctccagccgtgagctggtgaagaaggtctccgatgtcatatggaacagcctcagccgctcctacttcaaggatcgggcccacatccagtccctcttcagcttcatcacaggcaccaaattggacagctccggtgtggcctttgctgtggttggggcctgccaggccctgggtctccgggatgtccacctcgccctgtctgaggatcatgcctgggtagtgtttgggcccaatggggagcagacagctgaggtcacctggcacggcaagggcaacgaggaccgcaggggccagacagtcaatgccggtgtggctgagcggagctggctgtacctgaaaggatcatacatgcgctgtgaccgcaagatggaggtggcgttcatggtgtgtgccatcaacccttccattgacctgcacaccgactcgctggagcttctgcagctgcagcagaagctgctctggctgctctatgacctgggacatctggaaaggtaccccatggccttagggaacctggcagatctagaggagctggagcccacccctggccggccagacccactcaccctctaccacaagggcattgcctcagccaagacctactatcgggatgaacacatctacccctacatgtacctggctggctaccactgtcgcaaccgcaatgtgcgggaagccctgcaggcctgggcggacacggccactg

SEQ ID NO: 155890 - DNA, 2183 bp, Homo sapiens
  Payload ID: 10619
  Gene Symbol: MINPP1
  Gene Name: multiple inositol-polyphosphate phosphatase 1
  Uniprot ID: Q9UNW1
  ENST ID: ENST00000371994
  CDS Start-End: 42-980
atctgcagctggctcggcgcactccactgaccgtcccgacgatgctacgcgcgcccggctgcctcctccggacctccgtagcgcctgccgcggccctggctgcggcgctgctctcgtcgcttgcgcgctgctctcttctagagccgagggacccggtggcctcgtcgctcagcccctatttcggcaccaagactcgctacgaggatgtcaaccccgtgctattgtcgggccccgaggctccgtggcgggaccctgagctgctggaggggacctgcaccccggtgcagctggtcgccctcattcgccacggcacccgctaccccacggtcaaacagatccgcaagctgaggcagctgcacgggttgctgcaggcccgcgggtccagggatggcggggctagtagtaccggcagccgcgacctgggtgcagcgctggccgactggcctttgtggtacgcggactggatggacgggcagctagtagagaagggacggcaggatatgcgacagctggcgctgcgtctggcctcgctcttcccggcccttttcagccgtgagaactacggccgcctgcggctcatcaccagttccaagcaccgctgcatggatagcagcgccgccttcctgcaggggctgtggcagcactaccaccctggcttgccgccgccggacgtcgcagatatggagtttggacctccaacagttaatgataaactaatgagattttttgatcactgtgagaagtttttaactgaagtagaaaaaaatgctacagctctttatcacgtggaagccttcaaaactggaccagaaatgcagaacattttaaaaaaagttgcagctactttgcaagtgccagtaaatgatttaaatgcaggtctcagccaatttcttctccagtcatcctccagtttggtcatgcagagactcttcttccactgctttctctcatgggctacttcaaagacaaggaacccctaacagcgtacaattacaaaaaacaaatgcatcggaagttccgaagtggtctcattgtaccttatgcctcgaacctgatatttgtgctttaccactgtgaaaatgctaagactcctaaagaacaattccgagtgcagatgttattaaatgaaaaggtgttacctttggcttactcacaagaaactgtttcattttatgaagatctgaagaaccactacaaggacatccttcagagttgtcaaaccagtgaagaatgtgaattagcaagggctaacagtacatctgatgaactatgagtaactgaagaacatttttaattctttaggaatctgcaatgagtgattacatgcttgtaataggtaggcaattccttgattacaggaagcttttatattacttgagtatttctgtcttttcacagaaaaacattgggtttctctctgggtttggacatgaaatgtaagaaaagatttttcactggagcagctctcttaaggagaaacaaatctatttagagaaacagctggccctgcaaatgtttacagaaatgaaattcttcctacttatataagaaatctcacactgagatagaattgtgatttcataataacacttgaaaagtgctggagtaacaaaatatctcagttggaccatccttaacttgattgaactgtctaggaactttacagattgttctgcagttctctcttcttttcctcaggtaggacagctctagcattttcttaatcaggaatattgtggtaagctgggagtatcactctggaagaaagtaacatctccagatgagaatttgaaacaagaaacagagtgttgtaaaaggacaccttcactgaagcaagtcggaaagtacaatgaaaataaatatttttggtatttatttatgaaatatttgaacattttttcaataattcctttttacttctaggaagtctcaaaagaccatcttaaattattatatgtttggacaattagcaacaagtcagatagttagaatcgaagtttttcaaatccattgcttagctaactttttcattctgtcacttggcttcgatttttatattttcctattatatgaaatgtatcttttggttgtttgatttttctttctttctttgtaaatagttctgagttctgtcaaatgccgtgaaagtatttgctataataaagaaaattcttgtgacttta

SEQ ID NO: 155891 - DNA, 2415 bp, Homo sapiens
  Payload ID: 10619
  Gene Symbol: MINPP1
  Gene Name: multiple inositol-polyphosphate phosphatase 1
  Uniprot ID: Q9UNW1
  ENST ID: ENST00000371996
  CDS Start-End: 42-1505
atctgcagctggctcggcgcactccactgaccgtcccgacgatgctacgcgcgcccggctgcctcctccggacctccgtagcgcctgccgcggccctggctgcggcgctgctctcgtcgcttgcgcgctgctctcttctagagccgagggacccggtggcctcgtcgctcagcccctatttcggcaccaagactcgctacgaggatgtcaaccccgtgctattgtcgggccccgaggctccgtggcgggaccctgagctgctggaggggacctgcaccccggtgcagctggtcgccctcattcgccacggcacccgctaccccacggtcaaacagatccgcaagctgaggcagctgcacgggttgctgcaggcccgcgggtccagggatggcggggctagtagtaccggcagccgcgacctgggtgcagcgctggccgactggcctttgtggtacgcggactggatggacgggcagctagtagagaagggacggcaggatatgcgacagctggcgctgcgtctggcctcgctcttcccggcccttttcagccgtgagaactacggccgcctgcggctcatcaccagttccaagcaccgctgcatggatagcagcgccgccttcctgcaggggctgtggcagcactaccaccctggcttgccgccgccggacgtcgcagatatggagtttggacctccaacagttaatgataaactaatgagattttttgatcactgtgagaagtttttaactgaagtagaaaaaaatgctacagctctttatcacgtggaagccttcaaaactggaccagaaatgcagaacattttaaaaaaagttgcagctactttgcaagtgccagtaaatgatttaaatgcagatttaattcaagtagcctttttcacctgttcatttgacctggcaattaaaggtgttaaatctccttggtgtgatgtttttgacatagatgatgcaaaggtattagaatatttaaatgatctgaaacaatattggaaaagaggatatgggtatactattaacagtcgatccagctgcaccttgtttcaggatatctttcagcacttggacaaagcagttgaacagaaacaaaggtctcagccaatttcttctccagtcatcctccagtttggtcatgcagagactcttcttccactgctttctctcatgggctacttcaaagacaaggaacccctaacagcgtacaattacaaaaaacaaatgcatcggaagttccgaagtggtctcattgtaccttatgcctcgaacctgatatttgtgctttaccactgtgaaaatgctaagactcctaaagaacaattccgagtgcagatgttattaaatgaaaaggtgttacctttggcttactcacaagaaactgtttcattttatgaagatctgaagaaccactacaaggacatccttcagagttgtcaaaccagtgaagaatgtgaattagcaagggctaacagtacatctgatgaactatgagtaactgaagaacatttttaattctttaggaatctgcaatgagtgattacatgcttgtaataggtaggcaattccttgattacaggaagcttttatattacttgagtatttctgtcttttcacagaaaaacattgggtttctctctgggtttggacatgaaatgtaagaaaagatttttcactggagcagctctcttaaggagaaacaaatctatttagagaaacagctggccctgcaaatgtttacagaaatgaaattcttcctacttatataagaaatctcacactgagatagaattgtgatttcataataacacttgaaaagtgctggagtaacaaaatatctcagttggaccatccttaacttgattgaactgtctaggaactttacagattgttctgcagttctctcttcttttcctcaggtaggacagctctagcattttcttaatcaggaatattgtggtaagctgggagtatcactctggaagaaagtaacatctccagatgagaatttgaaacaagaaacagagtgttgtaaaaggacaccttcactgaagcaagtcggaaagtacaatgaaaataaatatttttggtatttatttatgaaatatttgaacattttttcaataattcctttttacttctaggaagtctcaaaagaccatcttaaattattatatgtttggacaattagcaacaagtcagatagttagaatcgaagtttttcaaatccattgcttagctaactttttcattctgtcacttggcttcgatttttatattttcctattatatgaaatgtatcttttggttgtttgatttttctttctttctttgtaaatagttctgagttctgtcaaatgccgtgaaagtatttgctataataaagaaaattcttgtgacttta

SEQ ID NO: 155892 - DNA, 2215 bp, Homo sapiens
  Payload ID: 10619
  Gene Symbol: MINPP1
  Gene Name: multiple inositol-polyphosphate phosphatase 1
  Uniprot ID: Q9UNW1
  ENST ID: ENST00000536010
  CDS Start-End: 373-1233
gcgttttgtgctgctgtcagtagtttttgtccaaagcagaatctttgtaaagtaatacagagttgggaaggttaattgagaaaataaaatactctgtttagactttggcttagagtgaaaaaatagattccatatgttgaattctctctcaccttgtaagtagaaactttgctgatttttagtttgctttctaaagttttccgtgcctgacagaaacagtacttattaatgtatgatgcaatttcattgcgtagcatctctacaacacatttaatcttcaatctctatttctttagccttttctagctattctcatgcgttacagccattataaatggggaataattttaccccaagagtttcctgaccaatatgtgcttatttcagctgtgcggattagtaagatatatggagtttggacctccaacagttaatgataaactaatgagattttttgatcactgtgagaagtttttaactgaagtagaaaaaaatgctacagctctttatcacgtggaagccttcaaaactggaccagaaatgcagaacattttaaaaaaagttgcagctactttgcaagtgccagtaaatgatttaaatgcagatttaattcaagtagcctttttcacctgttcatttgacctggcaattaaaggtgttaaatctccttggtgtgatgtttttgacatagatgatgcaaaggtattagaatatttaaatgatctgaaacaatattggaaaagaggatatgggtatactattaacagtcgatccagctgcaccttgtttcaggatatctttcagcacttggacaaagcagttgaacagaaacaaaggtctcagccaatttcttctccagtcatcctccagtttggtcatgcagagactcttcttccactgctttctctcatgggctacttcaaagacaaggaacccctaacagcgtacaattacaaaaaacaaatgcatcggaagttccgaagtggtctcattgtaccttatgcctcgaacctgatatttgtgctttaccactgtgaaaatgctaagactcctaaagaacaattccgagtgcagatgttattaaatgaaaaggtgttacctttggcttactcacaagaaactgtttcattttatgaagatctgaagaaccactacaaggacatccttcagagttgtcaaaccagtgaagaatgtgaattagcaagggctaacagtacatctgatgaactatgagtaactgaagaacatttttaattctttaggaatctgcaatgagtgattacatgcttgtaataggtaggcaattccttgattacaggaagcttttatattacttgagtatttctgtcttttcacagaaaaacattgggtttctctctgggtttggacatgaaatgtaagaaaagatttttcactggagcagctctcttaaggagaaacaaatctatttagagaaacagctggccctgcaaatgtttacagaaatgaaattcttcctacttatataagaaatctcacactgagatagaattgtgatttcataataacacttgaaaagtgctggagtaacaaaatatctcagttggaccatccttaacttgattgaactgtctaggaactttacagattgttctgcagttctctcttcttttcctcaggtaggacagctctagcattttcttaatcaggaatattgtggtaagctgggagtatcactctggaagaaagtaacatctccagatgagaatttgaaacaagaaacagagtgttgtaaaaggacaccttcactgaagcaagtcggaaagtacaatgaaaataaatatttttggtatttatttatgaaatatttgaacattttttcaataattcctttttacttctaggaagtctcaaaagaccatcttaaattattatatgtttggacaattagcaacaagtcagatagttagaatcgaagtttttcaaatccattgcttagctaactttttcattctgtcacttggcttcgatttttatattttcctattatatgaaatgtatcttttggttgtttgatttttctttctttctttgtaaatagttctgagttctgtcaaatgccgtgaaagtatttgctataataaagaaaattcttgtgactttactaccaggacttttctcttccccatgtcaaaatacaatcaataattgatggtaaaagtttggaaattcaagc

SEQ ID NO: 155893 - DNA, 7722 bp, Homo sapiens
  Payload ID: 10620
  Gene Symbol: MPDZ
  Gene Name: multiple PDZ domain protein
  Uniprot ID: O75970
  ENST ID: ENST00000319217
  CDS Start-End: 249-6461
ccgcgggattaagtttctcagtcacgcgtgagtgtctgtgcgttttgatccgaagctcctcgccgggtcgttacttcagaagagaagacagtgagcgtgggcgaggcgaggcatccagaggccccggcgacccctgctccccagtcctccgccccctcgcgtcgcggccctgggcgggcgccgcgagccggagttccattttaattgctgttaatcatttcagagaagaacactgaactttgaaaaaaatgttggaagccattgacaaaaatcgggccctgcatgcagcagagcgcttgcaaaccaagctgcgagaacgtggggatgtagcaaatgaagacaaactgagccttctgaagtcagtcctgcagagccctctcttcagtcagattctgagccttcagacttctgtacagcagctgaaagaccaggtaaatattgcaacttcagcaacttcaaatattgaatatgcccacgttcctcatctcagcccagctgtgattcctactctgcaaaatgaatcgtttttattatccccaaacaatgggaatctggaagcacttacaggacctggtattccacacattaatgggaaacctgcttgtgatgaatttgatcagcttatcaaaaatatggcccagggtcgccatgtagaagtttttgagctcctcaaacctccatctggaggccttgggtttagtgttgtgggactaagaagtgaaaacagaggagagctgggaatatttgttcaagagatacaagagggcagtgtggcccatagagatggaagattgaaagaaactgatcaaattcttgctatcaatggacaggctcttgatcagacaattacacatcagcaggctatcagcatcctgcagaaagccaaagatactgtccagctagttattgccagaggctcattgcctcagcttgtcagccccatagtttcccgttctccatctgcagccagcacaatttcagctcactctaatccggttcactggcaacacatggaaacgattgaattggtgaatgatggatctggtttgggatttggcatcataggaggaaaagcaactggtgtgatagtaaaaaccattctgcctggaggagtagctgatcagcatgggcgtttatgcagtggagaccacattctaaagattggtgacacagatctagcaggaatgagcagtgagcaagtagcacaagtccttaggcaatgtggaaatagagttaagttgatgattgcaagaggtgccatagaagaacgtacagcacccactgctttgggcatcaccctctcctcatccccaacttcaacaccagagttgcgggttgatgcttctactcagaaaggtgaagaaagtgagacatttgatgtagaactcactaaaaatgtccaaggattaggaattaccattgctggctacattggagataaaaaattggaaccttcaggaatctttgtaaagagcattacaaaaagcagtgccgttgagcatgatggaagaatccaaattggagaccaaattatagcagtagatggcacaaaccttcagggttttactaatcagcaagcagtagaggtattgcgacatacaggacaaactgtgctcctgacactaatgaggagaggaatgaagcaggaagccgagctcatgtcaagggaagacgtcacaaaagatgcagatttgtctcctgttaatgccagcataatcaaagaaaattatgaaaaagatgaagattttttatcttcgacgagaaacaccaacatattaccaactgaagaagaagggtatccattactgtcagctgagatagaagaaatagaagatgcacaaaaacaagaagctgctctgctgacaaaatggcaaaggattatgggaattaactatgaaatagtggtggcccatgtgagcaagtttagtgagaacagtggattggggataagcctggaagcgacagtgggacatcattttatccgatctgttctaccagagggtcctgttggacacagcgggaagctcttcagtggagacgagctattggaagtaaatggcataactttacttggggaaaatcaccaagatgtggtgaatatcttaaaagaactgcctatagaagtgacaatggtgtgctgtcgtcgaactgtgccacccaccacccaatcagaattggatagcctggacttatgtgatattgagctaacagaaaagcctcacgtagatctaggtgagttcatcgggtcatcagagacagaggatccagtgctggcgatgactgatgcgggtcagagtacagaagaggttcaagcacctttggccatgtgggaggctggcattcagcacatagagctggagaaagggagcaaaggacttggttttagcattttagattatcaggatccaattgatccagcaagcactgtgattataattcgttctttggtgcctggcggcattgctgaaaaggatggacgacttcttcctggtgaccgactcatgtttgtaaacgatgttaacttggaaaacagcagtcttgaggaagctgtagaagcactgaagggagcaccgtcagggactgtgagaataggagttgctaagcctttacccctttcaccagaagaaggttatgtttctgctaaggaggattcctttctctacccaccacactcctgtgaggaagcagggctggctgacaaacccctcttcagggctgacttggctctggtgggcacaaatgatgctgacttagtagatgaatccacatttgagtctccatactctcctgaaaatgacagcatctactctactcaagcctctattttatctcttcatggcagttcttgtggtgatggcctgaactatggttcttcccttccatcatctcctcctaaggatgttattgaaaattcttgtgatccagtacttgatctgcatatgtctctggaggaactatatacccagaatctcctgcaaagacaggatgagaatacaccttcggtggacataagtatggggcctgcttctggctttactataaatgactacacacctgcaaatgctattgaacaacaatatgaatgtgaaaacacaatagtgtggactgaatctcatttaccaagtgaagttatatcaagtgcagaacttccttctgtgctacccgattcagctggaaagggctctgagtacctgcttgaacagagctccctggcctgtaatgctgagtgtgtcatgcttcaaaatgtatctaaagaatcttttgaaaggactattaatatagcaaaaggcaattctagcctaggaatgacagttagtgctaataaagatggcttggggatgatcgttcgaagcattattcatggaggtgccattagtcgagatggccggattgccattggggactgcatcttgtccattaatgaagagtctaccatcagtgtaaccaatgcccaggcacgagctatgttgagaagacattctctcattggccctgacataaaaattacttatgtgcctgcagaacatttggaagagttcaaaataagcttgggacaacaatctggaagagtaatggcactggatattttttcttcatacactggcagagacattccagaattaccagagcgagaagagggagagggtgaagaaagcgaacttcaaaacacagcatatagcaattggaatcagcccaggcgggtggaactctggagagaaccaagcaaatccttaggcatcagcattgttggtggacgagggatggggagtcggctaagcaatggagaagtgatgaggggcattttcatcaaacatgttctggaagatagtccagctggcaaaaatggaaccttgaaacctggagatagaatcgtagaggtggatggaatggacctcagagatgcaagccatgaacaagctgtggaagccattcggaaagcaggcaaccctgtagtctttatggtacagagcattataaacagaccaaggaaatcccctttgccttccttgctgcacaacctttaccctaagtacaacttcagcagcactaacccatttgctgactctctacaaatcaacgccgacaaggcacccagtcagtcagagtcagagccagagaaggctccattgtgcagtgtgcccccaccccctccttcagcctttgccgaaatgggtagtgatcacacacagtcatctgcaagcaaaatctcacaagatgtggacaaagaggatgagtttggttacagctggaaaaatatcagagagcgttatggaaccctaacaggcgagctgcatatgattgaactggagaaaggtcatagtggtttgggcctaagtcttgctgggaacaaagaccgatccaggatgagtgtcttcatagtggggattgatccaaatggagctgcaggaaaagatggtcgattgcaaattgcagatgagcttctagagatcaatggtcagattttatatggaagaagtcatcagaatgcctcatcaatcattaaatgtgccccttctaaagtgaaaataatttttatcagaaataaagatgcagtgaatcagatggccgtatgtcctggaaatgcagtagaacctttgccttctaactcagaaaatcttcaaaataaggagacagagccaactgttactacttctgatgcagctgtggacctcagttcatttaaaaatgtgcaacatctggagcttcccaaggatcaggggggtttgggtattgctatcagcgaagaagatacactcagtggagtcatcataaagagcttaacagagcatggggtagcagccacggatggacgactcaaagtcggagatcagatactggctgtagatgatgaaattgttgttggttaccctattgaaaagtttattagccttctgaagacagcaaagatgacagtaaaacttaccatccatgctgagaatccagattcccaggctgttccttcagcagctggtgcagccagtggagaaaaaaagaacagctcccagtctctgatggtcccacagtctggctccccagaaccggagtccatccgaaatacaagcagatcatcaacaccagcaatttttgcttctgatcctgcaacctgccccattatccctggctgcgaaacaaccatcgagatttccaaagggcgaacagggctgggcctgagcatcgttgggggttcagacacgctgctgggtgccattattatccatgaagtttatgaagaaggagcagcatgtaaagatggaagactctgggctggagatcagatcttagaggtgaatggaattgacttgagaaaggccacacatgatgaagcaatcaatgtcctgagacagacgccacagagagtgcgcctgacactctacagagatgaggccccatacaaagaggaggaagtgtgtgacaccctcactattgagctgcagaagaagccgggaaaaggcctaggattaagtattgttggtaaaagaaacgatactggagtatttgtgtcagacattgtcaaaggaggaattgcagatgccgatggaagactgatgcagggagaccagatattaatggtgaatggggaagacgttcgtaatgccacccaagaagcggttgccgctttgctaaagtgttccctaggcacagtaaccttggaagttggaagaatcaaagctggtccattccattcagagaggaggccatctcaaagcagccaggtgagtgaaggcagcctgtcatctttcacttttccactctctggatccagtacatctgagtcactggaaagtagctcaaagaagaatgcattggcatctgaaatacagggattaagaacagtcgaaatgaaaaagggccctactgactcactgggaatcagcatcgctggaggagtaggcagcccacttggtgatgtgcctatatttattgcaatgatgcacccaactggagttgcagcacagacccaaaaactcagagttggggataggattgtcaccatctgtggcacatccactgagggcatgactcacacccaagcagttaacctactgaaaaatgcatctggctccattgaaatgcaggtggttgctggaggagacgtgagtgtggtcacaggtcatcagcaggagcctgcaagttccagtctttctttcactgggctgacgtcaagcagtatatttcaggatgatttaggacctcctcaatgtaagtctattacactagagcgaggaccagatggcttaggcttcagtatagttggaggatatggcagccctcatggagacttacccatttatgttaaaacagtgtttgcaaagggagcagcctctgaagacggacgtctgaaaaggggcgatcagatcattgctgtcaatgggcagagtctagaaggagtcacccatgaagaagctgttgccatccttaaacggacaaaaggcactgtcactttgatggttctctcttgaattggctgccagaattgaaccaacccaacccctagctcacctcctactgtaaagagaatgcactggtcctgacaatttttatgctgtgttcagccgggtcttcaaaactgtaggggggaaataacacttaagtttctttttctcatctagaaatgctttccttactgacaacctaacatcatttttcttttcttcttgcattttgtgaacttaaagagaaggaatatttgtgtaggtgaatctcgtttttatttgtggagatatctaatgttttgtagtcacatgggcaagaattattacatgctaagctggttagtataaagaaagataattctaaagctaaccaaagaaaatggcttcagtaaattaggatgaaaaatgaaaatataaaataaagaagaaaatctcggggagtttaaaaaaaatgcctcaatttggcaatctacctcctctccccaccccaaactaaaaaaagaaaaaaaggttttctaatgaaaatctttaaaaatactgtcagtattttaaaattttcaacagtattataaaaacattgcatctccccacctctaatatgcatatatatttttcctgctaaaattggtttctacaattgagtaaatggcaaatacatgaagcaatgtccctaaattttataaagaaattatatttaatgcacatttcaattttcattcttatttttgaccttttgtaaaatattttcatgttgctataagtaaatgatgatgccaccccatgttgactatggtttttctagaaagcaactatgctgctaaccatagaggaacatagaagggttccagaatctttagtgctggttttaacaaccgatgcaacattaaaaatgtgttagtgtgctgtgcaattggttttcaattcatattaatcttaatgacagagaacaatgtgttactaattattttggttgtatgccattagtaaattgatagaaaaattaaggggattaacataacttcatttcattgacttatattaacatcttataatacaatagtttaagactaagggaaacagatggagctgtttattgagacaactggtgaggaattatcatgtgttcattcccattttagagcgtgaaactcctacattagaatatataaagtcactttaaatatctatatttgtaacagaagtagtgtacagatattttattacagcatttttgtgtaaatgcagaattaaagtgaataaataagaattttcagtggtgcacaaataa

SEQ ID NO: 155894 - DNA, 7589 bp, Homo sapiens
  Payload ID: 10620
  Gene Symbol: MPDZ
  Gene Name: multiple PDZ domain protein
  Uniprot ID: O75970
  ENST ID: ENST00000381022
  CDS Start-End: 223-6336
cgtgagtgtctgtgcgttttgatccgaagctcctcgccgggtcgttacttcagaagagaagacagtgagcgtgggcgaggcgaggcatccagaggccccggcgacccctgctccccagtcctccgccccctcgcgtcgcggccctgggcgggcgccgcgagccggagttccattttaattgctgttaatcatttcagagaagaacactgaactttgaaaaaaatgttggaagccattgacaaaaatcgggccctgcatgcagcagagcgcttgcaaaccaagctgcgagaacgtggggatgtagcaaatgaagacaaactgagccttctgaagtcagtcctgcagagccctctcttcagtcagattctgagccttcagacttctgtacagcagctgaaagaccaggtaaatattgcaacttcagcaacttcaaatattgaatatgcccacgttcctcatctcagcccagctgtgattcctactctgcaaaatgaatcgtttttattatccccaaacaatgggaatctggaagcacttacaggacctggtattccacacattaatgggaaacctgcttgtgatgaatttgatcagcttatcaaaaatatggcccagggtcgccatgtagaagtttttgagctcctcaaacctccatctggaggccttgggtttagtgttgtgggactaagaagtgaaaacagaggagagctgggaatatttgttcaagagatacaagagggcagtgtggcccatagagatggaagattgaaagaaactgatcaaattcttgctatcaatggacaggctcttgatcagacaattacacatcagcaggctatcagcatcctgcagaaagccaaagatactgtccagctagttattgccagaggctcattgcctcagcttgtcagccccatagtttcccgttctccatctgcagccagcacaatttcagctcactctaatccggttcactggcaacacatggaaacgattgaattggtgaatgatggatctggtttgggatttggcatcataggaggaaaagcaactggtgtgatagtaaaaaccattctgcctggaggagtagctgatcagcatgggcgtttatgcagtggagaccacattctaaagattggtgacacagatctagcaggaatgagcagtgagcaagtagcacaagtccttaggcaatgtggaaatagagttaagttgatgattgcaagaggtgccatagaagaacgtacagcacccactgctttgggcatcaccctctcctcatccccaacttcaacaccagagttgcgggttgatgcttctactcagaaaggtgaagaaagtgagacatttgatgtagaactcactaaaaatgtccaaggattaggaattaccattgctggctacattggagataaaaaattggaaccttcaggaatctttgtaaagagcattacaaaaagcagtgccgttgagcatgatggaagaatccaaattggagaccaaattatagcagtagatggcacaaaccttcagggttttactaatcagcaagcagtagaggtattgcgacatacaggacaaactgtgctcctgacactaatgaggagaggaatgaagcaggaagccgagctcatgtcaagggaagacgtcacaaaagatgcagatttgtctcctgttaatgccagcataatcaaagaaaattatgaaaaagatgaagattttttatcttcgacgagaaacaccaacatattaccaactgaagaagaagggtatccattactgtcagctgagatagaagaaatagaagatgcacaaaaacaagaagctgctctgctgacaaaatggcaaaggattatgggaattaactatgaaatagtggtggcccatgtgagcaagtttagtgagaacagtggattggggataagcctggaagcgacagtgggacatcattttatccgatctgttctaccagagggtcctgttggacacagcgggaagctcttcagtggagacgagctattggaagtaaatggcataactttacttggggaaaatcaccaagatgtggtgaatatcttaaaagaactgcctatagaagtgacaatggtgtgctgtcgtcgaactgtgccacccaccacccaatcagaattggatagcctggacttatgtgatattgagctaacagaaaagcctcacgtagatctaggtgagttcatcgggtcatcagagacagaggatccagtgctggcgatgactgatgcgggtcagagtacagaagaggttcaagcacctttggccatgtgggaggctggcattcagcacatagagctggagaaagggagcaaaggacttggttttagcattttagattatcaggatccaattgatccagcaagcactgtgattataattcgttctttggtgcctggcggcattgctgaaaaggatggacgacttcttcctggtgaccgactcatgtttgtaaacgatgttaacttggaaaacagcagtcttgaggaagctgtagaagcactgaagggagcaccgtcagggactgtgagaataggagttgctaagcctttacccctttcaccagaagaaggttatgtttctgctaaggaggattcctttctctacccaccacactcctgtgaggaagcagggctggctgacaaacccctcttcagggctgacttggctctggtgggcacaaatgatgctgacttagtagatgaatccacatttgagtctccatactctcctgaaaatgacagcatctactctactcaagcctctattttatctcttcatggcagttcttgtggtgatggcctgaactatggttcttcccttccatcatctcctcctaaggatgttattgaaaattcttgtgatccagtacttgatctgcatatgtctctggaggaactatatacccagaatctcctgcaaagacaggatgagaatacaccttcggtggacataagtatggggcctgcttctggctttactataaatgactacacacctgcaaatgctattgaacaacaatatgaatgtgaaaacacaatagtgtggactgaatctcatttaccaagtgaagttatatcaagtgcagaacttccttctgtgctacccgattcagctggaaagggctctgagtacctgcttgaacagagctccctggcctgtaatgctgagtgtgtcatgcttcaaaatgtatctaaagaatcttttgaaaggactattaatatagcaaaaggcaattctagcctaggaatgacagttagtgctaataaagatggcttggggatgatcgttcgaagcattattcatggaggtgccattagtcgagatggccggattgccattggggactgcatcttgtccattaatgaagagtctaccatcagtgtaaccaatgcccaggcacgagctatgttgagaagacattctctcattggccctgacataaaaattacttatgtgcctgcagaacatttggaagagttcaaaataagcttgggacaacaatctggaagagtaatggcactggatattttttcttcatacactggcagagacattccagaattaccagagcgagaagagggagagggtgaagaaagcgaacttcaaaacacagcatatagcaattggaatcagcccaggcgggtggaactctggagagaaccaagcaaatccttaggcatcagcattgttggtggacgagggatggggagtcggctaagcaatggagaagtgatgaggggcattttcatcaaacatgttctggaagatagtccagctggcaaaaatggaaccttgaaacctggagatagaatcgtagaggtggatggaatggacctcagagatgcaagccatgaacaagctgtggaagccattcggaaagcaggcaaccctgtagtctttatggtacagagcattataaacagaccaagggcacccagtcagtcagagtcagagccagagaaggctccattgtgcagtgtgcccccaccccctccttcagcctttgccgaaatgggtagtgatcacacacagtcatctgcaagcaaaatctcacaagatgtggacaaagaggatgagtttggttacagctggaaaaatatcagagagcgttatggaaccctaacaggcgagctgcatatgattgaactggagaaaggtcatagtggtttgggcctaagtcttgctgggaacaaagaccgatccaggatgagtgtcttcatagtggggattgatccaaatggagctgcaggaaaagatggtcgattgcaaattgcagatgagcttctagagatcaatggtcagattttatatggaagaagtcatcagaatgcctcatcaatcattaaatgtgccccttctaaagtgaaaataatttttatcagaaataaagatgcagtgaatcagatggccgtatgtcctggaaatgcagtagaacctttgccttctaactcagaaaatcttcaaaataaggagacagagccaactgttactacttctgatgcagctgtggacctcagttcatttaaaaatgtgcaacatctggagcttcccaaggatcaggggggtttgggtattgctatcagcgaagaagatacactcagtggagtcatcataaagagcttaacagagcatggggtagcagccacggatggacgactcaaagtcggagatcagatactggctgtagatgatgaaattgttgttggttaccctattgaaaagtttattagccttctgaagacagcaaagatgacagtaaaacttaccatccatgctgagaatccagattcccaggctgttccttcagcagctggtgcagccagtggagaaaaaaagaacagctcccagtctctgatggtcccacagtctggctccccagaaccggagtccatccgaaatacaagcagatcatcaacaccagcaatttttgcttctgatcctgcaacctgccccattatccctggctgcgaaacaaccatcgagatttccaaagggcgaacagggctgggcctgagcatcgttgggggttcagacacgctgctgggtgccattattatccatgaagtttatgaagaaggagcagcatgtaaagatggaagactctgggctggagatcagatcttagaggtgaatggaattgacttgagaaaggccacacatgatgaagcaatcaatgtcctgagacagacgccacagagagtgcgcctgacactctacagagatgaggccccatacaaagaggaggaagtgtgtgacaccctcactattgagctgcagaagaagccgggaaaaggcctaggattaagtattgttggtaaaagaaacgatactggagtatttgtgtcagacattgtcaaaggaggaattgcagatgccgatggaagactgatgcagggagaccagatattaatggtgaatggggaagacgttcgtaatgccacccaagaagcggttgccgctttgctaaagtgttccctaggcacagtaaccttggaagttggaagaatcaaagctggtccattccattcagagaggaggccatctcaaagcagccaggtgagtgaaggcagcctgtcatctttcacttttccactctctggatccagtacatctgagtcactggaaagtagctcaaagaagaatgcattggcatctgaaatacagggattaagaacagtcgaaatgaaaaagggccctactgactcactgggaatcagcatcgctggaggagtaggcagcccacttggtgatgtgcctatatttattgcaatgatgcacccaactggagttgcagcacagacccaaaaactcagagttggggataggattgtcaccatctgtggcacatccactgagggcatgactcacacccaagcagttaacctactgaaaaatgcatctggctccattgaaatgcaggtggttgctggaggagacgtgagtgtggtcacaggtcatcagcaggagcctgcaagttccagtctttctttcactgggctgacgtcaagcagtatatttcaggatgatttaggacctcctcaatgtaagtctattacactagagcgaggaccagatggcttaggcttcagtatagttggaggatatggcagccctcatggagacttacccatttatgttaaaacagtgtttgcaaagggagcagcctctgaagacggacgtctgaaaaggggcgatcagatcattgctgtcaatgggcagagtctagaaggagtcacccatgaagaagctgttgccatccttaaacggacaaaaggcactgtcactttgatggttctctcttgaattggctgccagaattgaaccaacccaacccctagctcacctcctactgtaaagagaatgcactggtcctgacaatttttatgctgtgttcagccgggtcttcaaaactgtaggggggaaataacacttaagtttctttttctcatctagaaatgctttccttactgacaacctaacatcatttttcttttcttcttgcattttgtgaacttaaagagaaggaatatttgtgtaggtgaatctcgtttttatttgtggagatatctaatgttttgtagtcacatgggcaagaattattacatgctaagctggttagtataaagaaagataattctaaagctaaccaaagaaaatggcttcagtaaattaggatgaaaaatgaaaatataaaataaagaagaaaatctcggggagtttaaaaaaaatgcctcaatttggcaatctacctcctctccccaccccaaactaaaaaaagaaaaaaaggttttctaatgaaaatctttaaaaatactgtcagtattttaaaattttcaacagtattataaaaacattgcatctccccacctctaatatgcatatatatttttcctgctaaaattggtttctacaattgagtaaatggcaaatacatgaagcaatgtccctaaattttataaagaaattatatttaatgcacatttcaattttcattcttatttttgaccttttgtaaaatattttcatgttgctataagtaaatgatgatgccaccccatgttgactatggtttttctagaaagcaactatgctgctaaccatagaggaacatagaagggttccagaatctttagtgctggttttaacaaccgatgcaacattaaaaatgtgttagtgtgctgtgcaattggttttcaattcatattaatcttaatgacagagaacaatgtgttactaattattttggttgtatgccattagtaaattgatagaaaaattaaggggattaacataacttcatttcattgacttatattaacatcttataatacaatagtttaagactaagggaaacagatggagctgtttattgagacaactggtgaggaattatcatgtgttcattcccattttagagcgtgaaactcctacattagaatatataaagtcactttaaatatctatatttgtaacagaagtagtgtacagatattttattacagcatttttgtgtaaatgcagaattaaagtgaataaataagaattttcagtggtgc

SEQ ID NO: 155895 - DNA, 786 bp, Homo sapiens
  Payload ID: 10620
  Gene Symbol: MPDZ
  Gene Name: multiple PDZ domain protein
  ENST ID: ENST00000433359
  CDS Start-End: 212-786
ttttaactacatatgtatgcatctcacattcagcacaagacattgacatttgttaacaccattgtaaaaagatgccgcggcgtatgcttcacattctagattttctgcagcacctgctgacgatcgagcccccttttatgtaattacttatgtgcctgcagaacatttggaagagttcaaaataagcttgggacaacaatctggaagagtaatggcactggatattttttcttcatacactggcagagacattccagaattaccagagcgagaagagggagagggtgaagaaagcgaacttcaaaacacagcatatagcaattggaatcagcccaggcgggtggaactctggagagaaccaagcaaatccttaggcatcagcattgttggtggacgagggatggggagtcggctaagcaatggagaagtgatgaggggcattttcatcaaacatgttctggaagatagtccagctggcaaaaatggaaccttgaaacctggagatagaatcgtagaggcacccagtcagtcagagtcagagccagagaaggctccattgtgcagtgtgcccccaccccctccttcagcctttgccgaaatgggtagtgatcacacacagtcatctgcaagcaaaatctcacaagatgtggacaaagaggatgagtttggttacagctggaaaaatatcagagagcgttatggaaccctaacaggcgagctgcatatgattgaactggagaaaggtcatagtggtttgggcctaagtcttgctgggaacaaagaccg

SEQ ID NO: 155896 - DNA, 581 bp, Homo sapiens
  Payload ID: 10620
  Gene Symbol: MPDZ
  Gene Name: multiple PDZ domain protein
  ENST ID: ENST00000437441
  CDS Start-End: 1-239
tttttgcttctgatcctgcaacctgccccattatccctggctgcgaaacaaccatcgagatttccaaagggcgaacagggctgggcctgagcatcgttgggggttcagacacgctgctgggtgccattattatccatgaagtttatgaagaaggagcagcatgtaaagatggaagactctgggctggagatcagatcttagagtcagtgtcccatttctgtacaggtgaatggaattgacttgagaaaggccacacatgatgaagcaatcaatgtcctgagacagacgccacagagagtgcgcctgacactctacagagatgaggccccatacaaagaggaggaagtgtgtgacaccctcactattgagctgcagaagaagccgggaaaaggcctaggattaagtattgttggtaaaagaaacgatactggagtatttgtgtcagacattgtcaaaggaggaattgcagatgccgatggaagactgatgcagggagaccagatattaatggtgaatggggaagacgttcgtaatgccacccaagaagcggttgccgctttgctaaagtgttccctaggcac

SEQ ID NO: 155897 - DNA, 6262 bp, Homo sapiens
  Payload ID: 10620
  Gene Symbol: MPDZ
  Gene Name: multiple PDZ domain protein
  Uniprot ID: O75970
  ENST ID: ENST00000447879
  CDS Start-End: 44-6157
tgctgttaatcatttcagagaagaacactgaactttgaaaaaaatgttggaagccattgacaaaaatcgggccctgcatgcagcagagcgcttgcaaaccaagctgcgagaacgtggggatgtagcaaatgaagacaaactgagccttctgaagtcagtcctgcagagccctctcttcagtcagattctgagccttcagacttctgtacagcagctgaaagaccaggtaaatattgcaacttcagcaacttcaaatattgaatatgcccacgttcctcatctcagcccagctgtgattcctactctgcaaaatgaatcgtttttattatccccaaacaatgggaatctggaagcacttacaggacctggtattccacacattaatgggaaacctgcttgtgatgaatttgatcagcttatcaaaaatatggcccagggtcgccatgtagaagtttttgagctcctcaaacctccatctggaggccttgggtttagtgttgtgggactaagaagtgaaaacagaggagagctgggaatatttgttcaagagatacaagagggcagtgtggcccatagagatggaagattgaaagaaactgatcaaattcttgctatcaatggacaggctcttgatcagacaattacacatcagcaggctatcagcatcctgcagaaagccaaagatactgtccagctagttattgccagaggctcattgcctcagcttgtcagccccatagtttcccgttctccatctgcagccagcacaatttcagctcactctaatccggttcactggcaacacatggaaacgattgaattggtgaatgatggatctggtttgggatttggcatcataggaggaaaagcaactggtgtgatagtaaaaaccattctgcctggaggagtagctgatcagcatgggcgtttatgcagtggagaccacattctaaagattggtgacacagatctagcaggaatgagcagtgagcaagtagcacaagtccttaggcaatgtggaaatagagttaagttgatgattgcaagaggtgccatagaagaacgtacagcacccactgctttgggcatcaccctctcctcatccccaacttcaacaccagagttgcgggttgatgcttctactcagaaaggtgaagaaagtgagacatttgatgtagaactcactaaaaatgtccaaggattaggaattaccattgctggctacattggagataaaaaattggaaccttcaggaatctttgtaaagagcattacaaaaagcagtgccgttgagcatgatggaagaatccaaattggagaccaaattatagcagtagatggcacaaaccttcagggttttactaatcagcaagcagtagaggtattgcgacatacaggacaaactgtgctcctgacactaatgaggagaggaatgaagcaggaagccgagctcatgtcaagggaagacgtcacaaaagatgcagatttgtctcctgttaatgccagcataatcaaagaaaattatgaaaaagatgaagattttttatcttcgacgagaaacaccaacatattaccaactgaagaagaagggtatccattactgtcagctgagatagaagaaatagaagatgcacaaaaacaagaagctgctctgctgacaaaatggcaaaggattatgggaattaactatgaaatagtggtggcccatgtgagcaagtttagtgagaacagtggattggggataagcctggaagcgacagtgggacatcattttatccgatctgttctaccagagggtcctgttggacacagcgggaagctcttcagtggagacgagctattggaagtaaatggcataactttacttggggaaaatcaccaagatgtggtgaatatcttaaaagaactgcctatagaagtgacaatggtgtgctgtcgtcgaactgtgccacccaccacccaatcagaattggatagcctggacttatgtgatattgagctaacagaaaagcctcacgtagatctaggtgagttcatcgggtcatcagagacagaggatccagtgctggcgatgactgatgcgggtcagagtacagaagaggttcaagcacctttggccatgtgggaggctggcattcagcacatagagctggagaaagggagcaaaggacttggttttagcattttagattatcaggatccaattgatccagcaagcactgtgattataattcgttctttggtgcctggcggcattgctgaaaaggatggacgacttcttcctggtgaccgactcatgtttgtaaacgatgttaacttggaaaacagcagtcttgaggaagctgtagaagcactgaagggagcaccgtcagggactgtgagaataggagttgctaagcctttacccctttcaccagaagaaggttatgtttctgctaaggaggattcctttctctacccaccacactcctgtgaggaagcagggctggctgacaaacccctcttcagggctgacttggctctggtgggcacaaatgatgctgacttagtagatgaatccacatttgagtctccatactctcctgaaaatgacagcatctactctactcaagcctctattttatctcttcatggcagttcttgtggtgatggcctgaactatggttcttcccttccatcatctcctcctaaggatgttattgaaaattcttgtgatccagtacttgatctgcatatgtctctggaggaactatatacccagaatctcctgcaaagacaggatgagaatacaccttcggtggacataagtatggggcctgcttctggctttactataaatgactacacacctgcaaatgctattgaacaacaatatgaatgtgaaaacacaatagtgtggactgaatctcatttaccaagtgaagttatatcaagtgcagaacttccttctgtgctacccgattcagctggaaagggctctgagtacctgcttgaacagagctccctggcctgtaatgctgagtgtgtcatgcttcaaaatgtatctaaagaatcttttgaaaggactattaatatagcaaaaggcaattctagcctaggaatgacagttagtgctaataaagatggcttggggatgatcgttcgaagcattattcatggaggtgccattagtcgagatggccggattgccattggggactgcatcttgtccattaatgaagagtctaccatcagtgtaaccaatgcccaggcacgagctatgttgagaagacattctctcattggccctgacataaaaattacttatgtgcctgcagaacatttggaagagttcaaaataagcttgggacaacaatctggaagagtaatggcactggatattttttcttcatacactggcagagacattccagaattaccagagcgagaagagggagagggtgaagaaagcgaacttcaaaacacagcatatagcaattggaatcagcccaggcgggtggaactctggagagaaccaagcaaatccttaggcatcagcattgttggtggacgagggatggggagtcggctaagcaatggagaagtgatgaggggcattttcatcaaacatgttctggaagatagtccagctggcaaaaatggaaccttgaaacctggagatagaatcgtagaggtggatggaatggacctcagagatgcaagccatgaacaagctgtggaagccattcggaaagcaggcaaccctgtagtctttatggtacagagcattataaacagaccaagggcacccagtcagtcagagtcagagccagagaaggctccattgtgcagtgtgcccccaccccctccttcagcctttgccgaaatgggtagtgatcacacacagtcatctgcaagcaaaatctcacaagatgtggacaaagaggatgagtttggttacagctggaaaaatatcagagagcgttatggaaccctaacaggcgagctgcatatgattgaactggagaaaggtcatagtggtttgggcctaagtcttgctgggaacaaagaccgatccaggatgagtgtcttcatagtggggattgatccaaatggagctgcaggaaaagatggtcgattgcaaattgcagatgagcttctagagatcaatggtcagattttatatggaagaagtcatcagaatgcctcatcaatcattaaatgtgccccttctaaagtgaaaataatttttatcagaaataaagatgcagtgaatcagatggccgtatgtcctggaaatgcagtagaacctttgccttctaactcagaaaatcttcaaaataaggagacagagccaactgttactacttctgatgcagctgtggacctcagttcatttaaaaatgtgcaacatctggagcttcccaaggatcaggggggtttgggtattgctatcagcgaagaagatacactcagtggagtcatcataaagagcttaacagagcatggggtagcagccacggatggacgactcaaagtcggagatcagatactggctgtagatgatgaaattgttgttggttaccctattgaaaagtttattagccttctgaagacagcaaagatgacagtaaaacttaccatccatgctgagaatccagattcccaggctgttccttcagcagctggtgcagccagtggagaaaaaaagaacagctcccagtctctgatggtcccacagtctggctccccagaaccggagtccatccgaaatacaagcagatcatcaacaccagcaatttttgcttctgatcctgcaacctgccccattatccctggctgcgaaacaaccatcgagatttccaaagggcgaacagggctgggcctgagcatcgttgggggttcagacacgctgctgggtgccattattatccatgaagtttatgaagaaggagcagcatgtaaagatggaagactctgggctggagatcagatcttagaggtgaatggaattgacttgagaaaggccacacatgatgaagcaatcaatgtcctgagacagacgccacagagagtgcgcctgacactctacagagatgaggccccatacaaagaggaggaagtgtgtgacaccctcactattgagctgcagaagaagccgggaaaaggcctaggattaagtattgttggtaaaagaaacgatactggagtatttgtgtcagacattgtcaaaggaggaattgcagatgccgatggaagactgatgcagggagaccagatattaatggtgaatggggaagacgttcgtaatgccacccaagaagcggttgccgctttgctaaagtgttccctaggcacagtaaccttggaagttggaagaatcaaagctggtccattccattcagagaggaggccatctcaaagcagccaggtgagtgaaggcagcctgtcatctttcacttttccactctctggatccagtacatctgagtcactggaaagtagctcaaagaagaatgcattggcatctgaaatacagggattaagaacagtcgaaatgaaaaagggccctactgactcactgggaatcagcatcgctggaggagtaggcagcccacttggtgatgtgcctatatttattgcaatgatgcacccaactggagttgcagcacagacccaaaaactcagagttggggataggattgtcaccatctgtggcacatccactgagggcatgactcacacccaagcagttaacctactgaaaaatgcatctggctccattgaaatgcaggtggttgctggaggagacgtgagtgtggtcacaggtcatcagcaggagcctgcaagttccagtctttctttcactgggctgacgtcaagcagtatatttcaggatgatttaggacctcctcaatgtaagtctattacactagagcgaggaccagatggcttaggcttcagtatagttggaggatatggcagccctcatggagacttacccatttatgttaaaacagtgtttgcaaagggagcagcctctgaagacggacgtctgaaaaggggcgatcagatcattgctgtcaatgggcagagtctagaaggagtcacccatgaagaagctgttgccatccttaaacggacaaaaggcactgtcactttgatggttctctcttgaattggctgccagaattgaaccaacccaacccctagctcacctcctactgtaaagagaatgcactggtcctgacaatttttatgctgtgttcagccgggtcttcaa

SEQ ID NO: 155898 - DNA, 2303 bp, Homo sapiens
  Payload ID: 10620
  Gene Symbol: MPDZ
  Gene Name: multiple PDZ domain protein
  ENST ID: ENST00000438511
  CDS Start-End: 1-1836
aataaagatgcagtgaatcagatggccgtatgtcctggaaatgcagtagaacctttgccttctaactcagaaaatcttcaaaataaggagacagagccaactgttactacttctgatgcagctgtggacctcagttcatttaaaaatgtgcaacatctggagcttcccaaggatcaggggggtttgggtattgctatcagcgaagaagatacactcagtggagtcatcataaagagcttaacagagcatggggtagcagccacggatggacgactcaaagtcggagatcagatactggctgtagatgatgaaattgttgttggttaccctattgaaaagtttattagccttctgaagacagcaaagatgacagtaaaacttaccatccatgctgagaatccagattcccaggctgttccttcagcagctggtgcagccagtggagaaaaaaagaacagctcccagtctctgatggtcccacagtctggctccccagaaccggagtccatccgaaatacaagcagatcatcaacaccagcaatttttgcttctgatcctgcaacctgccccattatccctggctgcgaaacaaccatcgagatttccaaagggcgaacagggctgggcctgagcatcgttgggggttcagacacgctgctggtgaatggaattgacttgagaaaggccacacatgatgaagcaatcaatgtcctgagacagacgccacagagagtgcgcctgacactctacagagatgaggccccatacaaagaggaggaagtgtgtgacaccctcactattgagctgcagaagaagccgggaaaaggcctaggattaagtattgttggtaaaagaaacgatactggagtatttgtgtcagacattgtcaaaggaggaattgcagatgccgatggaagactgatgcagggagaccagatattaatggtgaatggggaagacgttcgtaatgccacccaagaagcggttgccgctttgctaaagtgttccctaggcacagtaaccttggaagttggaagaatcaaagctggtccattccattcagagaggaggccatctcaaagcagccaggtgagtgaaggcagcctgtcatctttcacttttccactctctggatccagtacatctgagtcactggaaagtagctcaaagaagaatgcattggcatctgaaatacagggattaagaacagtcgaaatgaaaaagggccctactgactcactgggaatcagcatcgctggaggagtaggcagcccacttggtgatgtgcctatatttattgcaatgatgcacccaactggagttgcagcacagacccaaaaactcagagttggggataggattgtcaccatctgtggcacatccactgagggcatgactcacacccaagcagttaacctactgaaaaatgcatctggctccattgaaatgcaggtggttgctggaggagacgtgagtgtggtcacaggtcatcagcaggagcctgcaagttccagtctttctttcactgggctgacgtcaagcagtatatttcaggatgatttaggacctcctcaatgtaagtctattacactagagcgaggaccagatggcttaggcttcagtatagttggaggatatggcagccctcatggagacttacccatttatgttaaaacagtgtttgcaaagggagcagcctctgaagacggacgtctgaaaaggggcgatcagatcattgctgtcaatgggcagagtctagaaggagtcacccatgaagaagctgttgccatccttaaacggacaaaaggcactgtcactttgatggttctctcttgaattggctgccagaattgaaccaacccaacccctagctcacctcctactgtaaagagaatgcactggtcctgacaatttttatgctgtgttcagccgggtcttcaaaactgtaggggggaaataacacttaagtttctttttctcatctagaaatgctttccttactgacaacctaacatcatttttcttttcttcttgcattttgtgaacttaaagagaaggaatatttgtgtaggtgaatctcgtttttatttgtggagatatctaatgttttgtagtcacatgggcaagaattattacatgctaagctggttagtataaagaaagataattctaaagctaaccaaagaaaatggcttcagtaaattaggatgaaaaatgaaaatataaaataaagaagaaaatctcggggagtttaaaaaaaatgcctcaatttggcaatctacctcctctccccaccccaaact

SEQ ID NO: 155899 - DNA, 2385 bp, Homo sapiens
  Payload ID: 10620
  Gene Symbol: MPDZ
  Gene Name: multiple PDZ domain protein
  ENST ID: ENST00000542806
  CDS Start-End: 1-103
atctgcaagcaaaatctcacaagatgtggacaaagaggatgagtttggttacagctggagtaagttgtgtttttgtgatgcatttaattgtaagaggtattaaaatagctctgagtttctcaaggatttcgccctggataaaaaatatcagagagcgttatggaaccctaacaggcgagctgcatatgattgaactggagaaaggtcatagtggtttgggcctaagtcttgctgggaacaaagaccgatccaggatgagtgtcttcatagtggggattgatccaaatggagctgcaggaaaagatggtcgattgcaaattgcagatgagcttctagagatcaatggtcagattttatatggaagaagtcatcagaatgcctcatcaatcattaaatgtgccccttctaaagtgaaaataatttttatcagaaataaagatgcagtgaatcagatggccgtatgtcctggaaatgcagtagaacctttgccttctaactcagaaaatcttcaaaataaggagacagagccaactgttactacttctgatgcagctgtggacctcagttcatttaaaaatgtgcaacatctggagcttcccaaggatcaggggggtttgggtattgctatcagcgaagaagatacactcagtggagtcatcataaagagcttaacagagcatggggtagcagccacggatggacgactcaaagtcggagatcagatactggctgtagatgatgaaattgttgttggttaccctattgaaaagtttattagccttctgaagacagcaaagatgacagtaaaacttaccatccatgctgagaatccagattcccaggctgttccttcagcagctggtgcagccagtggagaaaaaaagaacagctcccagtctctgatggtcccacagtctggctccccagaaccggagtccatccgaaatacaagcagatcatcaacaccagcaatttttgcttctgatcctgcaacctgccccattatccctggctgcgaaacaaccatcgagatttccaaagggcgaacagggctgggcctgagcatcgttgggggttcagacacgctgctgggtgccattattatccatgaagtttatgaagaaggagcagcatgtaaagatggaagactctgggctggagatcagatcttagaggtgaatggaattgacttgagaaaggccacacatgatgaagcaatcaatgtcctgagacagacgccacagagagtgcgcctgacactctacagagatgaggccccatacaaagaggaggaagtgtgtgacaccctcactattgagctgcagaagaagccgggaaaaggcctaggattaagtattgttggtaaaagaaacgatactggagtatttgtgtcagacattgtcaaaggaggaattgcagatgccgatggaagactgatgcagggagaccagatattaatggtgaatggggaagacgttcgtaatgccacccaagaagcggttgccgctttgctaaagtgttccctaggcacagtaaccttggaagttggaagaatcaaagctggtccattccattcagagaggaggccatctcaaagcagccaggtgagtgaaggcagcctgtcatctttcacttttccactctctggatccagtacatctgagtcactggaaagtagctcaaagaagaatgcattggcatctgaaatacagggattaagaacagtcgaaatgaaaaagggccctactgactcactgggaatcagcatcgctggaggagtaggcagcccacttggtgatgtgcctatatttattgcaatgatgcacccaactggagttgcagcacagacccaaaaactcagagttggggataggattgtcaccatctgtggcacatccactgagggcatgactcacacccaagcagttaacctactgaaaaatgcatctggctccattgaaatgcaggtggttgctggaggagacgtgagtgtggtcacaggtcatcagcaggagcctgcaagttccagtctttctttcactgggctgacgtcaagcagtatatttcaggatgatttaggacctcctcaatgtaagtctattacactagagcgaggaccagatggcttaggcttcagtatagttggaggatatggcagccctcatggagacttacccatttatgttaaaacagtgtttgcaaagggagcagcctctgaagacggacgtctgaaaaggggcgatcagatcattgctgtcaatgggcagagtctagaaggagtcacccatgaagaagctgttgccatccttaaacggacaaaaggcactgtcactttgatggttctctcttgaattggctgccagaattgaaccaacccaaccccta

SEQ ID NO: 155900 - DNA, 7603 bp, Homo sapiens
  Payload ID: 10620
  Gene Symbol: MPDZ
  Gene Name: multiple PDZ domain protein
  Uniprot ID: O75970
  ENST ID: ENST00000541718
  CDS Start-End: 223-6348
cgtgagtgtctgtgcgttttgatccgaagctcctcgccgggtcgttacttcagaagagaagacagtgagcgtgggcgaggcgaggcatccagaggccccggcgacccctgctccccagtcctccgccccctcgcgtcgcggccctgggcgggcgccgcgagccggagttccattttaattgctgttaatcatttcagagaagaacactgaactttgaaaaaaatgttggaagccattgacaaaaatcgggccctgcatgcagcagagcgcttgcaaaccaagctgcgagaacgtggggatgtagcaaatgaagacaaactgagccttctgaagtcagtcctgcagagccctctcttcagtcagattctgagccttcagacttctgtacagcagctgaaagaccaggtaaatattgcaacttcagcaacttcaaatattgaatatgcccacgttcctcatctcagcccagctgtgattcctactctgcaaaatgaatcgtttttattatccccaaacaatgggaatctggaagcacttacaggacctggtattccacacattaatgggaaacctgcttgtgatgaatttgatcagcttatcaaaaatatggcccagggtcgccatgtagaagtttttgagctcctcaaacctccatctggaggccttgggtttagtgttgtgggactaagaagtgaaaacagaggagagctgggaatatttgttcaagagatacaagagggcagtgtggcccatagagatggaagattgaaagaaactgatcaaattcttgctatcaatggacaggctcttgatcagacaattacacatcagcaggctatcagcatcctgcagaaagccaaagatactgtccagctagttattgccagaggctcattgcctcagcttgtcagccccatagtttcccgttctccatctgcagccagcacaatttcagctcactctaatccggttcactggcaacacatggaaacgattgaattggtgaatgatggatctggtttgggatttggcatcataggaggaaaagcaactggtgtgatagtaaaaaccattctgcctggaggagtagctgatcagcatgggcgtttatgcagtggagaccacattctaaagattggtgacacagatctagcaggaatgagcagtgagcaagtagcacaagtccttaggcaatgtggaaatagagttaagttgatgattgcaagaggtgccatagaagaacgtacagcacccactgctttgggcatcaccctctcctcatccccaacttcaacaccagagttgcgggttgatgcttctactcagaaaggtgaagaaagtgagacatttgatgtagaactcactaaaaatgtccaaggattaggaattaccattgctggctacattggagataaaaaattggaaccttcaggaatctttgtaaagagcattacaaaaagcagtgccgttgagcatgatggaagaatccaaattggagaccaaattatagcagtagatggcacaaaccttcagggttttactaatcagcaagcagtagaggtattgcgacatacaggacaaactgtgctcctgacactaatgaggagaggaatgaagcaggaagccgagctcatgtcaagggaagacgtcacaaaagatgcagatttgtctcctgttaatgccagcataatcaaagaaaattatgaaaaagatgaagattttttatcttcgacgagaaacaccaacatattaccaactgaagaagaagggtatccattactgtcagctgagatagaagaaatagaagatgcacaaaaacaagaagctgctctgctgacaaaatggcaaaggattatgggaattaactatgaaatagtggtggcccatgtgagcaagtttagtgagaacagtggattggggataagcctggaagcgacagtgggacatcattttatccgatctgttctaccagagggtcctgttggacacagcgggaagctcttcagtggagacgagctattggaagtaaatggcataactttacttggggaaaatcaccaagatgtggtgaatatcttaaaagaactgcctatagaagtgacaatggtgtgctgtcgtcgaactgtgccacccaccacccaatcagaattggatagcctggacttatgtgatattgagctaacagaaaagcctcacgtagatctaggtgagttcatcgggtcatcagagacagaggatccagtgctggcgatgactgatgcgggtcagagtacagaagaggttcaagcacctttggccatgtgggaggctggcattcagcacatagagctggagaaagggagcaaaggacttggttttagcattttagattatcaggatccaattgatccagcaagcactgtgattataattcgttctttggtgcctggcggcattgctgaaaaggatggacgacttcttcctggtgaccgactcatgtttgtaaacgatgttaacttggaaaacagcagtcttgaggaagctgtagaagcactgaagggagcaccgtcagggactgtgagaataggagttgctaagcctttacccctttcaccagaagaaggttatgtttctgctaaggaggattcctttctctacccaccacactcctgtgaggaagcagggctggctgacaaacccctcttcagggctgacttggctctggtgggcacaaatgatgctgacttagtagatgaatccacatttgagtctccatactctcctgaaaatgacagcatctactctactcaagcctctattttatctcttcatggcagttcttgtggtgatggcctgaactatggttcttcccttccatcatctcctcctaaggatgttattgaaaattcttgtgatccagtacttgatctgcatatgtctctggaggaactatatacccagaatctcctgcaaagacaggatgagaatacaccttcggtggacataagtatggggcctgcttctggctttactataaatgactacacacctgcaaatgctattgaacaacaatatgaatgtgaaaacacaatagtgtggactgaatctcatttaccaagtgaagttatatcaagtgcagaacttccttctgtgctacccgattcagctggaaagggctctgagtacctgcttgaacagagctccctggcctgtaatgctgagtgtgtcatgcttcaaaatgtatctaaagaatcttttgaaaggactattaatatagcaaaaggcaattctagcctaggaatgacagttagtgctaataaagatggcttggggatgatcgttcgaagcattattcatggaggtgccattagtcgagatggccggattgccattggggactgcatcttgtccattaatgaagagtctaccatcagtgtaaccaatgcccaggcacgagctatgttgagaagacattctctcattggccctgacataaaaattacttatgtgcctgcagaacatttggaagagttcaaaataagcttgggacaacaatctggaagagtaatggcactggatattttttcttcatacactggcagagacattccagaattaccagagcgagaagagggagagggtgaagaaagcgaacttcaaaacacagcatatagcaattggaatcagcccaggcgggtggaactctggagagaaccaagcaaatccttaggcatcagcattgttggtggacgagggatggggagtcggctaagcaatggagaagtgatgaggggcattttcatcaaacatgttctggaagatagtccagctggcaaaaatggaaccttgaaacctggagatagaatcgtagaggtggatggaatggacctcagagatgcaagccatgaacaagctgtggaagccattcggaaagcaggcaaccctgtagtctttatggtacagagcattataaacagaccaaggaaatcccctttgccttccttgctgcacaacctttaccctaagtacaacttcagcagcactaacccatttgctgactctctacaaatcaacgccgacaaggcacccagtcagtcagagtcagagccagagaaggctccattgtgcagtgtgcccccaccccctccttcagcctttgccgaaatgggtagtgatcacacacagtcatctgcaagcaaaatctcacaagatgtggacaaagaggatgagtttggttacagctggaaaaatatcagagagcgttatggaaccctaacaggcgagctgcatatgattgaactggagaaaggtcatagtggtttgggcctaagtcttgctgggaacaaagaccgatccaggatgagtgtcttcatagtggggattgatccaaatggagctgcaggaaaagatggtcgattgcaaattgcagatgagcttctagagatcaatggtcagattttatatggaagaagtcatcagaatgcctcatcaatcattaaatgtgccccttctaaagtgaaaataatttttatcagaaataaagatgcagtgaatcagatggccgtatgtcctggaaatgcagtagaacctttgccttctaactcagaaaatcttcaaaataaggagacagagccaactgttactacttctgatgcagctgtggacctcagttcatttaaaaatgtgcaacatctggagcttcccaaggatcaggggggtttgggtattgctatcagcgaagaagatacactcagtggagtcatcataaagagcttaacagagcatggggtagcagccacggatggacgactcaaagtcggagatcagatactggctgtagatgatgaaattgttgttggttaccctattgaaaagtttattagccttctgaagacagcaaagatgacagtaaaacttaccatccatgctgagaatccagattcccaggctgttccttcagcagctggtgcagccagtggagaaaaaaagaacagctcccagtctctgatggtcccacagtctggctccccagaaccggagtccatccgaaatacaagcagatcatcaacaccagcaatttttgcttctgatcctgcaacctgccccattatccctggctgcgaaacaaccatcgagatttccaaagggcgaacagggctgggcctgagcatcgttgggggttcagacacgctgctgggtgccattattatccatgaagtttatgaagaaggagcagcatgtaaagatggaagactctgggctggagatcagatcttagaggtgaatggaattgacttgagaaaggccacacatgatgaagcaatcaatgtcctgagacagacgccacagagagtgcgcctgacactctacagagatgaggccccatacaaagaggaggaagtgtgtgacaccctcactattgagctgcagaagaagccgggaaaaggcctaggattaagtattgttggtaaaagaaacgatactggagtatttgtgtcagacattgtcaaaggaggaattgcagatgccgatggaagactgatgcagggagaccagatattaatggtgaatggggaagacgttcgtaatgccacccaagaagcggttgccgctttgctaaaggtgagtgaaggcagcctgtcatctttcacttttccactctctggatccagtacatctgagtcactggaaagtagctcaaagaagaatgcattggcatctgaaatacagggattaagaacagtcgaaatgaaaaagggccctactgactcactgggaatcagcatcgctggaggagtaggcagcccacttggtgatgtgcctatatttattgcaatgatgcacccaactggagttgcagcacagacccaaaaactcagagttggggataggattgtcaccatctgtggcacatccactgagggcatgactcacacccaagcagttaacctactgaaaaatgcatctggctccattgaaatgcaggtggttgctggaggagacgtgagtgtggtcacaggtcatcagcaggagcctgcaagttccagtctttctttcactgggctgacgtcaagcagtatatttcaggatgatttaggacctcctcaatgtaagtctattacactagagcgaggaccagatggcttaggcttcagtatagttggaggatatggcagccctcatggagacttacccatttatgttaaaacagtgtttgcaaagggagcagcctctgaagacggacgtctgaaaaggggcgatcagatcattgctgtcaatgggcagagtctagaaggagtcacccatgaagaagctgttgccatccttaaacggacaaaaggcactgtcactttgatggttctctcttgaattggctgccagaattgaaccaacccaacccctagctcacctcctactgtaaagagaatgcactggtcctgacaatttttatgctgtgttcagccgggtcttcaaaactgtaggggggaaataacacttaagtttctttttctcatctagaaatgctttccttactgacaacctaacatcatttttcttttcttcttgcattttgtgaacttaaagagaaggaatatttgtgtaggtgaatctcgtttttatttgtggagatatctaatgttttgtagtcacatgggcaagaattattacatgctaagctggttagtataaagaaagataattctaaagctaaccaaagaaaatggcttcagtaaattaggatgaaaaatgaaaatataaaataaagaagaaaatctcggggagtttaaaaaaaatgcctcaatttggcaatctacctcctctccccaccccaaactaaaaaaagaaaaaaaggttttctaatgaaaatctttaaaaatactgtcagtattttaaaattttcaacagtattataaaaacattgcatctccccacctctaatatgcatatatatttttcctgctaaaattggtttctacaattgagtaaatggcaaatacatgaagcaatgtccctaaattttataaagaaattatatttaatgcacatttcaattttcattcttatttttgaccttttgtaaaatattttcatgttgctataagtaaatgatgatgccaccccatgttgactatggtttttctagaaagcaactatgctgctaaccatagaggaacatagaagggttccagaatctttagtgctggttttaacaaccgatgcaacattaaaaatgtgttagtgtgctgtgcaattggttttcaattcatattaatcttaatgacagagaacaatgtgttactaattattttggttgtatgccattagtaaattgatagaaaaattaaggggattaacataacttcatttcattgacttatattaacatcttataatacaatagtttaagactaagggaaacagatggagctgtttattgagacaactggtgaggaattatcatgtgttcattcccattttagagcgtgaaactcctacattagaatatataaagtcactttaaatatctatatttgtaacagaagtagtgtacagatattttattacagcatttttgtgtaaatgcagaattaaagtgaataaataagaattttcagtggtgcac

SEQ ID NO: 155901 - DNA, 427 bp, Homo sapiens
  Payload ID: 10620
  Gene Symbol: MPDZ
  Gene Name: multiple PDZ domain protein
  ENST ID: ENST00000494251
  CDS Start-End: 1-92
agcaagtagcacaagtccttaggcaatgtggaaatagagttaagttgatgcttctactcagaaaggtgaagaaagtgagacatttgatgtagaactcactaaaaatgtccaaggattaggaattaccattgctggctacattggagataaaaaattggaaccttcaggaatctttgtaaagagcattacaaaaagcagtgccgttgagcatgatggaagaatccaaattggagaccaaattatagcagtagatggcacaaaccttcagggttttactaatcagcaagcagtagaggtattgcgacatacaggacaaactgtgctcctgacactaatgaggagaggaatgaagcaggaagccgagctcatgtcaagggaagacgtcacaaaagatgcagatttgtctcctgttaatgccagcataatc

SEQ ID NO: 155902 - DNA, 548 bp, Homo sapiens
  Payload ID: 10620
  Gene Symbol: MPDZ
  Gene Name: multiple PDZ domain protein
  ENST ID: ENST00000542239
  CDS Start-End: 163-548
ttgttaacaccattgtaaaaagatgccgcggcgtatgcttcacattctagattttctgcagcacctgctgacgatcgagcccccttttatgtaattacttatgtgcctgcagaacatttggaagagttcaaaataagcttgggacaacaatctggaagagtaatggcactggatattttttcttcatacactggcagagacattccagaattaccagagcgagaagagggagagggtgaagaaagcgaacttcaaaacacagcatatagcaattggaatcagcccaggcgggtggaactctggagagaaccaagcaaatccttaggcatcagcattgttggtggacgagggatggggagtcggctaagcaatggagaagtgatgaggggcattttcatcaaacatgttctggaagatagtccagctggcaaaaatggaaccttgaaacctggagatagaatcgtagagaaatcccctttgccttccttgctgcacaacctttaccctaagtacaacttcagcagcactaacccatttgctgactctct

SEQ ID NO: 155903 - DNA, 6176 bp, Homo sapiens
  Payload ID: 10620
  Gene Symbol: MPDZ
  Gene Name: multiple PDZ domain protein
  Uniprot ID: O75970
  ENST ID: ENST00000536827
  CDS Start-End: 44-6070
tgctgttaatcatttcagagaagaacactgaactttgaaaaaaatgttggaagccattgacaaaaatcgggccctgcatgcagcagagcgcttgcaaaccaagctgcgagaacgtggggatgtagcaaatgaagacaaactgagccttctgaagtcagtcctgcagagccctctcttcagtcagattctgagccttcagacttctgtacagcagctgaaagaccaggtaaatattgcaacttcagcaacttcaaatattgaatatgcccacgttcctcatctcagcccagctgtgattcctactctgcaaaatgaatcgtttttattatccccaaacaatgggaatctggaagcacttacaggacctggtattccacacattaatgggaaacctgcttgtgatgaatttgatcagcttatcaaaaatatggcccagggtcgccatgtagaagtttttgagctcctcaaacctccatctggaggccttgggtttagtgttgtgggactaagaagtgaaaacagaggagagctgggaatatttgttcaagagatacaagagggcagtgtggcccatagagatggaagattgaaagaaactgatcaaattcttgctatcaatggacaggctcttgatcagacaattacacatcagcaggctatcagcatcctgcagaaagccaaagatactgtccagctagttattgccagaggctcattgcctcagcttgtcagccccatagtttcccgttctccatctgcagccagcacaatttcagctcactctaatccggttcactggcaacacatggaaacgattgaattggtgaatgatggatctggtttgggatttggcatcataggaggaaaagcaactggtgtgatagtaaaaaccattctgcctggaggagtagctgatcagcatgggcgtttatgcagtggagaccacattctaaagattggtgacacagatctagcaggaatgagcagtgagcaagtagcacaagtccttaggcaatgtggaaatagagttaagttgatgattgcaagaggtgccatagaagaacgtacagcacccactgctttgggcatcaccctctcctcatccccaacttcaacaccagagttgcgggttgatgcttctactcagaaaggtgaagaaagtgagacatttgatgtagaactcactaaaaatgtccaaggattaggaattaccattgctggctacattggagataaaaaattggaaccttcaggaatctttgtaaagagcattacaaaaagcagtgccgttgagcatgatggaagaatccaaattggagaccaaattatagcagtagatggcacaaaccttcagggttttactaatcagcaagcagtagaggtattgcgacatacaggacaaactgtgctcctgacactaatgaggagaggaatgaagcaggaagccgagctcatgtcaagggaagacgtcacaaaagatgcagatttgtctcctgttaatgccagcataatcaaagaaaattatgaaaaagatgaagattttttatcttcgacgagaaacaccaacatattaccaactgaagaagaagggtatccattactgtcagctgagatagaagaaatagaagatgcacaaaaacaagaagctgctctgctgacaaaatggcaaaggattatgggaattaactatgaaatagtggtggcccatgtgagcaagtttagtgagaacagtggattggggataagcctggaagcgacagtgggacatcattttatccgatctgttctaccagagggtcctgttggacacagcgggaagctcttcagtggagacgagctattggaagtaaatggcataactttacttggggaaaatcaccaagatgtggtgaatatcttaaaagaactgcctatagaagtgacaatggtgtgctgtcgtcgaactgtgccacccaccacccaatcagaattggatagcctggacttatgtgatattgagctaacagaaaagcctcacgtagatctaggtgagttcatcgggtcatcagagacagaggatccagtgctggcgatgactgatgcgggtcagagtacagaagaggttcaagcacctttggccatgtgggaggctggcattcagcacatagagctggagaaagggagcaaaggacttggttttagcattttagattatcaggatccaattgatccagcaagcactgtgattataattcgttctttggtgcctggcggcattgctgaaaaggatggacgacttcttcctggtgaccgactcatgtttgtaaacgatgttaacttggaaaacagcagtcttgaggaagctgtagaagcactgaagggagcaccgtcagggactgtgagaataggagttgctaagcctttacccctttcaccagaagaaggttatgtttctgctaaggaggattcctttctctacccaccacactcctgtgaggaagcagggctggctgacaaacccctcttcagggctgacttggctctggtgggcacaaatgatgctgacttagtagatgaatccacatttgagtctccatactctcctgaaaatgacagcatctactctactcaagcctctattttatctcttcatggcagttcttgtggtgatggcctgaactatggttcttcccttccatcatctcctcctaaggatgttattgaaaattcttgtgatccagtacttgatctgcatatgtctctggaggaactatatacccagaatctcctgcaaagacaggatgagaatacaccttcggtggacataagtatggggcctgcttctggctttactataaatgactacacacctgcaaatgctattgaacaacaatatgaatgtgaaaacacaatagtgtggactgaatctcatttaccaagtgaagttatatcaagtgcagaacttccttctgtgctacccgattcagctggaaagggctctgagtacctgcttgaacagagctccctggcctgtaatgctgagtgtgtcatgcttcaaaatgtatctaaagaatcttttgaaaggactattaatatagcaaaaggcaattctagcctaggaatgacagttagtgctaataaagatggcttggggatgatcgttcgaagcattattcatggaggtgccattagtcgagatggccggattgccattggggactgcatcttgtccattaatgaagagtctaccatcagtgtaaccaatgcccaggcacgagctatgttgagaagacattctctcattggccctgacataaaaattacttatgtgcctgcagaacatttggaagagttcaaaataagcttgggacaacaatctggaagagtaatggcactggatattttttcttcatacactggcagagacattccagaattaccagagcgagaagagggagagggtgaagaaagcgaacttcaaaacacagcatatagcaattggaatcagcccaggcgggtggaactctggagagaaccaagcaaatccttaggcatcagcattgttggtggacgagggatggggagtcggctaagcaatggagaagtgatgaggggcattttcatcaaacatgttctggaagatagtccagctggcaaaaatggaaccttgaaacctggagatagaatcgtagaggtggatggaatggacctcagagatgcaagccatgaacaagctgtggaagccattcggaaagcaggcaaccctgtagtctttatggtacagagcattataaacagaccaagggcacccagtcagtcagagtcagagccagagaaggctccattgtgcagtgtgcccccaccccctccttcagcctttgccgaaatgggtagtgatcacacacagtcatctgcaagcaaaatctcacaagatgtggacaaagaggatgagtttggttacagctggaaaaatatcagagagcgttatggaaccctaacaggcgagctgcatatgattgaactggagaaaggtcatagtggtttgggcctaagtcttgctgggaacaaagaccgatccaggatgagtgtcttcatagtggggattgatccaaatggagctgcaggaaaagatggtcgattgcaaattgcagatgagcttctagagatcaatggtcagattttatatggaagaagtcatcagaatgcctcatcaatcattaaatgtgccccttctaaagtgaaaataatttttatcagaaataaagatgcagtgaatcagatggccgtatgtcctggaaatgcagtagaacctttgccttctaactcagaaaatcttcaaaataaggagacagagccaactgttactacttctgatgcagctgtggacctcagttcatttaaaaatgtgcaacatctggagcttcccaaggatcaggggggtttgggtattgctatcagcgaagaagatacactcagtggagtcatcataaagagcttaacagagcatggggtagcagccacggatggacgactcaaagtcggagatcagatactggctgtagatgatgaaattgttgttggttaccctattgaaaagtttattagccttctgaagacagcaaagatgacagtaaaacttaccatccatgctgagaatccagattcccaggctgttccttcagcagctggtgcagccagtggagaaaaaaagaacagctcccagtctctgatggtcccacagtctggctccccagaaccggagtccatccgaaatacaagcagatcatcaacaccagcaatttttgcttctgatcctgcaacctgccccattatccctggctgcgaaacaaccatcgagatttccaaagggcgaacagggctgggcctgagcatcgttgggggttcagacacgctgctgggtgccattattatccatgaagtttatgaagaaggagcagcatgtaaagatggaagactctgggctggagatcagatcttagaggtgaatggaattgacttgagaaaggccacacatgatgaagcaatcaatgtcctgagacagacgccacagagagtgcgcctgacactctacagagatgaggccccatacaaagaggaggaagtgtgtgacaccctcactattgagctgcagaagaagccgggaaaaggcctaggattaagtattgttggtaaaagaaacgatactggagtatttgtgtcagacattgtcaaaggaggaattgcagatgccgatggaagactgatgcagggagaccagatattaatggtgaatggggaagacgttcgtaatgccacccaagaagcggttgccgctttgctaaaggtgagtgaaggcagcctgtcatctttcacttttccactctctggatccagtacatctgagtcactggaaagtagctcaaagaagaatgcattggcatctgaaatacagggattaagaacagtcgaaatgaaaaagggccctactgactcactgggaatcagcatcgctggaggagtaggcagcccacttggtgatgtgcctatatttattgcaatgatgcacccaactggagttgcagcacagacccaaaaactcagagttggggataggattgtcaccatctgtggcacatccactgagggcatgactcacacccaagcagttaacctactgaaaaatgcatctggctccattgaaatgcaggtggttgctggaggagacgtgagtgtggtcacaggtcatcagcaggagcctgcaagttccagtctttctttcactgggctgacgtcaagcagtatatttcaggatgatttaggacctcctcaatgtaagtctattacactagagcgaggaccagatggcttaggcttcagtatagttggaggatatggcagccctcatggagacttacccatttatgttaaaacagtgtttgcaaagggagcagcctctgaagacggacgtctgaaaaggggcgatcagatcattgctgtcaatgggcagagtctagaaggagtcacccatgaagaagctgttgccatccttaaacggacaaaaggcactgtcactttgatggttctctcttgaattggctgccagaattgaaccaacccaacccctagctcacctcctactgtaaagagaatgcactggtcctgacaatttttatgctgtgttcagccgggtcttcaaa

SEQ ID NO: 155904 - DNA, 3414 bp, Homo sapiens
  Payload ID: 10620
  Gene Symbol: MPDZ
  Gene Name: multiple PDZ domain protein
  ENST ID: ENST00000545857
  CDS Start-End: 1-3021
gtcatgcttcaaaatgtatctaaagaatcttttgaaaggactattaatatagcaaaaggcaattctagcctaggaatgacagttagtgctaataaagatggcttggggatgatcgttcgaagcattattcatggaggtgccattagtcgagatggccggattgccattggggactgcatcttgtccattaatgaagagtctaccatcagtgtaaccaatgcccaggcacgagctatgttgagaagacattctctcattggccctgacataaaaattacttatgtgcctgcagaacatttggaagagttcaaaataagcttgggacaacaatctggaagagtaatggcactggatattttttcttcatacactggcagagacattccagaattaccagagcgagaagagggagagggtgaagaaagcgaacttcaaaacacagcatatagcaattggaatcagcccaggcgggtggaactctggagagaaccaagcaaatccttaggcatcagcattgttggtggacgagggatggggagtcggctaagcaatggagaagtgatgaggggcattttcatcaaacatgttctggaagatagtccagctggcaaaaatggaaccttgaaacctggagatagaatcgtagaggcacccagtcagtcagagtcagagccagagaaggctccattgtgcagtgtgcccccaccccctccttcagcctttgccgaaatgggtagtgatcacacacagtcatctgcaagcaaaatctcacaagatgtggacaaagaggatgagtttggttacagctggaaaaatatcagagagcgttatggaaccctaacaggcgagctgcatatgattgaactggagaaaggtcatagtggtttgggcctaagtcttgctgggaacaaagaccgatccaggatgagtgtcttcatagtggggattgatccaaatggagctgcaggaaaagatggtcgattgcaaattgcagatgagcttctagagatcaatggtcagattttatatggaagaagtcatcagaatgcctcatcaatcattaaatgtgccccttctaaagtgaaaataatttttatcagaaataaagatgcagtgaatcagatggccgtatgtcctggaaatgcagtagaacctttgccttctaactcagaaaatcttcaaaataaggagacagagccaactgttactacttctgatgcagctgtggacctcagttcatttaaaaatgtgcaacatctggagcttcccaaggatcaggggggtttgggtattgctatcagcgaagaagatacactcagtggagtcatcataaagagcttaacagagcatggggtagcagccacggatggacgactcaaagtcggagatcagatactggctgtagatgatgaaattgttgttggttaccctattgaaaagtttattagccttctgaagacagcaaagatgacagtaaaacttaccatccatgctgagaatccagattcccaggctgttccttcagcagctggtgcagccagtggagaaaaaaagaacagctcccagtctctgatggtcccacagtctggctccccagaaccggagtccatccgaaatacaagcagatcatcaacaccagcaatttttgcttctgatcctgcaacctgccccattatccctggctgcgaaacaaccatcgagatttccaaagggcgaacagggctgggcctgagcatcgttgggggttcagacacgctgctgggtgccattattatccatgaagtttatgaagaaggagcagcatgtaaagatggaagactctgggctggagatcagatcttagaggtgaatggaattgacttgagaaaggccacacatgatgaagcaatcaatgtcctgagacagacgccacagagagtgcgcctgacactctacagagatgaggccccatacaaagaggaggaagtgtgtgacaccctcactattgagctgcagaagaagccgggaaaaggcctaggattaagtattgttggtaaaagaaacgatactggagtatttgtgtcagacattgtcaaaggaggaattgcagatgccgatggaagactgatgcagggagaccagatattaatggtgaatggggaagacgttcgtaatgccacccaagaagcggttgccgctttgctaaagtgttccctaggcacagtaaccttggaagttggaagaatcaaagctggtccattccattcagagaggaggccatctcaaagcagccaggtgagtgaaggcagcctgtcatctttcacttttccactctctggatccagtacatctgagtcactggaaagtagctcaaagaagaatgcattggcatctgaaatacagggattaagaacagtcgaaatgaaaaagggccctactgactcactgggaatcagcatcgctggaggagtaggcagcccacttggtgatgtgcctatatttattgcaatgatgcacccaactggagttgcagcacagacccaaaaactcagagttggggataggattgtcaccatctgtggcacatccactgagggcatgactcacacccaagcagttaacctactgaaaaatgcatctggctccattgaaatgcaggtggttgctggaggagacgtgagtgtggtcacaggtcatcagcaggagcctgcaagttccagtctttctttcactgggctgacgtcaagcagtatatttcaggatgatttaggacctcctcaatgtaagtctattacactagagcgaggaccagatggcttaggcttcagtatagttggaggatatggcagccctcatggagacttacccatttatgttaaaacagtgtttgcaaagggagcagcctctgaagacggacgtctgaaaaggggcgatcagatcattgctgtcaatgggcagagtctagaaggagtcacccatgaagaagctgttgccatccttaaacggacaaaaggcactgtcactttgatggttctctcttgaattggctgccagaattgaaccaacccaacccctagctcacctcctactgtaaagagaatgcactggtcctgacaatttttatgctgtgttcagccgggtcttcaaaactgtaggggggaaataacacttaagtttctttttctcatctagaaatgctttccttactgacaacctaacatcatttttcttttcttcttgcattttgtgaacttaaagagaaggaatatttgtgtaggtgaatctcgtttttatttgtggagatatctaatgttttgtagtcacatgggcaagaattattacatgctaagctggttagtataaagaaagataattctaaagctaaccaaagaaaatggcttcagtaaattaggatgaaaaatgaaaatataaaat

SEQ ID NO: 155905 - DNA, 3186 bp, Homo sapiens
  Payload ID: 10620
  Gene Symbol: MPDZ
  Gene Name: multiple PDZ domain protein
  ENST ID: ENST00000538841
  CDS Start-End: 174-2963
gacattgacatttgttaacaccattgtaaaaagatgccgcggcgtatgcttcacattctagattttctgcagcacctgctgacgatcgagcccccttttatgtaattacttatgtgcctgcagaacatttggaagagttcaaaataagcttgggacaacaatctggaagagtaatggcactggatattttttcttcatacactggcagagacattccagaattaccagagcgagaagagggagagggtgaagaaagcgaacttcaaaacacagcatatagcaattggaatcagcccaggcgggtggaactctggagagaaccaagcaaatccttaggcatcagcattgttggtggacgagggatggggagtcggctaagcaatggagaagtgatgaggggcattttcatcaaacatgttctggaagatagtccagctggcaaaaatggaaccttgaaacctggagatagaatcgtagaggtggatggaatggacctcagagatgcaagccatgaacaagctgtggaagccattcggaaagcaggcaaccctgtagtctttatggtacagagcattataaacagaccaagggcacccagtcagtcagagtcagagccagagaaggctccattgtgcagtgtgcccccaccccctccttcagcctttgccgaaatgggtagtgatcacacacagtcatctgcaagcaaaatctcacaagatgtggacaaagaggatgagtttggttacagctggaaaaatatcagagagcgttatggaaccctaacaggcgagctgcatatgattgaactggagaaaggtcatagtggtttgggcctaagtcttgctgggaacaaagaccgatccaggatgagtgtcttcatagtggggattgatccaaatggagctgcaggaaaagatggtcgattgcaaattgcagatgagcttctagagatcaatggtcagattttatatggaagaagtcatcagaatgcctcatcaatcattaaatgtgccccttctaaagtgaaaataatttttatcagaaataaagatgcagtgaatcagatggccgtatgtcctggaaatgcagtagaacctttgccttctaactcagaaaatcttcaaaataaggagacagagccaactgttactacttctgatgcagctgtggacctcagttcatttaaaaatgtgcaacatctggagcttcccaaggatcaggggggtttgggtattgctatcagcgaagaagatacactcagtggagtcatcataaagagcttaacagagcatggggtagcagccacggatggacgactcaaagtcggagatcagatactggctgtagatgatgaaattgttgttggttaccctattgaaaagtttattagccttctgaagacagcaaagatgacagtaaaacttaccatccatgctgagaatccagattcccaggctgttccttcagcagctggtgcagccagtggagaaaaaaagaacagctcccagtctctgatggtcccacagtctggctccccagaaccggagtccatccgaaatacaagcagatcatcaacaccagcaatttttgcttctgatcctgcaacctgccccattatccctggctgcgaaacaaccatcgagatttccaaagggcgaacagggctgggcctgagcatcgttgggggttcagacacgctgctgggtgccattattatccatgaagtttatgaagaaggagcagcatgtaaagatggaagactctgggctggagatcagatcttagaggtgaatggaattgacttgagaaaggccacacatgatgaagcaatcaatgtcctgagacagacgccacagagagtgcgcctgacactctacagagatgaggccccatacaaagaggaggaagtgtgtgacaccctcactattgagctgcagaagaagccgggaaaaggcctaggattaagtattgttggtaaaagaaacgatactggagtatttgtgtcagacattgtcaaaggaggaattgcagatgccgatggaagactgatgcagggagaccagatattaatggtgaatggggaagacgttcgtaatgccacccaagaagcggttgccgctttgctaaagtgttccctaggcacagtaaccttggaagttggaagaatcaaagctggtccattccattcagagaggaggccatctcaaagcagccaggtgagtgaaggcagcctgtcatctttcacttttccactctctggatccagtacatctgagtcactggaaagtagctcaaagaagaatgcattggcatctgaaatacagggattaagaacagtcgaaatgaaaaagggccctactgactcactgggaatcagcatcgctggaggagtaggcagcccacttggtgatgtgcctatatttattgcaatgatgcacccaactggagttgcagcacagacccaaaaactcagagttggggataggattgtcaccatctgtggcacatccactgagggcatgactcacacccaagcagttaacctactgaaaaatgcatctggctccattgaaatgcaggtggttgctggaggagacgtgagtgtggtcacaggtcatcagcaggagcctgcaagttccagtctttctttcactgggctgacgtcaagcagtatatttcaggatgatttaggacctcctcaatgtaagtctattacactagagcgaggaccagatggcttaggcttcagtatagttggaggatatggcagccctcatggagacttacccatttatgttaaaacagtgtttgcaaagggagcagcctctgaagacggacgtctgaaaaggggcgatcagatcattgctgtcaatgggcagagtctagaaggagtcacccatgaagaagctgttgccatccttaaacggacaaaaggcactgtcactttgatggttctctcttgaattggctgccagaattgaaccaacccaacccctagctcacctcctactgtaaagagaatgcactggtcctgacaatttttatgctgtgttcagccgggtcttcaaaactgtaggggggaaataacacttaagtttctttttctcatctagaaatgctttccttactgacaacctaacatcatttttcttttcttcttgcattttgtgaacttaaagagaagga

SEQ ID NO: 155906 - DNA, 796 bp, Homo sapiens
  Payload ID: 10620
  Gene Symbol: MPDZ
  Gene Name: multiple PDZ domain protein
  ENST ID: ENST00000535169
  CDS Start-End: 1-287
aaatgggtagtgatcacacacagtcatctgcaagcaaaatctcacaagatgtggacaaagaggatgagtttggttacagctggaaaaatatcagagagcgttatggaaccctaacaggcgagctgcatatgattgaactggagaaaggtcatagtggtttgggcctaagtcttgctgggaacaaagaccgatccaggatgagtgtcttcatagtggggattgatccaaatggagctgcaggaaaagatggtcgattgcaaattgcagatgagcttctagagaaataaagatgcagtgaatcagatggccgtatgtcctggaaatgcagtagaacctttgccttctaactcagaaaatcttcaaaataaggagacagagccaactgttactacttctgatgcagctgtggacctcagttcatttaaaaatgtgcaacatctggagcttcccaaggatcaggggggtttgggtattgctatcagcgaagaagatacactcagtggagtcatcataaagagcttaacagagcatggggtagcagccacggatggacgactcaaagtcggagatcagatactggctgtagatgatgaaattgttgttggttaccctattgaaaagtttattagccttctgaagacagcaaagatgacagtaaaacttaccatccatgctgagaatccagattcccaggctgttccttcagcagctggtgcagccagtggagaaaaaaagaacagctcccagtctctgatggtcccacagtctggctccccagaaccggagtccatccgaa

SEQ ID NO: 155907 - DNA, 6342 bp, Homo sapiens
  Payload ID: 10620
  Gene Symbol: MPDZ
  Gene Name: multiple PDZ domain protein
  ENST ID: ENST00000546205
  CDS Start-End: 66-6320
cgagccggagttccattttaattgctgttaatcatttcagagaagaacactgaactttgaaaaaaatgttggaagccattgacaaaaatcgggccctgcatgcagcagagcgcttgcaaaccaagctgcgagaacgtggggatgtagcaaatgaagacaaactgagccttctgaagtcagtcctgcagagccctctcttcagtcagattctgagccttcagacttctgtacagcagctgaaagaccaggtaaatattgcaacttcagcaacttcaaatattgaatatgcccacgttcctcatctcagcccagctgtgattcctactctgcaaaatgaatcgtttttattatccccaaacaatgggaatctggaagcacttacaggacctggtattccacacattaatgggaaacctgcttgtgatgaatttgatcagcttatcaaaaatatggcccagggtcgccatgtagaagtttttgagctcctcaaacctccatctggaggccttgggtttagtgttgtgggactaagaagtgaaaacagaggagagctgggaatatttgttcaagagatacaagagggcagtgtggcccatagagatggaagattgaaagaaactgatcaaattcttgctatcaatggacaggctcttgatcagacaattacacatcagcaggctatcagcatcctgcagaaagccaaagatactgtccagctagttattgccagaggctcattgcctcagcttgtcagccccatagtttcccgttctccatctgcagccagcacaatttcagctcactctaatccggttcactggcaacacatggaaacgattgaattggtgaatgatggatctggtttgggatttggcatcataggaggaaaagcaactggtgtgatagtaaaaaccattctgcctggaggagtagctgatcagcatgggcgtttatgcagtggagaccacattctaaagattggtgacacagatctagcaggaatgagcagtgagcaagtagcacaagtccttaggcaatgtggaaatagagttaagttgatgattgcaagaggtgccatagaagaacgtacagcacccactgctttgggcatcaccctctcctcatccccaacttcaacaccagagttgcgggttgatgcttctactcagaaaggtgaagaaagtgagacatttgatgtagaactcactaaaaatgtccaaggattaggaattaccattgctggctacattggagataaaaaattggaaccttcaggaatctttgtaaagagcattacaaaaagcagtgccgttgagcatgatggaagaatccaaattggagaccaaattatagcagtagatggcacaaaccttcagggttttactaatcagcaagcagtagaggtattgcgacatacaggacaaactgtgctcctgacactaatgaggagaggaatgaagcaggaagccgagctcatgtcaagggaagacgtcacaaaagatgcagatttgtctcctgttaatgccagcataatcaaagaaaattatgaaaaagatgaagattttttatcttcgacgagaaacaccaacatattaccaactgaagaagaagggtatccattactgtcagctgagatagaagaaatagaagatgcacaaaaacaagaagctgctctgctgacaaaatggcaaaggattatgggaattaactatgaaatagtggtggcccatgtgagcaagtttagtgagaacagtggattggggataagcctggaagcgacagtgggacatcattttatccgatctgttctaccagagggtcctgttggacacagcgggaagctcttcagtggagacgagctattggaagtaaatggcataactttacttggggaaaatcaccaagatgtggtgaatatcttaaaagaactgcctatagaagtgacaatggtgtgctgtcgtcgaactgtgccacccaccacccaatcagaattggatagcctggacttatgtgatattgagctaacagaaaagcctcacgtagatctaggtgagttcatcgggtcatcagagacagaggatccagtgctggcgatgactgatgcgggtcagagtacagaagaggttcaagcacctttggccatgtgggaggctggcattcagcacatagagctggagaaagggagcaaaggacttggttttagcattttagattatcaggatccaattgatccagcaagcactgtgattataattcgttctttggtgcctggcggcattgctgaaaaggatggacgacttcttcctggtgaccgactcatgtttgtaaacgatgttaacttggaaaacagcagtcttgaggaagctgtagaagcactgaagggagcaccgtcagggactgtgagaataggagttgctaagcctttacccctttcaccagaagaaggttatgtttctgctaaggaggattcctttctctacccaccacactcctgtgaggaagcagggctggctgacaaacccctcttcagggctgacttggctctggtgggcacaaatgatgctgacttagtagatgaatccacatttgagtctccatactctcctgaaaatgacagcatctactctactcaagcctctattttatctcttcatggcagttcttgtggtgatggcctgaactatggttcttcccttccatcatctcctcctaaggatgttattgaaaattcttgtgatccagtacttgatctgcatatgtctctggaggaactatatacccagaatctcctgcaaagacaggatgagaatacaccttcggtggacataagtatggggcctgcttctggctttactataaatgactacacacctgcaaatgctattgaacaacaatatgaatgtgaaaacacaatagtgtggactgaatctcatttaccaagtgaagttatatcaagtgcagaacttccttctgtgctacccgattcagctggaaagggctctgagtacctgcttgaacagagctccctggcctgtaatgctgagtgtgtcatgcttcaaaatgtatctaaagaatcttttgaaaggactattaatatagcaaaaggcaattctagcctaggaatgacagttagtgctaataaagatggcttggggatgatcgttcgaagcattattcatggaggtgccattagtcgagatggccggattgccattggggactgcatcttgtccattaatgaagagtctaccatcagtgtaaccaatgcccaggcacgagctatgttgagaagacattctctcattggccctgacataaaattttctgcagcacctgctgacgatcgagcccccttttatgtaattacttatgtgcctgcagaacatttggaagagttcaaaataagcttgggacaacaatctggaagagtaatggcactggatattttttcttcatacactggcagagacattccagaattaccagagcgagaagagggagagggtgaagaaagcgaacttcaaaacacagcatatagcaattggaatcagcccaggcgggtggaactctggagagaaccaagcaaatccttaggcatcagcattgttggtggacgagggatggggagtcggctaagcaatggagaagtgatgaggggcattttcatcaaacatgttctggaagatagtccagctggcaaaaatggaaccttgaaacctggagatagaatcgtagaggtggatggaatggacctcagagatgcaagccatgaacaagctgtggaagccattcggaaagcaggcaaccctgtagtctttatggtacagagcattataaacagaccaaggaaatcccctttgccttccttgctgcacaacctttaccctaagtacaacttcagcagcactaacccatttgctgactctctacaaatcaacgccgacaaggcacccagtcagtcagagtcagagccagagaaggctccattgtgcagtgtgcccccaccccctccttcagcctttgccgaaatgggtagtgatcacacacagtcatctgcaagcaaaatctcacaagatgtggacaaagaggatgagtttggttacagctggaaaaatatcagagagcgttatggaaccctaacaggcgagctgcatatgattgaactggagaaaggtcatagtggtttgggcctaagtcttgctgggaacaaagaccgatccaggatgagtgtcttcatagtggggattgatccaaatggagctgcaggaaaagatggtcgattgcaaattgcagatgagcttctagagatcaatggtcagattttatatggaagaagtcatcagaatgcctcatcaatcattaaatgtgccccttctaaagtgaaaataatttttatcagaaataaagatgcagtgaatcagatggccgtatgtcctggaaatgcagtagaacctttgccttctaactcagaaaatcttcaaaataaggagacagagccaactgttactacttctgatgcagctgtggacctcagttcatttaaaaatgtgcaacatctggagcttcccaaggatcaggggggtttgggtattgctatcagcgaagaagatacactcagtggagtcatcataaagagcttaacagagcatggggtagcagccacggatggacgactcaaagtcggagatcagatactggctgtagatgatgaaattgttgttggttaccctattgaaaagtttattagccttctgaagacagcaaagatgacagtaaaacttaccatccatgctgagaatccagattcccaggctgttccttcagcagctggtgcagccagtggagaaaaaaagaacagctcccagtctctgatggtcccacagtctggctccccagaaccggagtccatccgaaatacaagcagatcatcaacaccagcaatttttgcttctgatcctgcaacctgccccattatccctggctgcgaaacaaccatcgagatttccaaagggcgaacagggctgggcctgagcatcgttgggggttcagacacgctgctgggtgccattattatccatgaagtttatgaagaaggagcagcatgtaaagatggaagactctgggctggagatcagatcttagaggtgaatggaattgacttgagaaaggccacacatgatgaagcaatcaatgtcctgagacagacgccacagagagtgcgcctgacactctacagagatgaggccccatacaaagaggaggaagtgtgtgacaccctcactattgagctgcagaagaagccgggaaaaggcctaggattaagtattgttggtaaaagaaacgatactggagtatttgtgtcagacattgtcaaaggaggaattgcagatgccgatggaagactgatgcagggagaccagatattaatggtgaatggggaagacgttcgtaatgccacccaagaagcggttgccgctttgctaaagtgttccctaggcacagtaaccttggaagttggaagaatcaaagctggtccattccattcagagaggaggccatctcaaagcagccaggtgagtgaaggcagcctgtcatctttcacttttccactctctggatccagtacatctgagtcactggaaagtagctcaaagaagaatgcattggcatctgaaatacagggattaagaacagtcgaaatgaaaaagggccctactgactcactgggaatcagcatcgctggaggagtaggcagcccacttggtgatgtgcctatatttattgcaatgatgcacccaactggagttgcagcacagacccaaaaactcagagttggggataggattgtcaccatctgtggcacatccactgagggcatgactcacacccaagcagttaacctactgaaaaatgcatctggctccattgaaatgcaggtggttgctggaggagacgtgagtgtggtcacaggtcatcagcaggagcctgcaagttccagtctttctttcactgggctgacgtcaagcagtatatttcaggatgatttaggacctcctcaatgtaagtctattacactagagcgaggaccagatggcttaggcttcagtatagttggaggatatggcagccctcatggagacttacccatttatgttaaaacagtgtttgcaaagggagcagcctctgaagacggacgtctgaaaaggggcgatcagatcattgctgtcaatgggcagagtctagaaggagtcacccatgaagaagctgttgccatccttaaacggacaaaaggcactgtcactttgatggttctctcttgaattggctgccagaattgaacca

SEQ ID NO: 155908 - DNA, 2223 bp, Homo sapiens
  Payload ID: 10621
  Gene Symbol: MVB12A
  Gene Name: multivesicular body subunit 12A
  Uniprot ID: Q96EY5
  ENST ID: ENST00000317040
  CDS Start-End: 1056-1877
agaaaatctccattttgtgtagatgggttgtatgaagacaacccaggaattgaggctcatgaattgagcctgcgtgtctggagtcccaccctgcacatgctagcattcctctcccttcctgtacccaggggaagaaacaataaaacgttatgctttttactgttgagggagaaggggcagttagagtgagagcctctccttctccattcctggccagtgaataaaacctgattgccttttccgattggatgttccttctttgccacctacacaaagtggggaggtaactcggtttgctggtggcatcctcagtagctgggactacaggcaataaattcttttatacgtcgctttttaaacgtattgtgcctgtgaacaaatcttcaagttatacccaagatttcaaagctcatgatggtccatagtactcgctctttaaatcaatagctgcgtatcccacagatgatttcctttgggatgatttcccagaactggaattgcagattcttcacaatgcatttttagtagagaaggggtttcaccacgttggccaggagggtctcgatctcttgacctcatgatccgcccgcctccgcctcccaaagtgccgggattacaggcgtcagccactgcgcgcggccacaaagctcccaacttttccgttaagcaccgagcttttttctagactagcagctgaggccggaaggaattctggggaacgtagtgcagacttgcagagaacgagtctcttggtcctgtgccgtagcatttccggcggaagttgctgggcgcggaaagccggcaagacctttttttccgccatcatcgctcacgcgcgcaaccctggcgacgcgtggtggcgaggctccgcctccccacgccattggccagcagctcctcgggcacgcgtatactgcgcttccgggcaatctccgccccccccccccgcatggccttctgggagttgtagttcggtcgcgagcgctgccgtcgggaggcgctccgaggttcgaggctgtgccccgcgaccccgccttcggcgctcggctcgcaggatggatcccgtacccgggacagactcggcgccgctggctggcctggcctggtcgtcggcctctgcacccccgccgcgggggttcagcgcgatctcctgcaccgtcgagggggcacccgccagctttggcaagagcttcgcgcagaaatctggctacttcctgtgccttagttctctgggcagcctagagaacccgcaggagaacgtggtggccgatatccagatcgtggtggacaagagccccctgccgctgggcttctcccccgtctgcgaccccatggattccaaggcctctgtgtccaagaagaaacgcatgtgtgtgaagctgttgcccctgggagccacggacacggctgtgtttgatgtccggctgagtgggaagaccaagacagtgcctggataccttcgaataggggacatgggcggctttgccatctggtgcaagaaggccaaggccccgaggccagtgcccaagccccgaggtctcagccgggacatgcagggcctctctctggatgcagccagccagccaagtaagggcggcctcctggagcggacagcgtcaaggctgggctctcgggcatccactctgcggaggaatgactccatctacgaggcctccagcctctatggcatctcagccatggatggggttcccttcacactccacccacgatttgagggcaagagctgcagccccctggccttctctgcttttggggacctgaccatcaagtctctggcggacattgaggaggagtataactacggcttcgtggtggagaagaccgcggctgcccgcctgccccccagcgtctcatagtccctcacccttccgcggaaagagcccccttactccacctccccgccagcctggggccaccccccctcactgcatcctggggccacccccactcactgcatcctgggaaccttcgccctgcaaggcgtttgctatcttcagccactgggcggagctgcagccctggaggagggggcgggtcgaggctgcgtggtgatggggtctccgcccccacgccctgccgggcagggctggagctggacagaagccagtgcctttaagtcatttgtgtcaaaaccctctggggtccggaggctgtgcgggtgtcctcctggcaataaacactacccggttctcgccctctgga

SEQ ID NO: 155909 - DNA, 1091 bp, Homo sapiens
  Payload ID: 10621
  Gene Symbol: MVB12A
  Gene Name: multivesicular body subunit 12A
  ENST ID: ENST00000529939
  CDS Start-End: 65-886
cgggaggcgctccgaggttcgaggctgtgccccgcgaccccgccttcggcgctcggctcgcaggatggatcccgtacccgggacagactcggcgccgctggctggcctggcctggtcgtcggcctctgcacccccgccgcgggggttcagcgcgatctcctgcaccgtcgagggggcacccgccagctttggcaagagcttcgcgcagaaatctggctacttcctgtgccttagttctctgggcagcctagagaacccgcaggagaacgtggtggccgatatccagatcgtggtggacaagagccccctgccgctgggcttctcccccgtctgcgaccccatggattccaaggcctctgtgtccaagaagaaacgcatgtgtgtgaagctgttgcccctgggagccacggacacggctgtgtttgatgtccggctgagtgggaagaccaagacagtgcctggataccttcgaataggggacatgggcggctttgccatctggtgcaagaaggccaaggccccgaggccagtgcccaagccccgaggtctcagccgggacatgcagggcctctctctggatgcagccagccagccaagtaagggcggcctcctggagcggacagcgtcaaggctgggctctcgggcatccactctgcggaggaatgactccatctacgaggcctccagcctctatggcatctcagccatggatggggttcccttcacactccacccacgatttgagggcaagagctgcagccccctggcaggtctgcccagctcccggaacactctgaaagccgcacgccaaacccatatcaggtgcctggagtctggaggttttggctgcagccccaggaccagccttgccctgcgcctcacctgattctggctgagataggaagatgctcggtaactcagctccccttccaggcagtgcagacgagggggcggttttcagccgggcctcccaagttggaaccttatcatttccaaggttcaagtttgaggtatcaggaggaagagcagggaccagcctagggtgaggttgctgaggtgcccagggtgcaattttttatttatttttattt

SEQ ID NO: 155910 - DNA, 820 bp, Homo sapiens
  Payload ID: 10621
  Gene Symbol: MVB12A
  Gene Name: multivesicular body subunit 12A
  ENST ID: ENST00000528911
  CDS Start-End: 457-820
tacaggcagaggattaattaggttttcagtttcagtttcccagaaaggaggtgtctctgtggtgacgagcagggcttcatccagtgcctctgtccccaccgaggggactatgggagacatggagggtgtgtgagcaacaggtgagactggagccagctgaaaactgggagaccgacccagccaacaaacaatgtcggtctctgtcttggcacctgcaggaaacaagctcctacttccagaaaaagtgctcctgggactccaggataccagatctcctgcaccgtcgagggggcacccgccagctttggcaagagcttcgcgcagaaatctggctacttcctgtgccttagttctctgggcagcctagagaacccgcaggagaacgtggtggccgatatccagatcgtggtggacaagagccccctgccgctgggcttctcccccgtctgcgaccccatggattccaaggcctctgtgtccaagaagaaacgcatgtgtgtgaagctgttgcccctgggagccacggacacggctgtgtttgatgtccggctgagtgggaagaccaagacagtgcctggataccttcgaataggggacatgggcggctttgccatctggtgcaagaaggccaaggccccgaggccagtgcccaagccccgaggtctcagccgggacatgcagggcctctctctggatgcagccagccagccaagtaagggcggcctcctggagcggacagcgtcaaggctgggctctcgggcatccactctgcggaggaatgactccatctacgaggcctccagcctctatggcatctcag

SEQ ID NO: 155911 - DNA, 686 bp, Homo sapiens
  Payload ID: 10621
  Gene Symbol: MVB12A
  Gene Name: multivesicular body subunit 12A
  ENST ID: ENST00000528515
  CDS Start-End: 55-654
tccgaggttcgaggctgtgccccgcgaccccgccttcggcgctcggctcgcaggatggatcccgtacccgggacagactcggcgccgctggctggcctggcctggtcgtcggcctctgcacccccgccgcgggggttcagcgcgatctcctgcaccgtcgagggggcacccgccagctttggcaagagcttcgcgcagaaatctggctacttcctgtgccttagttctctgggcagcctagagaacccgcaggagaacgtggtggccgatatccagatcgtggtggacaagagccccctgccgctgggcttctcccccgtctgcgaccccatggattccaggacatgggcggctttgccatctggtgcaagaaggccaaggccccgaggccagtgcccaagccccgaggtctcagccgggacatgcagggcctctctctggatgcagccagccagccaagtaagggcggcctcctggagcggacagcgtcaaggctgggctctcgggcatccactctgcggaggaatgactccatctacgaggcctccagcctctatggcatctcagccatggatggggttcccttcacactccacccacgatttgagggcaagagctgcagccccctggccttctctgcttttggggacctgaccatcaagtctctggcggacattgaggaggag

SEQ ID NO: 155912 - DNA, 656 bp, Homo sapiens
  Payload ID: 10621
  Gene Symbol: MVB12A
  Gene Name: multivesicular body subunit 12A
  ENST ID: ENST00000528604
  CDS Start-End: 256-656
aggttttcagtttcagtttcccagaaaggaggtgtctctgtggtgacgagcagggcttcatccagtgcctctgtccccaccgaggggactatgggagacatggagggtgtgtgagcaacaggtgagactggagccagctgaaaactgggagaccgacccagccaacaaacaatgtcggtctctgtcttggcacctgcaggaaacaagctcctacttccagaaaaagtgctcctgggactccaggataccagggacatgggcggctttgccatctggtgcaagaaggccaaggccccgaggccagtgcccaagccccgaggtctcagccgggacatgcagggcctctctctggatgcagccagccagccaagtaagggcggcctcctggagcggacagcgtcaaggctgggctctcgggcatccactctgcggaggaatgactccatctacgaggcctccagcctctatggcatctcagccatggatggggttcccttcacactccacccacgatttgagggcaagagctgcagccccctggccttctctgcttttggggacctgaccatcaagtctctggcggacattgaggaggagtataactacggcttcgtggtggagaagaccgcggctgcccgcctgccccccagcgtctc

SEQ ID NO: 155913 - DNA, 1154 bp, Homo sapiens
  Payload ID: 10621
  Gene Symbol: MVB12A
  Gene Name: multivesicular body subunit 12A
  Uniprot ID: Q96EY5
  ENST ID: ENST00000543795
  CDS Start-End: 26-847
ccgccttcggcgctcggctcgcaggatggatcccgtacccgggacagactcggcgccgctggctggcctggcctggtcgtcggcctctgcacccccgccgcgggggttcagcgcgatctcctgcaccgtcgagggggcacccgccagctttggcaagagcttcgcgcagaaatctggctacttcctgtgccttagttctctgggcagcctagagaacccgcaggagaacgtggtggccgatatccagatcgtggtggacaagagccccctgccgctgggcttctcccccgtctgcgaccccatggattccaaggcctctgtgtccaagaagaaacgcatgtgtgtgaagctgttgcccctgggagccacggacacggctgtgtttgatgtccggctgagtgggaagaccaagacagtgcctggataccttcgaataggggacatgggcggctttgccatctggtgcaagaaggccaaggccccgaggccagtgcccaagccccgaggtctcagccgggacatgcagggcctctctctggatgcagccagccagccaagtaagggcggcctcctggagcggacagcgtcaaggctgggctctcgggcatccactctgcggaggaatgactccatctacgaggcctccagcctctatggcatctcagccatggatggggttcccttcacactccacccacgatttgagggcaagagctgcagccccctggccttctctgcttttggggacctgaccatcaagtctctggcggacattgaggaggagtataactacggcttcgtggtggagaagaccgcggctgcccgcctgccccccagcgtctcatagtccctcacccttccgcggaaagggccaccccccctcactgcatcctggggccacccccactcactgcatcctgggaaccttcgccctgcaaggcgtttgctatcttcagccactgggcggagctgcagccctggaggagggggcgggtcgaggctgcgtggtgatggggtctccgcccccacgccctgccgggcagggctggagctggacagaagccagtgcctttaagtcatttgtgtcaaaaccctctggggtccggaggctgtgcgggtgtcctcctggcaataaacactacccggttctcgcc

SEQ ID NO: 155914 - DNA, 705 bp, Homo sapiens
  Payload ID: 10621
  Gene Symbol: MVB12A
  Gene Name: multivesicular body subunit 12A
  ENST ID: ENST00000594784
  CDS Start-End: 1-367
ataccttcgaataggggacatgggcggctttgccatctggtgcaagaaggccaaggccccgaggccagtgcccaagccccgaggtctcagccgggacatgcagggcctctctctggatgcagccagccagccaagtaagggcggcctcctggagcggacagcgtcaaggctgggctctcgggcatccactctgcggaggaatgactccatctacgaggcctccagcctctatggcatctcagccatggatggggttcccttcacactccacccacgatttgagggcaagagctgcagccccctgtataactacggcttcgtggtggagaagaccgcggctgcccgcctgccccccagcgtctcatagtccctcacccttccgcggaaagagcccccttactccacctccccgccagcctggggccaccccccctcactgcatcctggggccacccccactcactgcatcctgggaaccttcgccctgcaaggcgtttgctatcttcagccactgggcggagctgcagccctggaggagggggcgggtcgaggctgcgtggtgatggggtctccgcccccacgccctgccgggcagggctggagctggacagaagccagtgcctttaagtcatttgtgtcaaaaccctctggggtccggaggctgtgcgggtgtcctcctggcaataaacactacccggttctcgc

SEQ ID NO: 155915 - DNA, 795 bp, Homo sapiens
  Payload ID: 10621
  Gene Symbol: MVB12A
  Gene Name: multivesicular body subunit 12A
  ENST ID: ENST00000600514
  CDS Start-End: 432-795
atggagggtgtgtgagcaacaggtgagactggagccagctgaaaactgggagaccgacccagccaacaaacaatgtcggtctctgtcttggcacctgcaggaaacaagctcctacttccagaaaaagtgctcctgggactccaggataccaggcatctggacgcggtggtacatgcctgtaatcccaacacttaggcaggaggatcactcgagcccagaagatcaagactagtgtgagcaacaaaatctcctgcaccgtcgagggggcacccgccagctttggcaagagcttcgcgcagaaatctggctacttcctgtgccttagttctctgggcagcctagagaacccgcaggagaacgtggtggccgatatccagatcgtggtggacaagagccccctgccgctgggcttctcccccgtctgcgaccccatggattccaaggcctctgtgtccaagaagaaacgcatgtgtgtgaagctgttgcccctgggagccacggacacggctgtgtttgatgtccggctgagtgggaagaccaagacagtgcctggataccttcgaataggggacatgggcggctttgccatctggtgcaagaaggccaaggccccgaggccagtgcccaagccccgaggtctcagccgggacatgcagggcctctctctggatgcagccagccagccaagtaagggcggcctcctggagcggacagcgtcaaggctgggctctcgggcatccactctgcggaggaatgactccatctacgaggcctccagcctctatggcatctcag

SEQ ID NO: 155916 - DNA, 4819 bp, Homo sapiens
  Payload ID: 10622
  Gene Symbol: MVB12B
  Gene Name: multivesicular body subunit 12B
  Uniprot ID: Q9H7P6
  ENST ID: ENST00000361171
  CDS Start-End: 82-1041
cggtgaggctcgcgctcgagctgcggcgccggctcctgccgcctgggccccgggcccggcccctcccgcgccgcccgggcgatgagaagctgcttctgcgtgagacggagccgggacccgccgccgccgcagccaccgccgccgccgccccagcggggaacagaccagtccaccatgcctgaagtcaaagacctctcagaagccttgccagaaacgtcaatggatcccatcacgggagtcggggtggtggcttctcggaaccgagccccgacaggctatgacgtagttgcacagacagcagatggtgtggatgctgacctctggaaagacggcttatttaaatccaaggttaccagatacctgtgtttcacaagatcattttccaaagaaaatagtcatctggggaacgtgttagtagatatgaagctcattgacatcaaggacacactgcctgtgggcttcatcccaattcaggagacggtggacacacaggaagtggcttttaggaagaagaggctgtgcattaaatttattccacgggattcaacggaagctgcgatttgtgacattcggatcatgggccggaccaagcaggccccgcctcagtacacgtttattggggaactgaacagcatggggatctggtatcgaatgggcagagtaccaagaaatcatgactcatctcaacccacaacgccttcccagtcatcagctgcctccaccccagcccccaaccttcccaggcacatctccctaacacttcctgccaccttccgaggcaggaacagcacccggacggactacgagtaccagcactccaatttgtatgccatatcagcaatggatggtgtgccttttatgatttcagagaagttttcttgtgttccagaaagtatgcagccctttgatctcctgggaatcaccatcaaatctctagcagaaatcgaaaaagagtacgagtacagcttccgcacagagcagagcgcagccgccaggctcccgcccagccccaccaggtgtcagcagatcccgcagtcctgaggagccagcggccacctgcggggagaccaccgccgcccagactactgacggcaggggctgctgcccccgcctcctcctgccgcctccgccagccctccctcccacactgccccagcagggctggcccggagactgggcagctaagtgggcgcatcctgtcttcagctggcctcactgacaccccggcctccctggggacattgttcataaccatgactaatctgtgtgtgctgtagtgaccagcggctcctaacgtgtctgtgtgatgaccagttgtcctccaaaaacctcactcaccacggagtcaccctgagggccccgggcagttgccctggccgcccagtgacgcccaccggctccctccgctccctcctgtcacctaccagggcagaccccactaagccgttgagtctcttcctggaagaccctgagggccggcagctttgcctaggactctccagggtcgctgatcctccccggcccagggctgccaggaacaagttcctctctgcaggatctcacagcagccctgagaagacatgggaggaagaagccagtggccctggggtggaccctgccctttggacatcccatggacttgtcacccagtcgcctggaagtcggggagcagcacccctgcccccggtggaggggttgttgctttctggggaggaggacggttgacggccctgcttggatccaccaccaggacgctgtgctcggccatggcgcgcctcccccaagggctcatctgtgcaacaaccacatgccaacaatagctccaggtgcctcagccccgtgccctgacccggggaccacagggacaccctctgagacgtgctggccccaggaggatacaggcacacgggcacccagcccctctcagagccaggcgtgtcttgacggtatctgctgacgggaacaagtcattctgaaaggtccctctgacccaggtcaccaaatttgggccagaactggcacttccgagtgcccactggtgctggcgtcctcaaagtgccgggcgccaagttcagccccaggtgcgtttgcctaggcagtggtggctgccatccctcggggcccaggccctcacccgaagggctgcctcactctgtggtgtcaggcactgggctgtgtcctgattcctcagagtatggggacctgacatctttgggtccccaagagttggctcttggatgtggaggcttgatgctgcggttgggggctgcactacctgcgtccgtggaagcctctgcctcagcggggacggcctcctgctgcaggtcctgggcagcccacagtagtgctagctgaggcccagaggaacgggaggaaagggaggcagcgccggacggcgcagctggccaagaggcgggcggggccagaaatacctcatgcccctgcaccagcccctccgtctccaggccccaggcctctttgtggacccatcttcctcctctgccaccccgatcttcactcggatacctcttgatttctgtggataagggaagcggccacttctccctccctgagacccgaggatgcccctggtgggggtggccttctcaggactcctgggtggcacagcagcaggaccttgtcatgggactgatgctgagcagggagggggctgccaggctggctgccgatgctccgttcacataagccagtgtggttctggggacctgaggagccctgtggcacccacagggggcacctatgtctgccgtggctcctcgggtggtgccctgtgtgacaaagcccaacagcaagggtgactcctggcaggtgggggcagcaggagggcagagggcagagctctggccacttctgcccacttcattagggtttgtgaactttgtccttcacctcttttcgtgccctggttgtgagattgcctctaacaggtaatgccaggggcccttcactccgcccccatgactgggaagaggcctgtggcagcgccgctggaccctaggaggctcagaggcagtggtgtgggagccctgtctgcaaggacgcagaataagcagtgagggcggctgcaggagaggaaggggctcccacagcccccactgatgccgctgcaggcccctgtcgagctggggtcccagccaggtgcccccgcatgccctcctgcagttgctggatggatagggacaccaggaagaggacaaactgcatggactcaagcgagctggagccatcttctccatagcattacggacttagcataagagtaaatgactgtgaacgttgtagtaaacggcagcttaagataagtaagcagagacagtgttaaggacgagttggtgtctgtggtagcttttaggctgctcctaacccaccatttattgccttctgagaggtgggtgaggacaagcatgtgcctgtgtgtgtgtgtgtgtgtgtgtgtatatgtgtgtgtgtgcacgcacatgcgtgtgtataagcccacctgagtggggctcgtgcaggagaactgaggcatgaaactctggctcaaacctaggaattgagagcgtttctgtcttttgggagagtacttttctccacgagccctctggccactgtgggagggaaggacaagggttcccttggaaatgtgaagggtcttggcctcatccctcaggtccccccacagcacttcccactactgcttctgtccctgctggcagcctctgtccctccagaacggctaaccagagcacactgtccccaccgcctcccctttctctctggaaagttgaagtatctccaaaggccttggaaatggcacaaaggtgataaggagcaggtgctttgctgcagtctcccttgcaaatgtataattaaggcctttcttcccaccccaagtccaagaacaaatgccagccacgtcctccgccacttggagagatgagaacccagtggggtcacgtaaaggaattgcaggtcggtgagaggacaagagggactcccatgttctaagcacctgttcctggccaggctctaggccaggctctctaagcacatttctcctttcattccccctaaaaacagagtgacctggaagtagatgttctttgctccttgtcagagttgaagaggctgacttggcccactgctaagcggcagaggcagggccagccatcctgtcgcaagcccgtgctggggctgccctttctgtttccagtccagttacggacttcccggccgccactgggccctgccggtcaccaggccactgtgcagtgggcgcagagcatggtcaggagtggcctgcccgtactcctccacccagatgagggccctccagagcctgcaggcatctgtggggaatcccagcctgcaggttcttggagaagcaggtgaacctaaggatgaaagcaaaggagggccttgaggaagcagcccccaggcctggcagccacgcagcggctgagctcatgaacttggttcgcagcctgccttgcccctggaggccacgccaggcgctcacccctgagcccacagcccctgcttgggctgcctggcaccctcagggtggcccggcctcctcctgccactctgagcacatgtccgggggttgccaccagagacggctttgttctcccagctaaggccgtggagctgctgtgtgactgtgtcaggcctggacaaggaagacccttagggatgacgtccccgctgcatatttattcaaggtgactcttgtacttggcaagggaagtccactgtgtgattgtctgtattcttaatataatttgttaaataaacgtttgttttaacctctttc

SEQ ID NO: 155917 - DNA, 770 bp, Homo sapiens
  Payload ID: 10622
  Gene Symbol: MVB12B
  Gene Name: multivesicular body subunit 12B
  ENST ID: ENST00000402437
  CDS Start-End: 154-770
gtgatttgactctggctggtcaccaggtaatctgtccaaagttcagaaggtgtcaggatgctatcctgaggctccacagtgacagcctctcagtctgtgcactgtcccccacgggtggccccaaagccagctgcccatttaactgggcacagcatggacactggcctcagctctcagccttctgaggaggaccagtccaccatgcctgaagtcaaagacctctcagaagccttgccagaaacgtcaatggatcccatcacgggagtcggggtggtggcttctcggaaccgagccccgacaggctatgacgtagttgcacagacagcagatggtgtggatgctgacctctggaaagacggcttatttaaatccaaggttaccagatacctgtgtttcacaagatcattttccaaagaaaatagtcatctggggaacgtgttagtagatatgaagctcattgacatcaaggacacactgcctgtgggcttcatcccaattcaggagacggtggacacacaggaagtggcttttaggaagaagaggctgtgcattaaatttattccacgggattcaacggaagctgcgatttgtgacattcggatcatgggccggaccaagcaggccccgcctcagtacacgtttattggggaactgaacagcatggggatctggtatcgaatgggcagagtaccaagaaatcatgactcatctcaacccacaacgccttcccagtcatcagctgcctccaccccagcccccaaccttcccag

SEQ ID NO: 155918 - DNA, 2666 bp, Homo sapiens
  Payload ID: 10622
  Gene Symbol: MVB12B
  Gene Name: multivesicular body subunit 12B
  Uniprot ID: Q9H7P6
  ENST ID: ENST00000489637
  CDS Start-End: 69-734
gctcgagctgcggcgccggctcctgccgcctgggccccgggcccggcccctcccgcgccgcccgggcgatgagaagctgcttctgcgtgagacggagccgggacccgccgccgccgcagccaccgccgccgccgccccagcggggaacagaccagtccaccatgcctgaagtcaaagacctctcagaagccttgccagaaacgtcaatggatcccatcacgggagtcggggtggtggcttctcggaaccgagccccgacaggctatgacgtagttgcacagacagcagatggtgtggatgctgacctctggaaagacggcttatttaaatccaaggttaccagatacctgtgtttcacaagatcattttccaaagaaaatagtcatctggggaacgtgttagtagatatgaagctcattgacatcaaggacacactgcctgtgggcttcatcccaattcaggagacggtggacacacaggaagtggcttttaggaagaagaggctgtgcattaaatttattccacgggattcaacggaagctgcgatttgtgacattcggatcatgggccggaccaagcaggccccgcctcagtacacgtttattggggaactgaacagcatggggatctggtatcgaatgggcagagtaccaagaaatcatgactcatctcaacccacaacgccttcccagtcatcagctgcctccaccccagcccccaaccttcccaggtgaggccttgtcggggtgtcttgcgttgtcctgtggtcttaggtccctgcacaacattttagaacaccaccacttagtgtctgctgaaatactgcaaagtacagctgaataattgtagaagcaatatatctttagaggagatttttaaaaatccacttggaaatctttgcattacatgaatgcaaaggccattctatagtctattttgtgcgtgttctgcaggcttctaaaattgcagattatgcaacttaaaattggctccctattcaaaagagctgctagctacacacagacacgtgctgtatagccatggggttgggatcactggccttaaggtcaaattccttctctgtcttggccagcaactcatttgaaacccaggagggtaggtgagttcttatattcttcattttcatataatttctttttccaatgagctataaagtaagaaatgggtagtttgggtatgagagaatagtgaggagtttttcaggaaatgctagttttaacaattgtctccgcaaagaaacttgggtgagccaactgtttgctctgcaactgatttcagtcataacagaggtagtaacagtctctacactttctgcaaaaagaatcctgtcaaataaaaatcctgtgcatcactaggagtaaactaagggcaaggaacaaacagcactgatggattaagcttgagaaagggattgcaaaagtaaataaaacaagaacggtgaggcagcaacacttagggattgacataacgtaaatgagaatggatctccaagcttccacgtgggtgaatagagatgaacaaaatctgtcaggaaccggacagaagagtcaccagtaggtcttcctgggccatccacaatacagcctgccctccgggacataccaccagctctctgtactctgttcctctgtgccaagcctccgtctcacttggaagaatgtgctgtaatgaggctccaaagccctgaggactctgtcctctgggacatccccctataaagacaatctggtccttctcatgacagtttcacaaaccaagagtggtatttaaacttaactacccctggaattgcctgaaactttagaagtagttttcagtttcatttggcataaaaagataggaatctctaataagcctcccagagttgcagggtgaacagttgagtctctgttgggttcaagagtgtgaggttcgcactgcccatcagcacttgttcctcacttctgagccagagcgctgtcagctccgccctggagggcactgctgagggtcactgtctcctgtgctcaaggctatatcaggtgtgtcacctgtgctggggagtcagctaagtccatcacctgtgtgtcggggtcctccatcacctgtgctgaggcccatcacttgtacttggagcagctcaagtgtgggctccttgcagaggctggaaagcccccacaggagcagttgccctgaagttgttacagctgctccctgctgacatcatgtggtctagaagggcccagaaatgggcaccacctcaggcaggttttgactttctgtggttaaagaaagaacaccagttctctcagataaagcagagagagctctcagaagcctgctggtgactgtgagagcaaagtcacttgcacctgaagcaagacagccgagaacaccgagccaccggcagcctggtgggtttggagggtagtgcgtcagaaccagatgtttataaggcttatgtattttatcacctctgctgtacagtttatggtttacaatggctgcaaggaaatcggatcagttttgttttacttgccaaataaaacaaatgtcaaaatagtcaatataaaatgtattctaatttggctgagttaagtcagccaatatgcaacaggataattgaatgttcattagtgcttccaagtaaaagccatttgtctgtc

SEQ ID NO: 155919 - DNA, 5815 bp, Homo sapiens
  Payload ID: 10623
  Gene Symbol: MRVI1
  Gene Name: murine retrovirus integration site 1 homolog
  Uniprot ID: Q9Y6F6
  ENST ID: ENST00000424001
  CDS Start-End: 781-2574
cagcctgtggagcccaggcctcttggagcatctttggggctgacgcagcggaggttccgggcacacgtggccactcccagcaggaggctgccatgccccacattcccgaggacgaggagccccccggagagccacaggcagcccagagccctgccggccaaagttcacagtccccacaagaggctttctcaccgacacttgaaggtgtccactgcctccctgacatctgtggaccccgcggggcacatcattgacctggtgaatgaccagctgccagacatcagcatctcagaggaggacaagaagaaaaacctggcgctgctggaagaagccaagttggtgagtgagcgattcctgacccgccgtgggaggaagtccaggagcagccccggagactccccatcagctgtttccccgaacctcagccccagcgcttctcctacatcctctcggagcaactcacttacagtccccaccccgccaggtttggatgtgtgcagtggcccgccatcccctctgcctggagcaccaccacagcagaagggggatgaggccgacgtctcttcacctcaccctggcgagcctaacgtccccaaagggctagctgacaggaagcagaatgaccagaggaaagtgtctcagggcaggctggctcctcgtcctcctccagttgagaagtccaaagagattgcaatagaacaaaaggaaaacttcgatcccctccagtaccccgagaccacacccaaaggcctagctcctgttacaaacagcagtgggaaaatggccctgaacagccctcagcctggccccgtggagagcgagctggggaagcagctcttgaaaacgggctgggagggcagccctctgccgagaagtccaacccaggatgcggcaggagtgggtcccccagcctcccaggggagaggcccagctggagagccgatggggcccgaggctggctccaaagctgagcttccacccactgtgtcccggcccccgctgctgcgagggctctcctgggacagtggccctgaagaacctggcccccggctgcagaaagtgcttgccaagctgccactggcagaggaagaaaagcgttttgcaggcaaggccggcggcaagctggccaaggcccctggtctcaaagactttcagatacaagtgcagcccgtgcggatgcagaaactgaccaagctccgagaggagcacatcctgatgagaaatcagaacttagtggggctcaagcttccagaccttagtgaagcagctgagcaggaaaaagggcttccttctgaactctccccagctattgaggaagaagagtcaaagagtggcttagatgtcatgcctaatatttctgatgtgctgctgcgcaaactgcgggtccacaggagtctccctggaagtgcccctccactcactgaaaaggaagttgagaacgtgtttgtgcaactgtccttggcctttagaaatgacagctacactctggaatctagaattaaccaggctgaaagggaacgcaacctgacagaggagaacactgagaaagaactggaaaacttcaaagcttccattacgtcctcagcttcactctggcaccactgtgagcaccgggaaacctaccagaagttgctggaggacatcgctgtcctgcaccgcctggctgcccgcctctccagccgagctgaggtggtaggcgccgtccgccaggaaaagcgcatgtcgaaagcaacggaagtgatgatgcagtatgtggagaatctaaagaggacgtatgagaaggaccatgcggagctcatggagtttaaaaagcttgcaaatcagaattcaagccgcagctgtggcccctctgaagatggggtccctcgcacggcacggtccatgtccctcacgctgggaaagaatatgcctcgccggagggtcagcgttgctgtggttcctaagtttaatgccctgaatctgcctggccaaactcccagctcatcatccattccctccttaccagccttgtcggaatcacccaatgggaaaggcagcctacctgtcacttcagcactgcctgcacttttggaaaatggaaagacaaatggggacccagattgtgaagcctctgctcctgcgctgaccctgagctgcctggaggagcttagtcaggagaccaaggccaggatggaggaagaagcctacagcaagggattccaagaaggtctaaagaagaccaaagaacttcaagacctgaaggaggaggaggaagaacagaagagtgagagtcctgaggaacctgaagaggtagaagaaactgaggaagaggaaaagggcccaagaagcagcaaacttgaagaattggtccatttcttacaagtcatgtatcccaaactgtgtcagcactggcaagtgatctggatgatggctgcagtgatgctggtcttgactgttgtgctggggctctacaattcctataactcttgtgcagagcaggctgatgggccccttggaagatccacttgctcggcagcccagagggactcctggtggagctcaggactccagcatgagcagcctacagagcagtaggaaacctcacacctagccagtgccctgctctgagacactcagactaccaccctttccccaagtataacgtcaggcccaagtgtggacacactgccgcccatcccatcaggtcatgaggaagggttcttttaacactcggcacttctgtgggagctattcatacacagtgacttgatgttcttggaggatcaacaaaactgccctgggaaagcatccagtggatgaagaagtcaccttcaccaaggaactctattggaagggaaggtctcctgcccctagctcaggtggctggggagaactaaaacaccttcactggtggttgggggtaaggagcggggcacgggggaggaggaggtagggggcagtaaaaaacttactctcttttttcctctctgtaattggttatcaggaagaatttgcttaatgactaacaccctaagcatcagacctggaatttggagttgcaaagtgactatcttcccatttcccatctcattttcaataacttcagcctcccattctttcctttggaatgagagtttctttttacagaagtaggaaaggcttctcagaaaaaaaaaaaaaagtataggctgaatttagctcagtgcttgaaatgggaagatatgaattattatatacgcatctgtccacacatacacacatactgttgtgtacacacacacaacatgcctgtgcacagagccaacaacccttcaaaagtgtgctctgggtgtgtacctctggataaataagatgcatgccaagccaacccacagattttcaccagtgtggggcagtcaccaggcacctgttcaatgagctgtccacatggattgaagatgttttaaaaacacagaaaactcatggcttcaatggcagacttactagtctccatttcaaatgccaactctgagctgctgtacagcacaatctattccctattctctctttgaaaacagttaacccacctcacaggtgaatgaggagagaagatgtgctttctgcttcagtctcttactctgtgtgtgaccacatgcaagagtaaacttgcacctcagtgcttcagttcaaatggggtttccaaccccagtataattaggggtgtttcagagcatccccagttatttagcacaacactgaaggagcacatcccctctccattttgacttctctccccacttttacagccactgccttcatcagttttgtagaggtttgatttccatgtgggttttgttgtcattgttttgcatttttgttttgttattgatattgtttgctttcattgctaaaactcatatacgacttactatgagccaagcactgttctcagtattacataggtatgaattcatttaagtcctgaagaaaaagaaaaaaaaatacgaagtggatattacccttcccattttcaaataaggaaactgaagcacaaaaagaacaagtaacttgacaaggacaccccggtagtaaatcatggggctggagctcaaccccagggtaggctggctccagagctgtgctctccttgactcttctgatggtctcctagctggaagcctcacatttcagtctcattcccccaagtggcccatcagctactccatctctggctccccaactaaacagtttctctcatagtgctggacctccactcactagttttttttccagctgttcttctcttttcttcaggtcactcttctcgaccgagtgcaaaaattatcccctccataccagctttgatgaccttccttccatactcctcaccagacacaacataataggtcacacactcctctgtgctttctggcacgttttaaacattattattattgacctttacctatagtataccatggcctatttatgtatccatctcccctagcatttttcctcaaagacaagaaccatgtcttacccatctcttgggtaagtgcctagcatggtggctgacgcttgggagggtgtcattaaatgttgctcaaaagaacaagcaaacatttaaggtggtggagagcagcctggggacagctgacatgctgcatgcttctcagtaccagcaccatcacaatgcaaaaagcaacatctttcttaacctcagcttattctgtttttcagtctactctgtgagagagcaggaatgagaccagactagcaacaccattgccaagctcaaggactgggctcaatgcagtcactccttcagagagaccccccaccccaagcatgccccactttaaaatagcatgtttattgaagggggcatcctttacagtagctagaaaatgactgaggcccaagccagggttgatcaaggatgtgccattaaggtaaagagttacagagcagggcagagggactctgggggcagaagtggatgatttgcccggcctcttccagggggtctggatacaactgaaggagctttagctacatgaggccctcagagccaaagacaggatgcaaatagagttctagagagtggccgtggaagcagaactccaggtggggaatgttcaatctctgcctcccttaaagcagggccaggctcagctggccccattgttcacttggtcacaagtttcctacctttgtttctggatgagtcaaaggccaggaaggcagttatggagagctcctgcacctccagctgccccacagaaaagcctgcaagagtacttccaggcacaggccctctcccaccctattccatttgtaagcaagggaggtcgaggaaaaggacatctccaaaagggagcataagaatagccatatatacaggggctgaaaaagtgctcatgagtccatcttttctggaaagcaaagaccagcctgaagcagtgggagctgctgcccaagcggtagtgaactggagagaaacaggccctggattttcagtgaggatgtggatctgaagagtcccccaaatgcctctgaagtctgacatctctgcttagccctaggagtctggttccctgccttcagttgcagagtgatgtgtttgtgtcattgttgatgtcacctcctaaaaagaccttcactttctggctgccacaaagccatatgtgttgctccccatatacagcctgacagagtaaatggagaggaagtgctggatttgtgtatcactggctatcagttcctcatgttgttaagcctcacacaggtgtgctagcattgaactgtagagtgtcacatacctgagtttgaaaataaaagcacatttccaaacctc

SEQ ID NO: 155920 - DNA, 6126 bp, Homo sapiens
  Payload ID: 10623
  Gene Symbol: MRVI1
  Gene Name: murine retrovirus integration site 1 homolog
  Uniprot ID: Q9Y6F6
  ENST ID: ENST00000423302
  CDS Start-End: 151-2889
attatcccccgagccaggccggagtggggctcccagaggagctctcggctctaagtcccagcccctctcagaggaggcgtgcggccgaggttctgcagccagaggcttctcggctctgagctccggagccagatgtaacattgaccttaaatggtaaaagctccccagagtgaagagaggctggccagaggaggaaaggagaataactcagttttagcctgtggagcccaggcctcttggagcatctttggggctgacgcagcggaggttccgggcacacgtggccactcccagcaggaggctgccatgccccacattcccgaggacgaggagccccccggagagccacaggcagcccagagccctgccggccaaggtcctcctgccgcaggagtatcttgcagtccaactcccacgattgtcctgactggggatgccacttcaccagaaggagaaaccgacaaaaacctggccaacagagttcacagtccccacaagaggctttctcaccgacacttgaaggtgtccactgcctccctgacatctgtggaccccgcggggcacatcattgacctggtgaatgaccagctgccagacatcagcatctcagaggaggacaagaagaaaaacctggcgctgctggaagaagccaagttggtgagtgagcgattcctgacccgccgtgggaggaagtccaggagcagccccggagactccccatcagctgtttccccgaacctcagccccagcgcttctcctacatcctctcggagcaactcacttacagtccccaccccgccaggtttggatgtgtgcagtggcccgccatcccctctgcctggagcaccaccacagaagggggatgaggccgacgtctcttcacctcaccctggcgagcctaacgtccccaaagggctagctgacaggaagcagaatgaccagaggaaagtgtctcagggcaggctggctcctcgtcctcctccagttgagaagtccaaagagattgcaatagaacaaaaggaaaacttcgatcccctccagtaccccgagaccacacccaaaggcctagctcctgttacaaacagcagtgggaaaatggccctgaacagccctcagcctggccccgtggagagcgagctggggaagcagctcttgaaaacgggctgggagggcagccctctgccgagaagtccaacccaggatgcggcaggagtgggtcccccagcctcccaggggagaggcccagctggagagccgatggggcccgaggctggctccaaagctgagcttccacccactgtgtcccggcccccgctgctgcgagggctctcctgggacagtggccctgaagaacctggcccccggctgcagaaagtgcttgccaagctgccactggcagaggaagaaaagcgttttgcaggcaaggccggcggcaagctggccaaggcccctggtctcaaagactttcagatacaagtgcagcccgtgcggatgcagaaactgaccaagctccgagaggagcacatcctgatgagaaatcagaacttagtggggctcaagcttccagaccttagtgaagcagctgagcaggaaaaagggcttccttctgaactctccccagctattgaggaagaagagtcaaagagtggcttagatgtcatgcctaatatttctgatgtgctgctgcgcaaactgcgggtccacaggagtctccctggaagtgcccctccactcactgaaaaggaagttgagaacgtgtttgtgcaactgtccttggcctttagaaatgacagctacactctggaatctagaattaaccaggctgaaagggaacgcaacctgacagaggagaacactgagaaagaactggaaaacttcaaagcttccattacgtcctcagcttcactctggcaccactgtgagcaccgggaaacctaccagaagttgctggaggacatcgctgtcctgcaccgcctggctgcccgcctctccagccgagctgaggtggtaggcgccgtccgccaggaaaagcgcatgtcgaaagcaacggaagtgatgatgcagtatgtggagaatctaaagaggacgtatgagaaggaccatgcggagctcatggagtttaaaaagcttgcaaatcagaattcaagccgcagctgtggcccctctgaagatggggtccctcgcacggcacggtccatgtccctcacgctgggaaagaatatgcctcgccggagggtcagcgttgctgtggttcctaagtttaatgccctgaatctgcctggccaaactcccagctcatcatccattccctccttaccagccttgtcggaatcacccaatgggaaaggcagcctacctgtcacttcagcactgcctgcacttttggaaaatggaaagacaaatggggacccagattgtgaagcctctgctcctgcgctgaccctgagctgcctggaggagcttagtcaggagaccaaggccaggatggaggaagaagcctacagcaagggattccaagaaggtctaaagaagaccaaagaacttcaagacctgaaggaggaggaggaagaacagaagagtgagagtcctgaggaacctgaagaggtagaagaaactgaggaagaggaaaagggcccaagaagcagcaaacttgaagaattggtccatttcttacaagtcatgtatcccaaactgtgtcagcactggcaagtgatctggatgatggctgcagtgatgctggtcttgactgttgtgctggggctctacaattcctataactcttgtgcagagcaggctgatgggccccttggaagatccacttgctcggcagcccagagggactcctggtggagctcaggactccagcatgagcagcctacagagcagtaggaaacctcacacctagccagtgccctgctctgagacactcagactaccaccctttccccaagtataacgtcaggcccaagtgtggacacactgccgcccatcccatcaggtcatgaggaagggttcttttaacactcggcacttctgtgggagctattcatacacagtgacttgatgttcttggaggatcaacaaaactgccctgggaaagcatccagtggatgaagaagtcaccttcaccaaggaactctattggaagggaaggtctcctgcccctagctcaggtggctggggagaactaaaacaccttcactggtggttgggggtaaggagcggggcacgggggaggaggaggtagggggcagtaaaaaacttactctcttttttcctctctgtaattggttatcaggaagaatttgcttaatgactaacaccctaagcatcagacctggaatttggagttgcaaagtgactatcttcccatttcccatctcattttcaataacttcagcctcccattctttcctttggaatgagagtttctttttacagaagtaggaaaggcttctcagaaaaaaaaaaaaaagtataggctgaatttagctcagtgcttgaaatgggaagatatgaattattatatacgcatctgtccacacatacacacatactgttgtgtacacacacacaacatgcctgtgcacagagccaacaacccttcaaaagtgtgctctgggtgtgtacctctggataaataagatgcatgccaagccaacccacagattttcaccagtgtggggcagtcaccaggcacctgttcaatgagctgtccacatggattgaagatgttttaaaaacacagaaaactcatggcttcaatggcagacttactagtctccatttcaaatgccaactctgagctgctgtacagcacaatctattccctattctctctttgaaaacagttaacccacctcacaggtgaatgaggagagaagatgtgctttctgcttcagtctcttactctgtgtgtgaccacatgcaagagtaaacttgcacctcagtgcttcagttcaaatggggtttccaaccccagtataattaggggtgtttcagagcatccccagttatttagcacaacactgaaggagcacatcccctctccattttgacttctctccccacttttacagccactgccttcatcagttttgtagaggtttgatttccatgtgggttttgttgtcattgttttgcatttttgttttgttattgatattgtttgctttcattgctaaaactcatatacgacttactatgagccaagcactgttctcagtattacataggtatgaattcatttaagtcctgaagaaaaagaaaaaaaaatacgaagtggatattacccttcccattttcaaataaggaaactgaagcacaaaaagaacaagtaacttgacaaggacaccccggtagtaaatcatggggctggagctcaaccccagggtaggctggctccagagctgtgctctccttgactcttctgatggtctcctagctggaagcctcacatttcagtctcattcccccaagtggcccatcagctactccatctctggctccccaactaaacagtttctctcatagtgctggacctccactcactagttttttttccagctgttcttctcttttcttcaggtcactcttctcgaccgagtgcaaaaattatcccctccataccagctttgatgaccttccttccatactcctcaccagacacaacataataggtcacacactcctctgtgctttctggcacgttttaaacattattattattgacctttacctatagtataccatggcctatttatgtatccatctcccctagcatttttcctcaaagacaagaaccatgtcttacccatctcttgggtaagtgcctagcatggtggctgacgcttgggagggtgtcattaaatgttgctcaaaagaacaagcaaacatttaaggtggtggagagcagcctggggacagctgacatgctgcatgcttctcagtaccagcaccatcacaatgcaaaaagcaacatctttcttaacctcagcttattctgtttttcagtctactctgtgagagagcaggaatgagaccagactagcaacaccattgccaagctcaaggactgggctcaatgcagtcactccttcagagagaccccccaccccaagcatgccccactttaaaatagcatgtttattgaagggggcatcctttacagtagctagaaaatgactgaggcccaagccagggttgatcaaggatgtgccattaaggtaaagagttacagagcagggcagagggactctgggggcagaagtggatgatttgcccggcctcttccagggggtctggatacaactgaaggagctttagctacatgaggccctcagagccaaagacaggatgcaaatagagttctagagagtggccgtggaagcagaactccaggtggggaatgttcaatctctgcctcccttaaagcagggccaggctcagctggccccattgttcacttggtcacaagtttcctacctttgtttctggatgagtcaaaggccaggaaggcagttatggagagctcctgcacctccagctgccccacagaaaagcctgcaagagtacttccaggcacaggccctctcccaccctattccatttgtaagcaagggaggtcgaggaaaaggacatctccaaaagggagcataagaatagccatatatacaggggctgaaaaagtgctcatgagtccatcttttctggaaagcaaagaccagcctgaagcagtgggagctgctgcccaagcggtagtgaactggagagaaacaggccctggattttcagtgaggatgtggatctgaagagtcccccaaatgcctctgaagtctgacatctctgcttagccctaggagtctggttccctgccttcagttgcagagtgatgtgtttgtgtcattgttgatgtcacctcctaaaaagaccttcactttctggctgccacaaagccatatgtgttgctccccatatacagcctgacagagtaaatggagaggaagtgctggatttgtgtatcactggctatcagttcctcatgttgttaagcctcacacaggtgtgctagcattgaactgtagagtgtcacatacctgagtttgaaaataaaagcacatttccaaa

SEQ ID NO: 155921 - DNA, 558 bp, Homo sapiens
  Payload ID: 10623
  Gene Symbol: MRVI1
  Gene Name: murine retrovirus integration site 1 homolog
  ENST ID: ENST00000533631
  CDS Start-End: 1-354
aaaaacctggccaacagagttcacagtccccacaagaggctttctcaccgacacttgaaggtgtccactgcctccctgacatctgtggaccccgcggggcacatcattgacctggtgaatgaccagctgccagacatcagcatctcagaggaggacaagaagaaaaacctggcgctgctggaagaagccaagttggtgagtgagcgattcctgacccgccgtgggaggaagtccaggagcagccccggagactccccatcagctgtttccccgaacctcagccccagcgcttctcctacatcctctcggagcaactcacttacagtccccaccccgccagcagaagggggatgaggccgacgtctcttcacctcaccctggcgagcctgagcacatcctgatgagaaatcagaacttagtggggctcaagcttccagaccttagtgaagcagctgagcaggaaaaagggcttccttctgaactctccccagctattgaggaagaagagtcaaagagtggcttagatgtcatgcctaatatttctgatgtgctgctgcg

SEQ ID NO: 155922 - DNA, 2686 bp, Homo sapiens
  Payload ID: 10623
  Gene Symbol: MRVI1
  Gene Name: murine retrovirus integration site 1 homolog
  ENST ID: ENST00000527509
  CDS Start-End: 195-2660
gaggctggccagaggaggaaaggagaataactcagttttagacagggtctcgcactgtcacccaggctggagtgcagtggtgcaaccccacctcccgggttcaagcaattctcatgcctcagcctcccaagtagctgggattacagggtcctcctgccgcaggagtatcttgcagtccaactcccacgattgtcctgactggggatgccacttcaccagaaggagaaaccgacaaaaacctggccaacagagttcacagtccccacaagaggctttctcaccgacacttgaaggtgtccactgcctccctgacatctgtggaccccgcggggcacatcattgacctggtgaatgaccagctgccagacatcagcatctcagaggaggacaagaagaaaaacctggcgctgctggaagaagccaagttggtgagtgagcgattcctgacccgccgtgggaggaagtccaggagcagccccggagactccccatcagctgtttccccgaacctcagccccagcgcttctcctacatcctctcggagcaactcacttacagtccccaccccgccaggtttggatgtgtgcagtggcccgccatcccctctgcctggagcaccaccacagaagggggatgaggccgacgtctcttcacctcaccctggcgagcctaacgtccccaaagggctagctgacaggaagcagaatgaccagaggaaagtgtctcagggcaggctggctcctcgtcctcctccagttgagaagtccaaagagattgcaatagaacaaaaggaaaacttcgatcccctccagtaccccgagaccacacccaaaggcctagctcctgttacaaacagcagtgggaaaatggccctgaacagccctcagcctggccccgtggagagcgagctggggaagcagctcttgaaaacgggctgggagggcagccctctgccgagaagtccaacccaggatgcggcaggagtgggtcccccagcctcccaggggagaggcccagctggagagccgatggggcccgaggctggctccaaagctgagcttccacccactgtgtcccggcccccgctgctgcgagggctctcctgggacagtggccctgaagaacctggcccccggctgcagaaagtgcttgccaagctgccactggcagaggaagaaaagcgttttgcaggcaaggccggcggcaagctggccaaggcccctggtctcaaagactttcagatacaagtgcagcccgtgcggatgcagaaactgaccaagctccgagaggagcacatcctgatgagaaatcagaacttagtggggctcaagcttccagaccttagtgaagcagctgagcaggaaaaagggcttccttctgaactctccccagctattgaggaagaagagtcaaagagtggcttagatgtcatgcctaatatttctgatgtgctgctgcgcaaactgcgggtccacaggagtctccctggaagtgcccctccactcactgaaaaggaagttgagaacgtgtttgtgcaactgtccttggcctttagaaatgacagctacactctggaatctagaattaaccaggctgaaagggaacgcaacctgacagaggagaacactgagaaagaactggaaaacttcaaagcttccattacgtcctcagcttcactctggcaccactgtgagcaccgggaaacctaccagaagttgctggaggacatcgctgtcctgcaccgcctggctgcccgcctctccagccgagctgaggtggtaggcgccgtccgccaggaaaagcgcatgtcgaaagcaacggaagtgatgatgcagtatgtggagaatctaaagaggacgtatgagaaggaccatgcggagctcatggagtttaaaaagcttgcaaatcagaattcaagccgcagctgtggcccctctgaagatggggtccctcgcacggcacggtccatgtccctcacgctgggaaagaatatgcctcgccggagggtcagcgttgctgtggttcctaagtttaatgccctgaatctgcctggccaaactcccagctcatcatccattccctccttaccagccttgtcggaatcacccaatgggaaaggcagcctacctgtcacttcagcactgcctgcacttttggaaaatggaaagacaaatggggacccagattgtgaagcctctgctcctgcgctgaccctgagctgcctggaggagcttagtcaggagaccaaggccaggatggaggaagaagcctacagcaagggattccaagaaggtctaaagaagaccaaagaacttcaagacctgaaggaggaggaggaagaacagaagagtgagagtcctgaggaacctgaagaggtagaagaaactgaggaagaggaaaagggcccaagaagcagcaaacttgaagaattggtccatttcttacaagtcatgtatcccaaactgtgtcagcactggcaagtgatctggatgatggctgcagtgatgctggtcttgactgttgtgctggggctctacaattcctataactcttgtgcagagcaggctgatgggccccttggaagatccacttgctcggcagcccagagggactcctggtggagctcaggactccagcatgagcagcctacagagcagtaggaaacctcacacctagccagtgccct

SEQ ID NO: 155923 - DNA, 540 bp, Homo sapiens
  Payload ID: 10623
  Gene Symbol: MRVI1
  Gene Name: murine retrovirus integration site 1 homolog
  ENST ID: ENST00000531308
  CDS Start-End: 21-227
agatgtaacattgaccttaaatggtaaaagctccccagagtgaagagaggctggccagaggaggaaaggagaataactcagttttagacagggtctcgcactgtcacccaggctggagtgcagtggtgcaaccccacctcccgggttcaagcaattctcatgcctcagcctcccaagtagctgggattacagagattccatcaagaagacttctgcactgggtttgaggctctgaccatccacagtcctgggtcctattctcaactccaaaaacaccgcaaggagagtggtggacttcctctcaagaggattgggcatctgtgtctggtgaagtctttaaggaggcccaataaataacacctctttccttcactgaagctttaaggcttgttgggaattcagagactaatatcacccgtatgactgatgaagctggtgttggaaagtgtttggatcaacagcctgtggagcccaggcctcttggagcatctttggggctgacgcagcggaggttccgggcacacgtggccactcccagca

SEQ ID NO: 155924 - DNA, 545 bp, Homo sapiens
  Payload ID: 10623
  Gene Symbol: MRVI1
  Gene Name: murine retrovirus integration site 1 homolog
  ENST ID: ENST00000529547
  CDS Start-End: 339-545
gaataacctgcctcttcggctgggaagcggagggaaccttctcttccttaaaggagacaaatctgggagctctgagccactaggatgaacaccagagtctctctgagccttggcttggttttgttgatgctgtgcatgcttagagaactcagctgccctgtttggagaatggcgagggcactgagtggactctatgtaccagcaccttgcatgtatttcctgatttaatcgttacaacaacgctaaaagcctgtggagcccaggcctcttggagcatctttggggctgacgcagcggaggttccgggcacacgtggccactcccagcaggaggctgccatgccccacattcccgaggacgaggagccccccggagagccacaggcagcccagagccctgccggccaaggtcctcctgccgcaggagtatcttgcagtccaactcccacgattgtcctgactggggatgccacttcaccagaaggagaaaccgacaaaaacctggccaacagagttcacagtccccacaagaggctttctcaccga

SEQ ID NO: 155925 - DNA, 2887 bp, Homo sapiens
  Payload ID: 10623
  Gene Symbol: MRVI1
  Gene Name: murine retrovirus integration site 1 homolog
  Uniprot ID: Q9Y6F6
  ENST ID: ENST00000531107
  CDS Start-End: 65-2779
aaactcaagccggctctcactgtggcttgtggctccgggaaatggaacccagcttgggacagggatgggaatggatttgacttgtccttttggcatctccccagcctgtggagcccaggcctcttggagcatctttggggctgacgcagcggaggttccgggcacacgtggccactcccagcaggaggctgccatgccccacattcccgaggacgaggagccccccggagagccacaggcagcccagagccctgccggccaaggtcctcctgccgcaggagtatcttgcagtccaactcccacgattgtcctgactggggatgccacttcaccagaaggagaaaccgacaaaaacctggccaacagagttcacagtccccacaagaggctttctcaccgacacttgaaggtgtccactgcctccctgacatctgtggaccccgcggggcacatcattgacctggtgaatgaccagctgccagacatcagcatctcagaggaggacaagaagaaaaacctggcgctgctggaagaagccaagttggtgagtgagcgattcctgacccgccgtgggaggaagtccaggagcagccccggagactccccatcagctgtttccccgaacctcagccccagcgcttctcctacatcctctcggagcaactcacttacagtccccaccccgccaggtttggatgtgtgcagtggcccgccatcccctctgcctggagcaccaccacagcagaagggggatgaggccgacgtctcttcacctcaccctggcgagcctaacgtccccaaagggctagctgacaggaagcagaatgaccagaggaaagtgtctcagggcaggctggctcctcgtcctcctccagttgagaagtccaaagagattgcaatagaacaaaaggaaaacttcgatcccctccagtaccccgagaccacacccaaaggcctagctcctgttacaaacagcagtgggaaaatggccctgaacagccctcagcctggccccgtggagagcgagctggggaagcagctcttgaaaacgggctgggagggcagccctctgccgagaagtccaacccaggatgcggcaggagtgggtcccccagcctcccaggggagaggcccagctggagagccgatggggcccgaggctggctccaaagctgagcttccacccactgtgtcccggcccccgctgctgcgagggctctcctgggacagtggccctgaagaacctggcccccggctgcagaaagtgcttgccaagctgccactggcagaggaagaaaagcgttttgcaggcaaggccggcggcaagctggccaaggcccctggtctcaaagactttcagatacaagtgcagcccgtgcggatgcagaaactgaccaagctccgagaggagcacatcctgatgagaaatcagaacttagtggggctcaagcttccagaccttagtgaagcagctgagcaggaaaaagggcttccttctgaactctccccagctattgaggaagaagagtcaaagagtggcttagatgtcatgcctaatatttctgatgtgctgctgcgcaaactgcgggtccacaggagtctccctggaagtgcccctccactcactgaaaaggaagttgagaacgtgtttgtgcaactgtccttggcctttagaaatgacagctacactctggaatctagaattaaccaggctgaaagggaacgcaacctgacagaggagaacactgagaaagaactggaaaacttcaaagcttccattacgtcctcagcttcactctggcaccactgtgagcaccgggaaacctaccagaagttgctggaggacatcgctgtcctgcaccgcctggctgcccgcctctccagccgagctgaggtggtaggcgccgtccgccaggaaaagcgcatgtcgaaagcaacggaagtgatgatgcagtatgtggagaatctaaagaggacgtatgagaaggaccatgcggagctcatggagtttaaaaagcttgcaaatcagaattcaagccgcagctgtggcccctctgaagatggggtccctcgcacggcacggtccatgtccctcacgctgggaaagaatatgcctcgccggagggtcagcgttgctgtggttcctaagtttaatgccctgaatctgcctggccaaactcccagctcatcatccattccctccttaccagccttgtcggaatcacccaatgggaaaggcagcctacctgtcacttcagcactgcctgcacttttggaaaatggaaagacaaatggggacccagattgtgaagcctctgctcctgcgctgaccctgagctgcctggaggagcttagtcaggagaccaaggccaggatggaggaagaagcctacagcaagggattccaagaaggtctaaagaagaccaaagaacttcaagacctgaaggaggaggaggaagaacagaagagtgagagtcctgaggaacctgaagaggtagaagaaactgaggaagaggaaaagggcccaagaagcagcaaacttgaagaattggtccatttcttacaagtcatgtatcccaaactgtgtcagcactggcaagtgatctggatgatggctgcagtgatgctggtcttgactgttgtgctggggctctacaattcctataactcttgtgcagagcaggctgatgggccccttggaagatccacttgctcggcagcccagagggactcctggtggagctcaggactccagcatgagcagcctacagagcagtaggaaacctcacacctagccagtgccctgctctgagacactcagactaccaccctttccccaagtataacgtcaggcccaagtgtggacacactgccgcccatcccatca

SEQ ID NO: 155926 - DNA, 2824 bp, Homo sapiens
  Payload ID: 10623
  Gene Symbol: MRVI1
  Gene Name: murine retrovirus integration site 1 homolog
  Uniprot ID: Q9Y6F6
  ENST ID: ENST00000534266
  CDS Start-End: 1023-2816
cctctgactttgtaaacaaagccagagagccggaggaaatgaaattccaaatgccctctcctagcctggtttgacctccggtgttgatgcaaactcaagccggctctcactgtggcttgtggctccgggaaatggaacccagcttgggacagggatgggaatggatttgacttgtccttttggcatctccccagcctgtggagcccaggcctcttggagcatctttggggctgacgcagcggaggttccgggcacacgtggccactcccagcaggaggctgccatgccccacattcccgaggacgaggagccccccggagagccacaggcagcccagagccctgccggccaacagggtcctcctgccgcaggagtatcttgcagtccaactcccacgattgtcctgactggggatgccacttcaccagaaggagaaaccgacaaaaacctggccaacagagttcacagtccccacaagaggctttctcaccgacacttgaaggtgtccactgcctccctgacatctgtggaccccgcggggcacatcattgacctggtgaatgaccagctgccagacatcagcatctcagaggaggacaagaagaaaaacctggcgctgctggaagaagccaagttggtgagtgagcgattcctgacccgccgtgggaggaagtccaggagcagccccggagactccccatcagctgtttccccgaacctcagccccagcgcttctcctacatcctctcggagcaactcacttacagtccccaccccgccagaagggggatgaggccgacgtctcttcacctcaccctggcgagcctaacgtccccaaagggctagctgacaggaagcagaatgaccagaggaaagtgtctcagggcaggctggctcctcgtcctcctccagttgagaagtccaaagagattgcaatagaacaaaaggaaaacttcgatcccctccagtaccccgagaccacacccaaaggcctagctcctgttacaaacagcagtgggaaaatggccctgaacagccctcagcctggccccgtggagagcgagctggggaagcagctcttgaaaacgggctgggagggcagccctctgccgagaagtccaacccaggatgcggcaggagtgggtcccccagcctcccaggggagaggcccagctggagagccgatggggcccgaggctggctccaaagctgagcttccacccactgtgtcccggcccccgctgctgcgagggctctcctgggacagtggccctgaagaacctggcccccggctgcagaaagtgcttgccaagctgccactggcagaggaagaaaagcgttttgcaggcaaggccggcggcaagctggccaaggcccctggtctcaaagactttcagatacaagtgcagcccgtgcggatgcagaaactgaccaagctccgagaggagcacatcctgatgagaaatcagaacttagtggggctcaagcttccagaccttagtgaagcagctgagcaggaaaaagggcttccttctgaactctccccagctattgaggaagaagagtcaaagagtggcttagatgtcatgcctaatatttctgatgtgctgctgcgcaaactgcgggtccacaggagtctccctggaagtgcccctccactcactgaaaaggaagttgagaacgtgtttgtgcaactgtccttggcctttagaaatgacagctacactctggaatctagaattaaccaggctgaaagggaacgcaacctgacagaggagaacactgagaaagaactggaaaacttcaaagcttccattacgtcctcagcttcactctggcaccactgtgagcaccgggaaacctaccagaagttgctggaggacatcgctgtcctgcaccgcctggctgcccgcctctccagccgagctgaggtggtaggcgccgtccgccaggaaaagcgcatgtcgaaagcaacggaagtgatgatgcagtatgtggagaatctaaagaggacgtatgagaaggaccatgcggagctcatggagtttaaaaagcttgcaaatcagaattcaagccgcagctgtggcccctctgaagatggggtccctcgcacggcacggtccatgtccctcacgctgggaaagaatatgcctcgccggagggtcagcgttgctgtggttcctaagtttaatgccctgaatctgcctggccaaactcccagctcatcatccattccctccttaccagccttgtcggaatcacccaatgggaaaggcagcctacctgtcacttcagcactgcctgcacttttggaaaatggaaagacaaatggggacccagattgtgaagcctctgctcctgcgctgaccctgagctgcctggaggagcttagtcaggagaccaaggccaggatggaggaagaagcctacagcaagggattccaagaaggtctaaagaagaccaaagaacttcaagacctgaaggaggaggaggaagaacagaagagtgagagtcctgaggaacctgaagaggtagaagaaactgaggaagaggaaaagggcccaagaagcagcaaacttgaagaattggtccatttcttacaagtcatgtatcccaaactgtgtcagcactggcaagtgatctggatgatggctgcagtgatgctggtcttgactgttgtgctggggctctacaattcctataactcttgtgcagagcaggctgatgggccccttggaagatccacttgctcggcagcccagagggactcctggtggagctcaggactccagcatgagcagcctacagagcagtaggaaacctc

SEQ ID NO: 155927 - DNA, 529 bp, Homo sapiens
  Payload ID: 10623
  Gene Symbol: MRVI1
  Gene Name: murine retrovirus integration site 1 homolog
  ENST ID: ENST00000529068
  CDS Start-End: 1-191
agagtgaagagaggctggccagaggaggaaaggagaataactcagttttagacagggtctcgcactgtcacccaggctggagtgcagtggtgcaaccccacctcccgggttcaagcaattctcatgcctcagcctcccaagtagctgggattacagagattccatcaagaagacttctgcactgggtttgaggctctgaccatccacagtcctgggtcctattctcaactccaaaaacaccgcaaggagagtggtggacttcctctcaagaggattgggcatctgtgtctggtgaagtctttaaggaggcccaataaataacacctctttccttcactgaagctttaaggcttgttgggaattcagagactaatatcacccgtatgactgatgaagctggtgttggaaagtgtttggatcaacagggtcctcctgccgcaggagtatcttgcagtccaactcccacgattgtcctgactggggatgccacttcaccagaaggagaaaccgacaaaaacctggccaacag

SEQ ID NO: 155928 - DNA, 2548 bp, Homo sapiens
  Payload ID: 10623
  Gene Symbol: MRVI1
  Gene Name: murine retrovirus integration site 1 homolog
  ENST ID: ENST00000529448
  CDS Start-End: 13-276
cattgaccttaaatggtaaaagctccccagagtgaagagaggctggccagaggaggaaaggagaataactcagttttagggtcctcctgccgcaggagtatcttgcagtccaactcccacgattgtcctgactggggatgccacttcaccagaaggagaaaccgacaaaaacctggccaacagagttcacagtccccacaagaggctttctcaccgacacttgaaggtgtccactgcctccctgacatctgtggaccccgcggggcacatcattgacctggtgaatgaccagctgccagacatcagcatctcagaggaggacaagaagaaaaacctggcgctgctggaagaagccaagttggtgagtgagcgattcctgacccgccgtgggaggaagtccaggagcagccccggagactccccatcagctgtttccccgaacctcagccccagcgcttctcctacatcctctcggagcaactcacttacagtccccaccccgccagaagggggatgaggccgacgtctcttcacctcaccctggcgagcctaacgtccccaaagggctagctgacaggaagcagaatgaccagaggaaagtgtctcagggcaggctggctcctcgtcctcctccagttgagaagtccaaagagattgcaatagaacaaaaggaaaacttcgatcccctccagtaccccgagaccacacccaaaggcctagctcctgttacaaacagcagtgggaaaatggccctgaacagccctcagcctggccccgtggagagcgagctggggaagcagctcttgaaaacgggctgggagggcagccctctgccgagaagtccaacccaggatgcggcaggagtgggtcccccagcctcccaggggagaggcccagctggagagccgatggggcccgaggctggctccaaagctgagcttccacccactgtgtcccggcccccgctgctgcgagggctctcctgggacagtggccctgaagaacctggcccccggctgcagaaagtgcttgccaagctgccactggcagaggaagaaaagcgttttgcaggcaaggccggcggcaagctggccaaggcccctggtctcaaagactttcagatacaagtgcagcccgtgcggatgcagaaactgaccaagctccgagaggagcacatcctgatgagaaatcagaacttagtggggctcaagcttccagaccttagtgaagcagctgagcaggaaaaagggcttccttctgaactctccccagctattgaggaagaagagtcaaagagtggcttagatgtcatgcctaatatttctgatgtgctgctgcgcaaactgcgggtccacaggagtctccctggaagtgcccctccactcactgaaaaggaagttgagaacgtgtttgtgcaactgtccttggcctttagaaatgacagctacactctggaatctagaattaaccaggctgaaagggaacgcaacctgacagaggagaacactgagaaagaactggaaaacttcaaagcttccattacgtcctcagcttcactctggcaccactgtgagcaccgggaaacctaccagaagttgctggaggacatcgctgtcctgcaccgcctggctgcccgcctctccagccgagctgaggtggtaggcgccgtccgccaggaaaagcgcatgtcgaaagcaacggaagtgatgatgcagtatgtggagaatctaaagaggacgtatgagaaggaccatgcggagctcatggagtttaaaaagcttgcaaatcagaattcaagccgcagctgtggcccctctgaagatggggtccctcgcacggcacggtccatgtccctcacgctgggaaagaatatgcctcgccggagggtcagcgttgctgtggttcctaagtttaatgccctgaatctgcctggccaaactcccagctcatcatccattccctccttaccagccttgtcggaatcacccaatgggaaaggcagcctacctgtcacttcagcactgcctgcacttttggaaaatggaaagacaaatggggacccagattgtgaagcctctgctcctgcgctgaccctgagctgcctggaggagcttagtcaggagaccaaggccaggatggaggaagaagcctacagcaagggattccaagaaggtctaaagaagaccaaagaacttcaagacctgaaggaggaggaggaagaacagaagagtgagagtcctgaggaacctgaagaggtagaagaaactgaggaagaggaaaagggcccaagaagcagcaaacttgaagaattggtccatttcttacaagtcatgtatcccaaactgtgtcagcactggcaagtgatctggatgatggctgcagtgatgctggtcttgactgttgtgctggggctctacaattcctataactcttgtgcagagcaggctgatgggccccttggaagatccacttgctcggcagcccagagggactcctggtggagctcaggactccagcatgagcagcctacagagcagtaggaaacctc

SEQ ID NO: 155929 - DNA, 1650 bp, Homo sapiens
  Payload ID: 10623
  Gene Symbol: MRVI1
  Gene Name: murine retrovirus integration site 1 homolog
  ENST ID: ENST00000526414
  CDS Start-End: 151-1437
atatcctagaataacctgcctcttcggctgggaagcggagggaaccttctcttccttaaagcctgtggagcccaggcctcttggagcatctttggggctgacgcagcggaggttccgggcacacgtggccactcccagcaggaggctgccatgccccacattcccgaggacgaggagccccccggagagccacaggcagcccagagccctgccggccaacagggtcctcctgccgcaggagtatcttgcagtccaactcccacgattgtcctgactggggatgccacttcaccagaaggagaaaccgacaaaaacctggccaacagagttcacagtccccacaagaggctttctcaccgacacttgaaggtgtccactgcctccctgacatctgtggaccccgcggggcacatcattgacctggtgaatgaccagctgccagacatcagcatctcagaggaggacaagaagaaaaacctggcgctgctggaagaagccaagttggtgagtgagcgattcctgacccgccgtgggaggaagtccaggagcagccccggagactccccatcagctgtttccccgaacctcagccccagcgcttctcctacatcctctcggagcaactcacttacagtccccaccccgccaggtttggatgtgtgcagtggcccgccatcccctctgcctggagcaccaccacagaagggggatgaggccgacgtctcttcacctcaccctggcgagcctgagcacatcctgatgagaaatcagaacttagtggggctcaagcttccagaccttagtgaagcagctgagcaggaaaaagggcttccttctgaactctccccagctattgaggaagaagagtcaaagagtggcttagatgtcatgcctaatatttctgatgtgctgctgcgcaaactgcgggtccacaggagtctccctggaagtgcccctccactcactgaaaaggaagttgagaacgtgtttgtgcaactgtccttggcctttagaaatgacagctacactctggaatctagaattaaccaggctgaaagggaacgcaacctgacagaggagaacactgagaaagaactggaaaacttcaaagcttccattacgtcctcagcttcactctggcaccactgtgagcaccgggaaacctaccagaagttgctggaggacatcgctgtcctgcaccgcctggctgcccgcctctccagccgagctgaggtggtaggcgccgtccgccaggaaaagcgcatgtcgaaagcaacggaagtgatgatgcagtatgtggagaatctaaagaggacgtatgagaaggaccatgcggagctcatggagtttaaaaagcttgcaaatcagaattcaagccgcagctgtggcccctctgaatatgcctcgccggagggtcagcgttgctgtggttcctaagtttaatgccctgaatctgcctggccaaactcccagctcatcatccattccctccttaccagccttgtcggaatcacccaatgggaaaggcagcctacctgtcacttcagcactgcctgcacttttggaaaatggaaagacaaatggggacccagattgtgaagcctctgctcctgcgctgaccctgagctgcctggaggagcttagtcagga

SEQ ID NO: 155930 - DNA, 2468 bp, Homo sapiens
  Payload ID: 10623
  Gene Symbol: MRVI1
  Gene Name: murine retrovirus integration site 1 homolog
  Uniprot ID: Q9Y6F6
  ENST ID: ENST00000541483
  CDS Start-End: 21-2141
agatgtaacattgaccttaaatggtaaaagctccccagagtgaagagaggctggccagaggaggaaaggagaataactcagttttagcctgtggagcccaggcctcttggagcatctttggggctgacgcagcggaggttccgggcacacgtggccactcccagcaggaggctgccatgccccacattcccgaggacgaggagccccccggagagccacaggcagcccagagccctgccggccaaggtcctcctgccgcaggagtatcttgcagtccaactcccacgattgtcctgactggggatgccacttcaccagaaggagaaaccgacaaaaacctggccaacagagttcacagtccccacaagaggctttctcaccgacacttgaaggtgtccactgcctccctgacatctgtggaccccgcggggcacatcattgacctggtgaatgaccagctgccagacatcagcatctcagaggaggacaagaagaaaaacctggcgctgctggaagaagccaagttggtgagtgagcgattcctgacccgccgtgggaggaagtccaggagcagccccggagactccccatcagctgtttccccgaacctcagccccagcgcttctcctacatcctctcggagcaactcacttacagtccccaccccgccaggtttggatgtgtgcagtggcccgccatcccctctgcctggagcaccaccacagaagggggatgaggccgacgtctcttcacctcaccctggcgagcctgagcacatcctgatgagaaatcagaacttagtggggctcaagcttccagaccttagtgaagcagctgagcaggaaaaagggcttccttctgaactctccccagctattgaggaagaagagtcaaagagtggcttagatgtcatgcctaatatttctgatgtgctgctgcgcaaactgcgggtccacaggagtctccctggaagtgcccctccactcactgaaaaggaagttgagaacgtgtttgtgcaactgtccttggcctttagaaatgacagctacactctggaatctagaattaaccaggctgaaagggaacgcaacctgacagaggagaacactgagaaagaactggaaaacttcaaagcttccattacgtcctcagcttcactctggcaccactgtgagcaccgggaaacctaccagaagttgctggaggacatcgctgtcctgcaccgcctggctgcccgcctctccagccgagctgaggtggtaggcgccgtccgccaggaaaagcgcatgtcgaaagcaacggaagtgatgatgcagtatgtggagaatctaaagaggacgtatgagaaggaccatgcggagctcatggagtttaaaaagcttgcaaatcagaattcaagccgcagctgtggcccctctgaagatggggtccctcgcacggcacggtccatgtccctcacgctgggaaagaatatgcctcgccggagggtcagcgttgctgtggttcctaagtttaatgccctgaatctgcctggccaaactcccagctcatcatccattccctccttaccagccttgtcggaatcacccaatgggaaaggcagcctacctgtcacttcagcactgcctgcacttttggaaaatggaaagacaaatggggacccagattgtgaagcctctgctcctgcgctgaccctgagctgcctggaggagcttagtcaggagaccaaggccaggatggaggaagaagcctacagcaagggattccaagaaggtctaaagaagaccaaagaacttcaagacctgaaggaggaggaggaagaacagaagagtgagagtcctgaggaacctgaagaggtagaagaaactgaggaagaggaaaagggcccaagaagcagcaaacttgaagaattggtccatttcttacaagtcatgtatcccaaactgtgtcagcactggcaagtgatctggatgatggctgcagtgatgctggtcttgactgttgtgctggggctctacaattcctataactcttgtgcagagcaggctgatgggccccttggaagatccacttgctcggcagcccagagggactcctggtggagctcaggactccagcatgagcagcctacagagcagtaggaaacctcacacctagccagtgccctgctctgagacactcagactaccaccctttccccaagtataacgtcaggcccaagtgtggacacactgccgcccatcccatcaggtcatgaggaagggttcttttaacactcggcacttctgtgggagctattcatacacagtgacttgatgttcttggaggatcaacaaaactgccctgggaaagcatccagtggatgaagaagtcaccttcaccaaggaactctattggaagggaaggtctcctgcccctagctcaggtggctggggagaactaaaacaccttcactggtggttgggggt

SEQ ID NO: 155931 - DNA, 6155 bp, Homo sapiens
  Payload ID: 10623
  Gene Symbol: MRVI1
  Gene Name: murine retrovirus integration site 1 homolog
  Uniprot ID: Q9Y6F6
  ENST ID: ENST00000547195
  CDS Start-End: 1121-2914
ggcgctggcccagggtcttctccaggctcacatgcttgctggaggctccaggcgggtggggagatctgcagggtccctttgttcccgtccggccaggacagtgtccagtggcacgagttgccatggggactgccatctgctgtgtggatacccatcggaggggcccagggtgagcgactgccccaaaggcccagcctgccctgagccctgaggccagctggtcggctttccctgccattatcccccgagccaggccggagtggggctcccagaggagctctcggctctaagtcccagcccctctcagaggaggcgtgcggccgaggttctgcagccagaggcttctcggctctgagctccggagccagatgtaacattgaccttaaatggtaaaagctccccagagtgaagagaggctggccagaggaggaaaggagaataactcagttttagggtcctcctgccgcaggagtatcttgcagtccaactcccacgattgtcctgactggggatgccacttcaccagaaggagaaaccgacaaaaacctggccaacagagttcacagtccccacaagaggctttctcaccgacacttgaaggtgtccactgcctccctgacatctgtggaccccgcggggcacatcattgacctggtgaatgaccagctgccagacatcagcatctcagaggaggacaagaagaaaaacctggcgctgctggaagaagccaagttggtgagtgagcgattcctgacccgccgtgggaggaagtccaggagcagccccggagactccccatcagctgtttccccgaacctcagccccagcgcttctcctacatcctctcggagcaactcacttacagtccccaccccgccagaagggggatgaggccgacgtctcttcacctcaccctggcgagcctaacgtccccaaagggctagctgacaggaagcagaatgaccagaggaaagtgtctcagggcaggctggctcctcgtcctcctccagttgagaagtccaaagagattgcaatagaacaaaaggaaaacttcgatcccctccagtaccccgagaccacacccaaaggcctagctcctgttacaaacagcagtgggaaaatggccctgaacagccctcagcctggccccgtggagagcgagctggggaagcagctcttgaaaacgggctgggagggcagccctctgccgagaagtccaacccaggatgcggcaggagtgggtcccccagcctcccaggggagaggcccagctggagagccgatggggcccgaggctggctccaaagctgagcttccacccactgtgtcccggcccccgctgctgcgagggctctcctgggacagtggccctgaagaacctggcccccggctgcagaaagtgcttgccaagctgccactggcagaggaagaaaagcgttttgcaggcaaggccggcggcaagctggccaaggcccctggtctcaaagactttcagatacaagtgcagcccgtgcggatgcagaaactgaccaagctccgagaggagcacatcctgatgagaaatcagaacttagtggggctcaagcttccagaccttagtgaagcagctgagcaggaaaaagggcttccttctgaactctccccagctattgaggaagaagagtcaaagagtggcttagatgtcatgcctaatatttctgatgtgctgctgcgcaaactgcgggtccacaggagtctccctggaagtgcccctccactcactgaaaaggaagttgagaacgtgtttgtgcaactgtccttggcctttagaaatgacagctacactctggaatctagaattaaccaggctgaaagggaacgcaacctgacagaggagaacactgagaaagaactggaaaacttcaaagcttccattacgtcctcagcttcactctggcaccactgtgagcaccgggaaacctaccagaagttgctggaggacatcgctgtcctgcaccgcctggctgcccgcctctccagccgagctgaggtggtaggcgccgtccgccaggaaaagcgcatgtcgaaagcaacggaagtgatgatgcagtatgtggagaatctaaagaggacgtatgagaaggaccatgcggagctcatggagtttaaaaagcttgcaaatcagaattcaagccgcagctgtggcccctctgaagatggggtccctcgcacggcacggtccatgtccctcacgctgggaaagaatatgcctcgccggagggtcagcgttgctgtggttcctaagtttaatgccctgaatctgcctggccaaactcccagctcatcatccattccctccttaccagccttgtcggaatcacccaatgggaaaggcagcctacctgtcacttcagcactgcctgcacttttggaaaatggaaagacaaatggggacccagattgtgaagcctctgctcctgcgctgaccctgagctgcctggaggagcttagtcaggagaccaaggccaggatggaggaagaagcctacagcaagggattccaagaaggtctaaagaagaccaaagaacttcaagacctgaaggaggaggaggaagaacagaagagtgagagtcctgaggaacctgaagaggtagaagaaactgaggaagaggaaaagggcccaagaagcagcaaacttgaagaattggtccatttcttacaagtcatgtatcccaaactgtgtcagcactggcaagtgatctggatgatggctgcagtgatgctggtcttgactgttgtgctggggctctacaattcctataactcttgtgcagagcaggctgatgggccccttggaagatccacttgctcggcagcccagagggactcctggtggagctcaggactccagcatgagcagcctacagagcagtaggaaacctcacacctagccagtgccctgctctgagacactcagactaccaccctttccccaagtataacgtcaggcccaagtgtggacacactgccgcccatcccatcaggtcatgaggaagggttcttttaacactcggcacttctgtgggagctattcatacacagtgacttgatgttcttggaggatcaacaaaactgccctgggaaagcatccagtggatgaagaagtcaccttcaccaaggaactctattggaagggaaggtctcctgcccctagctcaggtggctggggagaactaaaacaccttcactggtggttgggggtaaggagcggggcacgggggaggaggaggtagggggcagtaaaaaacttactctcttttttcctctctgtaattggttatcaggaagaatttgcttaatgactaacaccctaagcatcagacctggaatttggagttgcaaagtgactatcttcccatttcccatctcattttcaataacttcagcctcccattctttcctttggaatgagagtttctttttacagaagtaggaaaggcttctcagaaaaaaaaaaaaaagtataggctgaatttagctcagtgcttgaaatgggaagatatgaattattatatacgcatctgtccacacatacacacatactgttgtgtacacacacacaacatgcctgtgcacagagccaacaacccttcaaaagtgtgctctgggtgtgtacctctggataaataagatgcatgccaagccaacccacagattttcaccagtgtggggcagtcaccaggcacctgttcaatgagctgtccacatggattgaagatgttttaaaaacacagaaaactcatggcttcaatggcagacttactagtctccatttcaaatgccaactctgagctgctgtacagcacaatctattccctattctctctttgaaaacagttaacccacctcacaggtgaatgaggagagaagatgtgctttctgcttcagtctcttactctgtgtgtgaccacatgcaagagtaaacttgcacctcagtgcttcagttcaaatggggtttccaaccccagtataattaggggtgtttcagagcatccccagttatttagcacaacactgaaggagcacatcccctctccattttgacttctctccccacttttacagccactgccttcatcagttttgtagaggtttgatttccatgtgggttttgttgtcattgttttgcatttttgttttgttattgatattgtttgctttcattgctaaaactcatatacgacttactatgagccaagcactgttctcagtattacataggtatgaattcatttaagtcctgaagaaaaagaaaaaaaaatacgaagtggatattacccttcccattttcaaataaggaaactgaagcacaaaaagaacaagtaacttgacaaggacaccccggtagtaaatcatggggctggagctcaaccccagggtaggctggctccagagctgtgctctccttgactcttctgatggtctcctagctggaagcctcacatttcagtctcattcccccaagtggcccatcagctactccatctctggctccccaactaaacagtttctctcatagtgctggacctccactcactagttttttttccagctgttcttctcttttcttcaggtcactcttctcgaccgagtgcaaaaattatcccctccataccagctttgatgaccttccttccatactcctcaccagacacaacataataggtcacacactcctctgtgctttctggcacgttttaaacattattattattgacctttacctatagtataccatggcctatttatgtatccatctcccctagcatttttcctcaaagacaagaaccatgtcttacccatctcttgggtaagtgcctagcatggtggctgacgcttgggagggtgtcattaaatgttgctcaaaagaacaagcaaacatttaaggtggtggagagcagcctggggacagctgacatgctgcatgcttctcagtaccagcaccatcacaatgcaaaaagcaacatctttcttaacctcagcttattctgtttttcagtctactctgtgagagagcaggaatgagaccagactagcaacaccattgccaagctcaaggactgggctcaatgcagtcactccttcagagagaccccccaccccaagcatgccccactttaaaatagcatgtttattgaagggggcatcctttacagtagctagaaaatgactgaggcccaagccagggttgatcaaggatgtgccattaaggtaaagagttacagagcagggcagagggactctgggggcagaagtggatgatttgcccggcctcttccagggggtctggatacaactgaaggagctttagctacatgaggccctcagagccaaagacaggatgcaaatagagttctagagagtggccgtggaagcagaactccaggtggggaatgttcaatctctgcctcccttaaagcagggccaggctcagctggccccattgttcacttggtcacaagtttcctacctttgtttctggatgagtcaaaggccaggaaggcagttatggagagctcctgcacctccagctgccccacagaaaagcctgcaagagtacttccaggcacaggccctctcccaccctattccatttgtaagcaagggaggtcgaggaaaaggacatctccaaaagggagcataagaatagccatatatacaggggctgaaaaagtgctcatgagtccatcttttctggaaagcaaagaccagcctgaagcagtgggagctgctgcccaagcggtagtgaactggagagaaacaggccctggattttcagtgaggatgtggatctgaagagtcccccaaatgcctctgaagtctgacatctctgcttagccctaggagtctggttccctgccttcagttgcagagtgatgtgtttgtgtcattgttgatgtcacctcctaaaaagaccttcactttctggctgccacaaagccatatgtgttgctccccatatacagcctgacagagtaaatggagaggaagtgctggatttgtgtatcactggctatcagttcctcatgttgttaagcctcacacaggtgtgctagcattgaactgtagagtgtcacatacctgagtttgaaaataaaagcacatttccaaacctc

SEQ ID NO: 155932 - DNA, 3339 bp, Homo sapiens
  Payload ID: 10623
  Gene Symbol: MRVI1
  Gene Name: murine retrovirus integration site 1 homolog
  Uniprot ID: Q9Y6F6
  ENST ID: ENST00000558540
  CDS Start-End: 974-2767
gaataactcagttttaggtaagcctcccctatatcctagaataacctgcctcttcggctgggaagcggagggaaccttctcttccttaaagacagggtctcgcactgtcacccaggctggagtgcagtggtgcaaccccacctcccgggttcaagcaattctcatgcctcagcctcccaagtagctgggattacagcctgtggagcccaggcctcttggagcatctttggggctgacgcagcggaggttccgggcacacgtggccactcccagcaggaggctgccatgccccacattcccgaggacgaggagccccccggagagccacaggcagcccagagccctgccggccaaagttcacagtccccacaagaggctttctcaccgacacttgaaggtgtccactgcctccctgacatctgtggaccccgcggggcacatcattgacctggtgaatgaccagctgccagacatcagcatctcagaggaggacaagaagaaaaacctggcgctgctggaagaagccaagttggtgagtgagcgattcctgacccgccgtgggaggaagtccaggagcagccccggagactccccatcagctgtttccccgaacctcagccccagcgcttctcctacatcctctcggagcaactcacttacagtccccaccccgccaggtttggatgtgtgcagtggcccgccatcccctctgcctggagcaccaccacagcagaagggggatgaggccgacgtctcttcacctcaccctggcgagcctaacgtccccaaagggctagctgacaggaagcagaatgaccagaggaaagtgtctcagggcaggctggctcctcgtcctcctccagttgagaagtccaaagagattgcaatagaacaaaaggaaaacttcgatcccctccagtaccccgagaccacacccaaaggcctagctcctgttacaaacagcagtgggaaaatggccctgaacagccctcagcctggccccgtggagagcgagctggggaagcagctcttgaaaacgggctgggagggcagccctctgccgagaagtccaacccaggatgcggcaggagtgggtcccccagcctcccaggggagaggcccagctggagagccgatggggcccgaggctggctccaaagctgagcttccacccactgtgtcccggcccccgctgctgcgagggctctcctgggacagtggccctgaagaacctggcccccggctgcagaaagtgcttgccaagctgccactggcagaggaagaaaagcgttttgcaggcaaggccggcggcaagctggccaaggcccctggtctcaaagactttcagatacaagtgcagcccgtgcggatgcagaaactgaccaagctccgagaggagcacatcctgatgagaaatcagaacttagtggggctcaagcttccagaccttagtgaagcagctgagcaggaaaaagggcttccttctgaactctccccagctattgaggaagaagagtcaaagagtggcttagatgtcatgcctaatatttctgatgtgctgctgcgcaaactgcgggtccacaggagtctccctggaagtgcccctccactcactgaaaaggaagttgagaacgtgtttgtgcaactgtccttggcctttagaaatgacagctacactctggaatctagaattaaccaggctgaaagggaacgcaacctgacagaggagaacactgagaaagaactggaaaacttcaaagcttccattacgtcctcagcttcactctggcaccactgtgagcaccgggaaacctaccagaagttgctggaggacatcgctgtcctgcaccgcctggctgcccgcctctccagccgagctgaggtggtaggcgccgtccgccaggaaaagcgcatgtcgaaagcaacggaagtgatgatgcagtatgtggagaatctaaagaggacgtatgagaaggaccatgcggagctcatggagtttaaaaagcttgcaaatcagaattcaagccgcagctgtggcccctctgaagatggggtccctcgcacggcacggtccatgtccctcacgctgggaaagaatatgcctcgccggagggtcagcgttgctgtggttcctaagtttaatgccctgaatctgcctggccaaactcccagctcatcatccattccctccttaccagccttgtcggaatcacccaatgggaaaggcagcctacctgtcacttcagcactgcctgcacttttggaaaatggaaagacaaatggggacccagattgtgaagcctctgctcctgcgctgaccctgagctgcctggaggagcttagtcaggagaccaaggccaggatggaggaagaagcctacagcaagggattccaagaaggtctaaagaagaccaaagaacttcaagacctgaaggaggaggaggaagaacagaagagtgagagtcctgaggaacctgaagaggtagaagaaactgaggaagaggaaaagggcccaagaagcagcaaacttgaagaattggtccatttcttacaagtcatgtatcccaaactgtgtcagcactggcaagtgatctggatgatggctgcagtgatgctggtcttgactgttgtgctggggctctacaattcctataactcttgtgcagagcaggctgatgggccccttggaagatccacttgctcggcagcccagagggactcctggtggagctcaggactccagcatgagcagcctacagagcagtaggaaacctcacacctagccagtgccctgctctgagacactcagactaccaccctttccccaagtataacgtcaggcccaagtgtggacacactgccgcccatcccatcaggtcatgaggaagggttcttttaacactcggcacttctgtgggagctattcatacacagtgacttgatgttcttggaggatcaacaaaactgccctgggaaagcatccagtggatgaagaagtcaccttcaccaaggaactctattggaagggaaggtctcctgcccctagctcaggtggctggggagaactaaaacaccttcactggtggttgggggtaaggagcggggcacgggggaggaggaggtagggggcagtaaaaaacttactctcttttttcctctctgtaattggttatcaggaagaatttgcttaatgactaacaccctaagcatcagacctggaatttggagttgcaaagtgactatcttcccatttcccatctcattttcaataacttcagcctcccattctttcctttggaatgagagtttctttttacagaagtaggaaaggcttctcag

SEQ ID NO: 155933 - DNA, 2392 bp, Homo sapiens
  Payload ID: 10624
  Gene Symbol: MUS81
  Gene Name: MUS81 structure-specific endonuclease subunit
  Uniprot ID: Q96NY9
  ENST ID: ENST00000308110
  CDS Start-End: 350-2005
acaaagaccccgctctcgaatctggggtgacaggaaggagccggtccaggctccgggggctgggaaagggcgcgtctcaaaggctggctggagtggagccaagggaaaagatcgttagagacagcgcccctgaccaaccacttagagcagcgcaggggtgggagggcggccgcaggctctcctctcgttagtgccccctgtgtttggggccccgtgatctcaacggtcctgccctcggtctccctcttcccccgccccgccctgggccaggtgttcgaatcccgactccagaactggcggcgtcccagtcccgcgggcgtggagcgccggaggacccgccctcgggctcatggcggccccggtccgcctgggccggaagcgcccgctgcctgcctgtcccaacccgctcttcgttcgctggctgaccgagtggcgggacgaggcgacccgcagcaggcgccgcacgcgcttcgtatttcagaaggcgctgcgttccctccgacggtacccactgccgctgcgcagcgggaaggaagctaagatcctacagcacttcggagacgggctctgccggatgctggacgagcggctgcagcggcaccgaacatcgggcggtgaccatgccccggactcaccatctggagagaacagtccagccccgcaggggcgacttgcggaagtccaggactcttccatgccagttcctgcccagcccaaagcgggaggctctggcagctactggccagctcggcactcaggagcccgagtgatactgctggtgctctaccgggagcacctgaatcctaatggtcaccacttcttaaccaaggaggagctgctgcagaggtgtgctcagaagtcccccagggtagcccctgggagtgctcgaccctggccagccctccgctccctccttcacaggaacctggtcctcaggacacaccagccagccaggtactcattgaccccagagggcctggagctggcccagaagttggccgagtcagaaggcctgagcttgctgaatgtgggcatcgggcccaaggagccccctggggaggagacagcagtgccaggagcagcttcagcagagcttgccagtgaagcaggggtccagcagcagccactggagctgaggcctggagagtacagggtgctgttgtgtgtggacattggcgagacccgggggggcgggcacaggccggagctgctccgagagctacagcggctgcacgtgacccacacggtgcgcaagctgcacgttggagattttgtgtgggtggcccaggagaccaatcctagagacccagcaaaccctggggagttggtactggatcacattgtggagcgcaagcgactggatgacctttgcagcagcatcatcgacggccgcttccgggagcagaagttccggctgaagcgctgtggtctggagcgccgggtatacctggtggaagagcatggttccgtccacaacctcagccttcctgagagcacactgctgcaggctgtcaccaacactcaggtcattgatggcttttttgtgaagcgcacagcagacattaaggagtcagccgcctacctggccctcttgacgcggggcctgcagagactctaccagggccacaccctacgcagccgcccctggggaacccctgggaaccctgaatcaggggccatgacctctccaaaccctctctgctcactcctcaccttcagtgacttcaacgcaggagccatcaagaataaggcccagtcggtgcgagaagtgtttgcccggcagctgatgcaggtgcgcggagtgagtggggagaaggcagcagccctggtggatcgatacagcacccctgccagcctcctggccgcctatgatgcctgtgccacccccaaggaacaagagacactgctgagcaccattaagtgtgggcgtctacagaggaatctggggcctgctctgagcaggaccttatcccagctctactgcagctacggccccttgacctgagcttatgccgtgaaacagcccccagcccccgtctgtcccccaacccaggctagccagccttttaacaacatcttttggggtacaattagaatctaagtgtttgcagccatatgtgtcatgtagaagatgcctagccctggggaccttgtgaaatacgcaggaaccagggataccatctggtccagtggtttttaaacaaagctgcttagcacctggaattccctggtcagggagatggagtcagtggggcattgcagcttggaatctattttatgtcaccagttggtcctcatcaaataaaatttccttaggagtgcagagggctcattgggaaaataaaaataataaaaataaataaaacttcctaaaagaaaagattgaaaacca

SEQ ID NO: 155934 - DNA, 923 bp, Homo sapiens
  Payload ID: 10624
  Gene Symbol: MUS81
  Gene Name: MUS81 structure-specific endonuclease subunit
  ENST ID: ENST00000525768
  CDS Start-End: 519-923
cttagagcagcgcaggggtgggagggcggccgcaggctctcctctcgttagtgccccctgtgtttggggccccgtgatctcaacggtcctgccctcggtctccctcttcccccgccccgccctgggccaggtgttcgaatcccgactccagaactggcggcgtcccagtcccgcgggcgtggagcgccggaggacccgccctcgggctcatggcggccccggtccgcctgggccggaagcgcccgctgcctgcctgtcccaacccgctcttcgttcgctggctgaccgagtggcgggacgaggcgacccgcagcaggcgccgcacgcgcttcgtatttcagaaggtgggtcctggcgtggcccgatgggaaaagctgctggccaggtcaggcctgccctgaccaggtaccctacccctgcccggccaggcgctgcgttccctccgacggtacccactgccgctgcgcagcgggaaggaagctaagatcctacagcacttcggagacgggctctgccggatgctggacgagcggctgcagcggcaccgaacatcgggcggtgaccatgccccggactcaccatctggagagaacagtccagccccgcaggggcgacttgcggaagtccaggactcttccatgccagttcctgcccagcccaaagcgggaggctctggcagctactggccagctcggcactcaggagcccgagtgatactgctggtgctctaccgggagcacctgaatcctaatggtcaccacttcttaaccaaggaggagctgctgcagaggtgtgctcagaagtcccccagggtagcccctgggagtgctcgaccctggccagccctccgctccctccttcacaggaacctggtcctcaggacacaccagccagccaggtactcattgaccccagagggcctg

SEQ ID NO: 155935 - DNA, 906 bp, Homo sapiens
  Payload ID: 10624
  Gene Symbol: MUS81
  Gene Name: MUS81 structure-specific endonuclease subunit
  ENST ID: ENST00000529857
  CDS Start-End: 299-906
atctccaggtccctaaccctgtggaatcgccctaaaacaacgggtgtatcagacccatctcctgcaggcaggagcctgggcaagctacataaccttcggttttctcagccctcgggccgtatacagggggcggggtggtttccgggcggtgcccgcctgggtcacttccctaaactcggctccaccctcactcaggcccatccgggaaggcctcgctggcccagggcttcggcaccggcggccgggcctgagcgtgcgcgcacgcgccgacagacagcgccgttccagccctcgcccgatgcacggcccccgcctctcctggactcttttcaagaccagtctccatctccagcctccttcaagcttgaggctgaagctgacaatcttaagagaccttagagccgccaagctcaggtgttcgaatcccgactccagaactggcggcgtcccagtcccgcgggcgtggagcgccggaggacccgccctcgggctcatggcggccccggtccgcctgggccggaagcgcccgctgcctgcctgtcccaacccgctcttcgttcgctggctgaccgagtggcgggacgaggcgacccgcagcaggcgccgcacgcgcttcgtatttcagaaggcgctgcgttccctccgacggtacccactgccgctgcgcagcgggaaggaagctaagatcctacagcacttcggagacgggctctgccggatgctggacgagcggctgcagcggcaccgaacatcgggcggtgaccatgccccggactcaccatctggagagaacagtccagccccgcaggggcgacttgcggaagtccaggactcttccatgccagttcctgcccagcccaaagcgggaggctctggcagctactggccagctcggcactcaggagc

SEQ ID NO: 155936 - DNA, 2180 bp, Homo sapiens
  Payload ID: 10624
  Gene Symbol: MUS81
  Gene Name: MUS81 structure-specific endonuclease subunit
  ENST ID: ENST00000533035
  CDS Start-End: 362-1792
ttcctctccaccacacactctttgccctgtatcccggggatgaggatcaccatttcctccaagggtcctgcagctcctcctgccttacctttgtgtcctcatccccggcacccatttctgggtgtccctcccaccaatacgtttgcacccgtttgtctcctagcccccgcctctcctggactcttttcaagaccagtctccatctccagcctccttcaagcttgaggctgaagctgacaatcttaagagaccttagagccgccaagctcaggcgctgcgttccctccgacggtacccactgccgctgcgcagcgggaaggaagctaagatcctacagcacttcggagacgggctctgccggatgctggacgagcggctgcagcggcaccgaacatcgggcggtgaccatgccccggactcaccatctggagagaacagtccagccccgcaggggcgacttgcggaagtccaggactcttccatgccagttcctgcccagcccaaagcgggaggctctggcagctactggccagctcggcactcaggagcccgagtgatactgctggtgctctaccgggagcacctgaatcctaatggtcaccacttcttaaccaaggaggagctgctgcagaggtgtgctcagaagtcccccagggtagcccctgggagtgctcgaccctggccagccctccgctccctccttcacaggaacctggtcctcaggacacaccagccagccaggtactcattgaccccagagggcctggagctggcccagaagttggccgagtcagaaggcctgagcttgctgaatgtgggcatcgggcccaaggagccccctggggaggagacagcagtgccaggagcagcttcagcagagcttgccagtgaagcaggggtccagcagcagccactggagctgaggcctggagagtacagggtgctgttgtgtgtggacattggcgagacccgggggggcgggcacaggccggagctgctccgagagctacagcggctgcacgtgacccacacggtgcgcaagctgcacgttggagattttgtgtgggtggcccaggagaccaatcctagagacccagcaaaccctggggagttggtactggatcacattgtggagcgcaagcgactggatgacctttgcagcagcatcatcgacggccgcttccgggagcagaagttccggctgaagcgctgtggtctggagcgccgggtatacctggtggaagagcatggttccgtccacaacctcagccttcctgagagcacactgctgcaggctgtcaccaacactcaggtcattgatggcttttttgtgaagcgcacagcagacattaaggagtcagccgcctacctggccctcttgacgcggggcctgcagagactctaccagggccacaccctacgcagccgcccctggggaacccctgggaaccctgaatcaggggccatgacctctccaaaccctctctgctcactcctcaccttcagtgacttcaacgcaggagccatcaagaataaggcccagtcggtgcgagaagtgtttgcccggcagctgatgcaggtgcgcggagtgagtggggagaaggcagcagccctggtggatcgatacagcacccctgccagcctcctggccgcctatgatgcctgtgccacccccaaggaacaagagacactgctgagcaccattaagtgtgggcgtctacagaggaatctggggcctgctctgagcaggaccttatcccagctctactgcagctacggccccttgacctgagcttatgccgtgaaacagcccccagcccccgtctgtcccccaacccaggctagccagccttttaacaacatcttttggggtacaattagaatctaagtgtttgcagccatatgtgtcatgtagaagatgcctagccctggggaccttgtgaaatacgcaggaaccagggataccatctggtccagtggtttttaaacaaagctgcttagcacctggaattccctggtcagggagatggagtcagtggggcattgcagcttggaatctattttatgtcaccagttggtcctcatcaaataaaatttccttaggagtgcagagggctcattgggaaaataaaaataataaaaataaataaaacttcctaaaagaaaagattgaaaaccac

SEQ ID NO: 155937 - DNA, 1817 bp, Homo sapiens
  Payload ID: 10624
  Gene Symbol: MUS81
  Gene Name: MUS81 structure-specific endonuclease subunit
  ENST ID: ENST00000524647
  CDS Start-End: 1-1169
ggcgccgcacgcgcttcgtatttcagaaggcgctgcgttccctccgacggtacccactgccgctgcgcagcgggaaggaagctaagatcctacagcacttcggagacgggctctgccggatgctggacgagcggctgcagcggcaccgaacatcgggcggtgaccatgccccggactcaccatctggagagaacagtccagccccgcaggggcgacttgcggaagtccaggactcttccatgccagttcctgcccagcccaaagcgggaggctctggcagctactggccagctcggcactcaggagcccgagtgatactgctggtgctctaccgggagcacctgaatcctaatggtcaccacttcttaaccaaggaggagctgctgcagaggtgtgctcagaagtcccccagggtagcccctgggagtgctcgaccctggccagccctccgctccctccttcacaggaacctggtcctcaggacacaccagccagccaggtactcattgaccccagagggcctggagctggcccagaagttggccgagtcagaaggcctgagcttgctgaatgtgggcatcgggcccaaggagccccctggggaggagacagcagtgccaggagcagcttcagcagagcttgccagtgaagcaggggtccagcagcagccactggagctgaggcctggagagtacagggtgctgttgtgtgtggacattggcgagacccgggggggcgggcacaggccggagctgctccgagagctacagcggctgcacgtgacccacacggtgcgcaagctgcacgttggagattttgtgtgggtggcccaggagaccaatcctagagacccagcaaaccctggggagttggtactggatcacattgtggagcgcaagcgactggatgacctttgcagcagcatcatcgacggccgcttccgggagcagaagttccggctgaagcgctgtggtctggagcgccgggtatacctggtggaagagcatggttccgtccacaacctcagccttcctgagagcacactgctgcaggctgtcaccaacactcaggtcattgatggcttttttgtgaagcgcacagcagacattaaggagtcagccgcctacctggccctcttgacgcggggcctgcagagactctaccagtgacttcaacgcaggagccatcaagaataaggcccagtcggtgcgagaagtgtttgcccggcagctgatgcaggtgcgcggagtgagtggggagaaggcagcagccctggtggatcgatacagcacccctgccagcctcctggccgcctatgatgcctgtgccacccccaaggaacaagagacactgctgagcaccattaagtgtgggcgtctacagaggaatctggggcctgctctgagcaggaccttatcccagctctactgcagctacggccccttgacctgagcttatgccgtgaaacagcccccagcccccgtctgtcccccaacccaggctagccagccttttaacaacatcttttggggtacaattagaatctaagtgtttgcagccatatgtgtcatgtagaagatgcctagccctggggaccttgtgaaatacgcaggaaccagggataccatctggtccagtggtttttaaacaaagctgcttagcacctggaattccctggtcagggagatggagtcagtggggcattgcagcttggaatctattttatgtcaccagttggtcctcatcaaataaaatttccttaggagtgcagagggctcattgggaaaataaaaataataaaaataaataaaacttcc

SEQ ID NO: 155938 - DNA, 692 bp, Homo sapiens
  Payload ID: 10624
  Gene Symbol: MUS81
  Gene Name: MUS81 structure-specific endonuclease subunit
  ENST ID: ENST00000530111
  CDS Start-End: 1-692
ggggcgacttgcggaagtccaggactcttccatgccagttcctgcccagcccaaagcgggaggctctggcagctactggccagctcggcactcaggagcccgagtgatactgctggtgctctaccgggagcacctgaatcctaatggtcaccacttcttaaccaaggaggagctgctgcagaggtgtgctcagaagtcccccagggtagcccctgggagtgctcgaccctggccagccctccgctccctccttcacaggaacctggtcctcaggacacaccagccagccaggtactcattgaccccagagggcctggagctggcccagaagttggccgagtcagaaggcctgagcttgctgaatgtgggcatcgggcccaaggagccccctggggaggagacagcagtgccaggagcagcttcagcagagcttgccagtgaagcaggggtccagcagcagccactggagctgaggcctggagagtacagggtgctgttgtgtgtggacattggcgagacccgggggcttccctccttgccactccaggggcgggcacaggccggagctgctccgagagctacagcggctgcacgtgacccacacgcaaaccctggggagttggtactggatcacattgtggagcgcaagcgactggatgacctttgcagcagcatcatcgacggccgcttcc

SEQ ID NO: 155939 - DNA, 1232 bp, Homo sapiens
  Payload ID: 10624
  Gene Symbol: MUS81
  Gene Name: MUS81 structure-specific endonuclease subunit
  ENST ID: ENST00000529374
  CDS Start-End: 1-1232
gctggacgagcggctgcagcggcaccgaacatcgggcggtgaccatgccccggactcaccatctggagagaacagtccagccccgcaggggcgacttgcggaagtccaggactcttccatgccagttcctgcccagcccaaagcgggaggctctggcagctactggccagctcggcactcaggagcccgagtgatactgctggtgctctaccgggagcacctgaatcctaatggtcaccacttcttaaccaaggaggagctgctgcagaggtgtgctcagaagtcccccagggtagcccctgggagtgctcgaccctggccagccctccgctccctccttcacaggaacctggtcctcaggacacaccagccagccaggtactcattgaccccagagggcctggagctggcccagaagttggccgagtcagaaggcctgagcttgctgaatgtgggcatcgggcccaaggagccccctggggaggagacagcagtgccaggagcagcttcagcagagcttgccagtgaagcaggggtccagcagcagccactggagctgaggcctggagagtacagggtgctgttgtgtgtggacattggcgagacccgggggggcgggcacaggccggagctgctccgagagctacagcggctgcacgtgacccacacggtgcgcaagctgcacgttggagattttgtgtgggtggcccaggagaccaatcctagagacccagcagcaaaccctggggagttggtactggatcacattgtggagcgcaagcgactggatgacctttgcagcagcatcatcgacggccgcttccgggagcagaagttccggctgaagcgctgtggtctggagcgccgggtatacctggtggaagagcatggttccgtccacaacctcagccttcctgagagcacactgctgcaggctgtcaccaacactcaggtcattgatggcttttttgtgaagcgcacagcagacattaaggagtcagccgcctacctggccctcttgacgcggggcctgcagagactctaccagggccacaccctacgcagccgcccctggggaacccctgggaaccctgaatcaggggccatgacctctccaaaccctctctgctcactcctcaccttcagtgacttcaacgcaggagccatcaagaataaggcccagtcggtgcgagaagtgtttgcccggcagctgatgcaggtgcgcggagtga

SEQ ID NO: 155940 - DNA, 733 bp, Homo sapiens
  Payload ID: 10624
  Gene Symbol: MUS81
  Gene Name: MUS81 structure-specific endonuclease subunit
  ENST ID: ENST00000529742
  CDS Start-End: 1-192
gcccagtcggtgcgagaagtgtttgcccggcagctgatgcaggtgcgcggagtgagtggggagaaggcagcagccctggtggatcgatacagcacccctgccagcctcctggccgcctatgatgcctgtgccacccccaaggaacaagagacactgctgagcaccattaagtgtgggcgtctacagaggtgagggcaagagacggaacctggagggagtggcagggactggggctgccctaggcccagggcgtgaccctcgctgcctctcttcctgcaggaatctggggcctgctctgagcaggaccttatcccagctctactgcagctacggccccttgacctgagcttatgccgtgaaacagcccccagcccccgtctgtcccccaacccaggctagccagccttttaacaacatcttttggggtacaattagaatctaagtgtttgcagccatatgtgtcatgtagaagatgcctagccctggggaccttgtgaaatacgcaggaaccagggataccatctggtccagtggtttttaaacaaagctgcttagcacctggaattccctggtcagggagatggagtcagtggggcattgcagcttggaatctattttatgtcaccagttggtcctcatcaaataaaatttccttaggagtgcagagggctcattgggaaaataaaaataataaaaataaataaaacttcctaaaagaaaagattgaaaacca

SEQ ID NO: 155941 - DNA, 2975 bp, Homo sapiens
  Payload ID: 10625
  Gene Symbol: MSI1
  Gene Name: musashi RNA-binding protein 1
  Uniprot ID: O43347
  ENST ID: ENST00000257552
  CDS Start-End: 90-1178
cttcgccgcgctcctcatctgccccgcgccgagcgccgccgccgccgccgccgccgccgctccgctgcccgcgccgcccgcggctcccgatggagactgacgcgccccagcccggcctcgcctccccggactcgccgcacgacccctgcaagatgttcatcgggggactcagttggcagactacgcaggaagggctgcgcgaatacttcggccagttcggggaggtgaaggagtgtctggtgatgcgggaccccctgaccaagagatccaggggtttcggcttcgtcactttcatggaccaggcgggggtggataaagtgctggcgcaatcgcggcacgagctcgactccaaaacaattgaccctaaggtggccttccctcggcgagcacagcccaagatggtgactcgaacgaagaagatctttgtgggggggctgtcggtgaacaccacggtggaggacgtgaagcaatattttgagcagtttgggaaggtggacgacgccatgctgatgtttgacaaaaccaccaaccggcaccgagggttcgggtttgtcacgtttgagagtgaggacatcgtggagaaagtgtgtgaaattcattttcatgaaatcaacaacaaaatggtggaatgtaagaaagctcagccaaaggaggtgatgtcgccaacgggctcagcccgggggaggtctcgagtcatgccctacggaatggacgccttcatgctgggcatcggcatgctgggttacccaggtttccaagccacaacctacgccagccggagttatacaggcctcgcccctggctacacctaccagttccccgaattccgtgtagagcggacccctctcccgagcgccccagtcctccccgagcttacagccattcctctcactgcctacggaccaatggcggcggcagcggcggcagcggctgtggttcgagggacaggctctcacccctggacgatggctccccctccaggttcgactcccagccgcacagggggcttcctggggaccaccagccccggccccatggccgagctctacggggcggccaaccaggactcgggggtcagcagttacatcagcgccgccagccctgcccccagcaccggcttcggccacagtcttgggggccctttgattgccacagccttcaccaatgggtaccactgaagcaggggacggtggcaggagcgccccagcctgcagctgactgaggaccacgagtgagccagcgagggggcgggagacctcagccgcagccgccgccccctcccctgcagcgactcggacccgctactgcctgcccccaactccccgggcccggcccctgccctgctgcccccaacagcgtctggctcccctactaacgtccccctcttcgcccttgcccccatccccacccgcccctctcccggccctgcttttatttattttggattagccggttgcccaccccagccctctggtccatccctccctccgtgccgcgcccccctaggaccgccccctccccaaaaggcttttggatttgtgcatagctggagtgaaggcggagggagcctgctacaggccgcagcccaacccctgttttttattcagatttcccctcctttaccctttccctttttttttttttttttttttttaaagaaaccttttttaaactatttctaggtttgtgaatgtgaagccccaggccgcagggggcaaggggccaggtgccccccaccagctgagaacaaagtgtctatctgggtgtgggcccctggccgcctccctccagccctggagaggagggcagggctgcggggaggccaggccgagcccctggaaccatcccgtcctgtatcatatgtaaatactgtgaggtgatgtgcccacccctctctaagacccctcgggggtgaggggctcccccctcccctgtttctgtcccctcagacaccgttactgtaagcttgcaggcctcagctgtggccacggcaggcccgctctctcaggccctcagggtcaaggccttggttggacctgcccactccaaaaacccagtgtgggggcaaagggcgtgggaagagcagggcttgcccagcgacactgctggacaggaattaactctccaaaggtctcccctgctccctacctaggttggggcttcatggtttctgctcagtctgtcccccttccccctcgacccccgcaatgagtgggcaccaggggacgctctggcgagggcagaccccaggggaaagcaaagggcgtctcagggaacccccacattctctcactgaagtttcccaccaggatgaccccacagccagagtcccttggcagcccctcaccccagaccccccttctaaggaaaaagagaggttcagagcgttggaccttcatgaacagtggcctggctggcgtggcagggccaaggcccacccactgccatcccccttctgtgtgtccctctcccccagttatgaggcccagggcctgagctctcttccccagcattgcccccacccggaaaccccacctttggagagttaattgtctgtgtgaggtgcttaacctatcagccctgagaacacaaagcaataatctttgttactgagatgcgcggctgttcgtgttttgggttttttttttttttaatgtttcctaataaaagagaagctgcattttattggtttttatttttaattttctacacgtttgagctgagtcctgagacacttagcttccctctccctcattcccggacccttccaccccactgggcccaaccatgggctcaggaccctggaattccgttttctgatttgctttgggattttttttttttttaagatgttacatggtgtttcgaagccagcaagttaccatcctccggtgtctcttctctccacatctgtaacttctttttccaggttttattttcagttttaaattcctaataaattatttgaaaacgtt

SEQ ID NO: 155942 - DNA, 698 bp, Homo sapiens
  Payload ID: 10625
  Gene Symbol: MSI1
  Gene Name: musashi RNA-binding protein 1
  ENST ID: ENST00000546985
  CDS Start-End: 1-698
tggaccaggcgggggtggataaagtgctggcgcaatcgcggcacgagctcgactccaaaacaattgaccctaaggtggccttccctcggcgagcacagcccaagatggtgactcgaacgaagaagatctttgtgggggggctgtcggtgaacaccacggtggaggacgtgaagcaatattttgagcagtttgggaaggtggacgacgccatgctgatgtttgacaaaaccaccaaccggcaccgagggttcgggtttgtcacgtttgagagtgaggacatcgtggagaaagtgtgtgaaattcattttcatgaaatcaacaacaaaatggtggaatgtaagaaagctcagccaaaggaggtgatgtcgccaacgggctcagcccgggggaggtctcgagtcatgccctacggaatggacgccttcatgctgggcatcggcatgctgggttacccaggtttccaagccacaacctacgccagccggagttatacaggcctcgcccctggctacacctaccagttccccgccattcctctcactgcctacggaccaatggcggcggcagcggcggcagcggctgtggttcgagggacaggctctcacccctggacgatggctccccctccaggttcgactcccagccgcacagggggcttcctggggaccaccagccccggccccatggccgagctctac

SEQ ID NO: 155943 - DNA, 6364 bp, Homo sapiens
  Payload ID: 10626
  Gene Symbol: MSI2
  Gene Name: musashi RNA-binding protein 2
  Uniprot ID: Q96DH6
  ENST ID: ENST00000284073
  CDS Start-End: 210-1196
cggggctgagctaagccgagcccacgtgtgacggctctcgccgctgccccggctccgccgctcgcagagagattcggaggagcccgggcgggggggaggaggagggggaggagggagcggagatctcggggctcggagccggccgccgctccgctccgatcgctgtggggcttggttttttgggggtgggggggcgggggggctcagatatggaggcaaatgggagccaaggcacctcgggcagcgccaacgactcccagcacgaccccggtaaaatgtttatcggtggactgagctggcagacctcaccagatagccttagagactattttagcaaatttggagaaattagagaatgtatggtcatgagagatcccactacgaaacgctccagaggcttcggtttcgtcacgttcgcagacccagcaagtgtagataaagtattaggtcagccccaccatgagttagattccaagacgattgaccccaaagttgcatttcctcgtcgagcgcaacccaagatggtcacaagaacaaagaaaatatttgtaggcgggttatctgcgaacacagtagtggaagatgtaaagcaatatttcgagcagtttggcaaggtggaagatgcaatgctgatgtttgataaaactaccaacaggcacagagggtttggctttgtcacttttgagaatgaagatgttgtggagaaagtctgtgagattcatttccatgaaatcaataataaaatggtagaatgtaagaaagctcagccgaaagaagtcatgttcccacctgggacaagaggccgggcccggggactgccttacaccatggacgcgttcatgcttggcatggggatgctgggatatcccaacttcgtggcgacctatggccgtggctaccccggatttgctccaagctatggctatcagttcccaggcttcccagcagcggcttatggaccagtggcagcagcggcggtggcggcagcaagaggatcaggctccaacccggcgcggcccggaggcttcccgggggccaacagcccaggacctgtcgccgatctctacggccctgccagccaggactccggagtggggaattacataagtgcggccagcccacagccgggctcgggcttcggccacggcatagctggacctttgattgcaacggcctttacaaatggataccattgagcaggtgctttcgttgccatctcactctgagagcatacctggatgtccaggcaagactgggcgaagtttctgagtggccctttgtttaggtgatgtcctcagacctggacccccaccagcctcactccccatcccaaccagagatggctcacttcggatcgagggttgactacatctcatcatctcacgaatctgctgtaatataagacaacagcttttaaatgtgtatataacccatgatttcggttttgttttgttttgtttttcttgatggtttccctctccctccctctcttcccattctccttttaaatctctttgaatcacatttggtagtgattttgacttagtccagtagtcacatagctttaatatctagttcaaagctaaccatagtataattgttatattaaggagttattttttcttaaaacatttttttttgcttgttttggttctgttctcacttttaaaggatgctgagatggtaatatgactctccatattttggtaccaattctgagactgtatgaattttcaggtggaactttagcacacactgaagcaaagttgtgaagtgcagggcgggaggtgggcgtgagctttctattttgcgttgtagaagaagtgagatgtagtaagctaattaacagactttctagcagttctttttgtgatgtctctttgttaatctgagtctatctattttcggcaataaggtaaggacgacagtgttttgagtgtcctccttttctataagtgctttttttctgttgaaagaggtgatattataaggttttttgaaattgtgaattctaaaaaagaaatgttgtaaatacaattccattaactacatagaaactattaagaaagagagaatcaaaaatatttttgtgagggagtcggtcccaggcagtttgatgctctgtggaaggaggcgggaagggaacgttggccaagtcagttactgagatgaagatcgcccagctgccaggaccaccccaggacaagttagagcactgtttagctcctttgtctgtgtgatagacctaagaactgtattagtgttgtaccagcctattaacctcttgtctgtgcacagcttcaaatgttaccgtctagttagatttttatttaaaatatgaaaaactgcttttcccaagatgttttttaaaaacaaagctacaattttaatatttaacatatttaaagtttcaaagcacacctgtttggcttgggtgggggtggggtgggggggacattctttttcagtcttaatttttaaatatttgatcattttctattgtccaatcatttcagcacctccaaaggtccctaggacactttgcctctcttctccccctgccccccaccctgctcccacatctgggggcccatgggccaggagtggataagcctgcattaatacaacctttctccattcactttctatttacaaattaggaaagcaaccttttggtttatatatattttttttaatacctcagtgctgcaagtatcaccagagaggctatggaagaatttttttttaatttattgtagatgtaaacagaattttaaaaataaaaagtataaacatcactgcactgtgactggtgggaaaaactgacagtttcctctttgcacatgtttaacatttggctgttataatatatggtcctcggttggggaaagatacttatgatgaaggatattttttaatttaacttttttttaaatattggtaataggtcggcaacagcaactatagaagtacaactcaatagatggcattaaaacatattgtagtgtggatatatattttttcttttttaaaatgtgatattgacgttttattaatattttttaaattgttacgtttataaatttggtacttaaggcacagccagtatgagacactgaatgcgacatttattataaagagctgctgcactcctatttttataaattttactaacaaagtagactaatgtagacattcacagacatggtagggcaaaagcatcttcaaactaaagactccaaaatgctaactcagaaagaaagaaaaaacccgttttcaattctaatgaaacagcaacaacattttttttaattaaaaaaaaaatcatgttctttgtttttctaataaaatgttaggttgtttggtgaggtttttttgttgtttttttcctttctttgtttcttttcttttcccccaaacaaccagattaaatgctgagcgcttttaaaatatcaaaacttgttcaagtcataaaacaacaaaacataagttttatttaaaaaaaaaaaaagaaagaaaaaatagtaaattcccagaaattcagtgtttagacgagggaatttaattcctattttgtccatgttggtgatgtactgtacttcccttccttttctctgcatcccccatcacctcatagaagactctttgttgatcattgtatgttaataatgtataaaatggctatcttgtaagcgtgctgtcctggtactagtgtagcgactttttttctcctctttcttctagtacatattgataggtataacataattaaggtttaaaaaaaattagacatagttattcagatttaggaccagtaaggatagaactttctcttatttatgaaaaaaaatgctaataattttggggcagttttttcctttaattatttttttcaatttcaagtttaattttattttagctgatctgatgtggtttcaactaacccaaggtctcaccatgttaaaatgccggcggactctacggcgttttgtagatccccccccccccacccactgtgaaggggtgccatactaccttaaatgctaatgctagatatgcaaaactggatttttttaatttattttttaaaagagggaggcatggtatattaaaatgattttactaagagaaaaaatatttttttaagaatgctcagaagaaattgataatctgtgtgaatatgttttagatgtttatataccttttgaagagacccagtagcccatagcacaaatcttgtggaaatccgatatgttttaatgtggctacctaggtttaaggttcacgttagtccccccattccatctagaagtccattttgaaagatttttgtaaattcttttaacactgatgtttcagcctcgtctttgtttcagttaagctcaatggcgaacatgggaaccacctttcgccttccctgggggagaaaccctcttggctgatggcttttccccggaattatcaaacagccaccgggtgactttctggcttccagatccatctgcctgagacccccgaactcctctcctcccaagcagaggcgagtgagtggcattagctcccggacccattcccggtcctagctgggcatggggctgacggagatgaccaagccttggtctgctctctagcagcttccacagacttggctcgtggccttccttatatccactgggaacaaacagcctcgcgctctataccaaacagcctcgcgctctatcccagtcgcccattagcttgattcaaacaaagccccagcaggcctttgcgtttttatccttcataaccttcatcttaatttgaacttgtagcttggactttaaggtagcatggctctattgctgtcaatttactgtttcactgcacagcaatcacagccagtgaatgttacacacatcttgctagactagtataaaaatcattgggtaattgttggttctaatgacctgaaaggtgttcagtttttgttcttggttttgttttgtttttgatttcttgggggtgggttttgcttgttgttccttttcatttgggggtttttggggaaaaaatttatttttggttccaaatagaaaaacaaaacctattttgatctttagtgcaaacgagggctagggacttagcctcctccaccacctccacactgcttcattctgccattcactcactgcagcatattcaagaataaagcaatatcgtttactacattttttattgaaggtcagccatgctttctgtattatattgcatatgaaattgtttacaaaagaaacactaactcatacttctctttattggttgcaagtggcacgcaggaacagagggagagtggggggctggtgggggaggggagatttttttttttttttcttgaatgtgcttcgcaagccaggctatcttccaaggaaggcagacagtgggagagcagagggactgactgcaggcaagcacattgaagaaagacactggcgggtttccccaccctcaccccaaagcagaaaactagcagacgtcagctcagccccgtcctgggcacagacactacacaaggagacgctggaagttaagcaatactttaatactgtaatatgtttgttttctttttctttcttttttttctaccaaaaaaaagtaagtaaactaaaacacaaaaacatataaataaaatccatccctcttgtcggggacctgcaggggggcaaccttaatccaaacacctggctatcaaataatcagaatgtattgtctcagacaggatttcagttccgggaggcaggggcatgatgggggagggggccggaggctgagagacaaaagttccagagcctccctcgaaggttctctactactgtattctgtacataatgtaccatcccatgtggaatctgtgagtgtcctcttaagtagcgtgggctagccaatctgccgttcatggtgtattgtaaactccgaattccatatgtaataggatgcaagtctaagcgtttcatgtggacataaatgtatctaaataaaactttccctagcactgtggctgacctcacccttacttttatactttagtatgaaactgatgagaactttggtagtgagtattttttttatatatatacatatatatgtactatctatatatatatctcaagcatctttcaggtctttgtgtgtggctttcttaaagccctgttgtaaaaaattactatgtggatggcagtctctcacatcacagatgtggaaagtataattttatatttgtattttcaaataaataagtttgtgaaaggtttccatcctctactgtggtccagaaatcaatgtgtttgtctgacaaaaaaaaaaataaaataaaataaactgttttgaa

SEQ ID NO: 155944 - DNA, 1860 bp, Homo sapiens
  Payload ID: 10626
  Gene Symbol: MSI2
  Gene Name: musashi RNA-binding protein 2
  Uniprot ID: Q96DH6
  ENST ID: ENST00000322684
  CDS Start-End: 36-791
gctttccttttagcttttgtaagttacacgtcaaaatggccgatctgacatcggtgctcacttctgttatgttttctccctctagtaaaatgtttatcggtggactgagctggcagacctcaccagatagccttagagactattttagcaaatttggagaaattagagaatgtatggtcatgagagatcccactacgaaacgctccagaggcttcggtttcgtcacgttcgcagacccagcaagtgtagataaagtattaggtcagccccaccatgagttagattccaagacgattgaccccaaagttgcatttcctcgtcgagcgcaacccaagatggtcacaagaacaaagaaaatatttgtaggcgggttatctgcgaacacagtagtggaagatgtaaagcaatatttcgagcagtttggcaaggtggaagatgcaatgctgatgtttgataaaactaccaacaggcacagagggtttggctttgtcacttttgagaatgaagatgttgtggagaaagtctgtgagattcatttccatgaaatcaataataaaatggtagaatgtaagaaagctcagccgaaagaagtcatgttcccacctgggacaagaggccgggcccggggactgccttacaccatggacgcgttcatgcttggcatggggatgctgggatatcccaacttcgtggcgacctatggccgtggctaccccggatttgctccaagctatggctatcagttcccagactatttgccggtttcacaagacataatttttatcaactagctcttaagagaggcatagcaaagtgggggttgctaccatttctagagagagaggacacagtcccggcctgggctgcccccgctccagtcaatgctcactgaaagtctgtcttagctgcctgtttgaatgactgttctttttctcatttttaattcttggactcatgtcctcattgcttcactcaattaaaaaaaaattattctccagtcccctcccactttgcttcttgtatgcattgtgaccgaccccacttcctcagaatgtaacggggccagagggaaacttctcacaaacttcgtagagcctcctcaggggaagctaggaagaagacatcaaatgtttttaagtcatgaccaaacaggcttgttggggacatatcatggggtgagctttgaagtgctggtggtccagaggggttgcagatacgtgacttggagcacccgtgtcttacgatggacagtgataaaggtgaacacacagagacagactattctctaagaatgtgagaaacctgatctggaagaggagctatataaacactatctgactatctttgtcttttggggccagtggctgttggcataatcacaagcctgtctgtcttcgagaagggacagtggagtcatccaggtgctgccacatgacaggcacggtgggcaccgatccacagtgggccccgccttccccagctcgcctccctgcctgtgctggcctggccttgcctgctggcaccattggagtaggagggggtggaacacagggggcccatcctgatcaggccccatctcaaggttggcactcctgcccatcacccttagaaggatcttttcccatggcttgacttccttcatttccctaactgaaatacacccactctcttggaataatgacgtaccactcagttggaccctcaagagtcactgctttgtctgtgctggtagtttgtgagaagtgacccgcacgcttccatttgatgcatttgatgtgagtgaatccatacatttgaatgtcattgtccttgagaccctacatgtgcagtttggctcatctcattaaagatgcttgatgt

SEQ ID NO: 155945 - DNA, 1624 bp, Homo sapiens
  Payload ID: 10626
  Gene Symbol: MSI2
  Gene Name: musashi RNA-binding protein 2
  ENST ID: ENST00000442934
  CDS Start-End: 41-844
tttctgttgtgtagttctgattttccgaacaggtgtttagatgatgaggggttatattaagaaagtactaaagaatacgtcttatcacgtgaatcagtatctttttattcaacatggatggagtgggagtggagaccaatctgttttatattcctgcaatctgatgaggatggtcacaagaacaaagaaaatatttgtaggcgggttatctgcgaacacagtagtggaagatgtaaagcaatatttcgagcagtttggcaaggtggaagatgcaatgctgatgtttgataaaactaccaacaggcacagagggtttggctttgtcacttttgagaatgaagatgttgtggagaaagtctgtgagattcatttccatgaaatcaataataaaatggtagaatgtaagaaagctcagccgaaagaagtcatgttcccacctgggacaagaggccgggcccggggactgccttacaccatggacgcgttcatgcttggcatggggatgctgggatatcccaacttcgtggcgacctatggccgtggctaccccggatttgctccaagctatggctatcagttcccaggcttcccagcagcggcttatggaccagtggcagcagcggcggtggcggcagcaagaggatcaggctccaacccggcgcggcccggaggcttcccgggggccaacagcccaggacctgtcgccgatctctacggccctgccagccaggactccggagtggggaattacataagtgcggccagcccacagccgggctcgggcttcggccacggcatagctggacctttgattgcaacggcctttacaaatggataccattgagcaggtgctttcgttgccatctcactctgagagcatacctggatgtccaggcaagactgggcgaagtttctgagtggccctttgtttaggtgatgtcctcagacctggacccccaccagcctcactccccatcccaaccagagatggctcacttcggatcgagggttgactacatctcatcatctcacgaatctgctgtaatataagacaacagcttttaaatgtgtatataacccatgatttcggttttgttttgttttgtttttcttgatggtttccctctccctccctctcttcccattctccttttaaatctctttgaatcacatttggtagtgattttgacttagtccagtagtcacatagctttaatatctagttcaaagctaaccatagtataattgttatattaaggagttattttttcttaaaacatttttttttgcttgttttggttctgttctcacttttaaaggatgctgagatggtaatatgactctccatattttggtaccaattctgagactgtatgaattttcaggtggaactttagcacacactgaagcaaagttgtgaagtgcagggcgggaggtgggcgtgagctttctattttgcgttgtagaagaagtgagatgtagtaagctaattaacagactttctagcagttctttttgtgatgtctctttgttaatctgagtctatctattttcggcaataaggtaaggacgacagtgttttgagtgtcctccttttctataagtgctttttttctgttgaaag

SEQ ID NO: 155946 - DNA, 1714 bp, Homo sapiens
  Payload ID: 10626
  Gene Symbol: MSI2
  Gene Name: musashi RNA-binding protein 2
  ENST ID: ENST00000416426
  CDS Start-End: 136-1110
agagccagagagaacttccagcgcaaaaggaaaataaaacttgtggctggtgtttgtgcaggagggtctccgccatcctgaagccccccgatcctggggcgtctcgggggccgccaaaggagcgccagggttaaaatgtttatcggtggactgagctggcagacctcaccagatagccttagagactattttagcaaatttggagaaattagagaatgtatggtcatgagagatcccactacgaaacgctccagaggcttcggtttcgtcacgttcgcagacccagcaagtgtagataaagtattaggtcagccccaccatgagttagattccaagacgattgaccccaaagttgcatttcctcgtcgagcgcaacccaagatggtcacaagaacaaagaaaatatttgtaggcgggttatctgcgaacacagtagtggaagatgtaaagcaatatttcgagcagtttggcaaggtggaagatgcaatgctgatgtttgataaaactaccaacaggcacagagggtttggctttgtcacttttgagaatgaagatgttgtggagaaagtctgtgagattcatttccatgaaatcaataataaaatggtagaatgtaagaaagctcagccgaaagaagtcatgttcccacctgggacaagaggccgggcccggggactgccttacaccatggacgcgttcatgcttggcatggggatgctgggatatcccaacttcgtggcgacctatggccgtggctaccccggatttgctccaagctatggctatcagttcccaggcttcccagcagcggcttatggaccagtggcagcagcggcggtggcggcagcaagaggatcagtcctgaatagctacagtgctcaaccgaattttggcgcgcccgcttccccggcaggctccaacccggcgcggcccggaggcttcccgggggccaacagcccaggacctgtcgccgatctctacggccctgccagccaggactccggagtggggaattacataagtgcggccagcccacagccgggctcgggcttcggccacggcatagctggacctttgattgcaacggcctttacaaatggataccattgagcaggtgctttcgttgccatctcactctgagagcatacctggatgtccaggcaagactgggcgaagtttctgagtggccctttgtttaggtgatgtcctcagacctggacccccaccagcctcactccccatcccaaccagagatggctcacttcggatcgagggttgactacatctcatcatctcacgaatctgctgtaatataagacaacagcttttaaatgtgtatataacccatgatttcggttttgttttgttttgtttttcttgatggtttccctctccctccctctcttcccattctccttttaaatctctttgaatcacatttggtagtgattttgacttagtccagtagtcacatagctttaatatctagttcaaagctaaccatagtataattgttatattaaggagttattttttcttaaaacatttttttttgcttgttttggttctgttctcacttttaaaggatgctgagatggtaatatgactctccatattttggtaccaattctgagactgtatgaattttcaggtggaactttagcacacactgaagcaaagttgtgaagtgcagggcgggaggtgggcgtgagct

SEQ ID NO: 155947 - DNA, 1635 bp, Homo sapiens
  Payload ID: 10626
  Gene Symbol: MSI2
  Gene Name: musashi RNA-binding protein 2
  Uniprot ID: Q96DH6
  ENST ID: ENST00000579180
  CDS Start-End: 106-561
caagtcagtcgatcctgtgtttgtgctcccgaaggacttggcgacttggctaacaaggagacatttgttatttcatttcctcatccattattcatgcagtgagagatggtcacaagaacaaagaaaatatttgtaggcgggttatctgcgaacacagtagtggaagatgtaaagcaatatttcgagcagtttggcaaggtggaagatgcaatgctgatgtttgataaaactaccaacaggcacagagggtttggctttgtcacttttgagaatgaagatgttgtggagaaagtctgtgagattcatttccatgaaatcaataataaaatggtagaatgtaagaaagctcagccgaaagaagtcatgttcccacctgggacaagaggccgggcccggggactgccttacaccatggacgcgttcatgcttggcatggggatgctgggatatcccaacttcgtggcgacctatggccgtggctaccccggatttgctccaagctatggctatcagttcccagactatttgccggtttcacaagacataatttttatcaactagctcttaagagaggcatagcaaagtgggggttgctaccatttctagagagagaggacacagtcccggcctgggctgcccccgctccagtcaatgctcactgaaagtctgtcttagctgcctgtttgaatgactgttctttttctcatttttaattcttggactcatgtcctcattgcttcactcaattaaaaaaaaattattctccagtcccctcccactttgcttcttgtatgcattgtgaccgaccccacttcctcagaatgtaacggggccagagggaaacttctcacaaacttcgtagagcctcctcaggggaagctaggaagaagacatcaaatgtttttaagtcatgaccaaacaggcttgttggggacatatcatggggtgagctttgaagtgctggtggtccagaggggttgcagatacgtgacttggagcacccgtgtcttacgatggacagtgataaaggtgaacacacagagacagactattctctaagaatgtgagaaacctgatctggaagaggagctatataaacactatctgactatctttgtcttttggggccagtggctgttggcataatcacaagcctgtctgtcttcgagaagggacagtggagtcatccaggtgctgccacatgacaggcacggtgggcaccgatccacagtgggccccgccttccccagctcgcctccctgcctgtgctggcctggccttgcctgctggcaccattggagtaggagggggtggaacacagggggcccatcctgatcaggccccatctcaaggttggcactcctgcccatcacccttagaaggatcttttcccatggcttgacttccttcatttccctaactgaaatacacccactctcttggaataatgacgtaccactcagttggaccctcaagagtcactgctttgtctgtgctggtagtttgtgagaagtgacccgcacgcttccatttgatgcatttgatgtgagtgaatccatacatttgaatgtcattgtccttgagaccctacatgtgcagtttggctcatctcattaaagatgcttgatgtaataa

SEQ ID NO: 155948 - DNA, 452 bp, Homo sapiens
  Payload ID: 10626
  Gene Symbol: MSI2
  Gene Name: musashi RNA-binding protein 2
  ENST ID: ENST00000579590
  CDS Start-End: 31-452
ccttttagcttttgtaagttacacgtcaaaatggccgatctgacatcggtgctcacttctgttatgttttctccctctagtaaaatgtttatcggtggactgagctggcagacctcaccagatagccttagagactattttagcaaatttggagaaattagagaatgtatggtcatgagagatcccactacgaaacgctccagaggcttcggtttcgtcacgttcgcagacccagcaagtgtagataaagtattaggtcagccccaccatgagttagattccaagacgattgaccccaaagttgcatttcctcgtcgagcgcaacccaagatggtcacaagaacaaagaaaatatttgtaggcgggttatctgcgaacacagtagtggaagatgtaaagcaatatttcgagcagtttggcaaggtttccgccggcagcccaggcctctccct

SEQ ID NO: 155949 - DNA, 493 bp, Homo sapiens
  Payload ID: 10626
  Gene Symbol: MSI2
  Gene Name: musashi RNA-binding protein 2
  ENST ID: ENST00000581776
  CDS Start-End: 4-303
gatatggaggcaaatgggagccaaggcacctcgggcagcgccaacgactcccagcacgaccccggtaaaatgtttatcggtggactgagctggcagacctcaccagatagccttagagactattttagcaaatttggagaaattagagaatgtatggtcatgagagatcccactacgaaacgctccagaggcttcggtttcgtcacgttcgcagacccagcaagtgtagataaagtattaggtcagccccaccatgagttagattccaagacgtgcaggaggcagaagcggttggtttattgacatggaaacgaggatcttgtttactgttaccttaaaagctttgtttagattgaccccaaagttgcatttcctcgtcgagcgcaacccaagcattgctgactttcttcctccatggcacaggatttttgcccaaaacaaaagtctcaatttatttgttctttaaaaaaataaaaaccacactgaacaaaaa

SEQ ID NO: 155950 - DNA, 4538 bp, Homo sapiens
  Payload ID: 10627
  Gene Symbol: MRAS
  Gene Name: muscle RAS oncogene homolog
  Uniprot ID: O14807
  ENST ID: ENST00000289104
  CDS Start-End: 648-1274
attctcctgcctcagcctcccgagtagatgagatcacaggcacgtgccgccatgccgggttgacttttgtatttttagtagagacggggtttcaccatgttgcctaggctggtcttgaactcctgacctcaggcgattcacccgcctcggcctcccaaagtgttaggattacaggcgtgagccaccgcgcccggcttgaattgtacacttcaaaaggtggaattttatggtgttgaattatatctttatttttttaacggggggaaaatgacgccgctggagaggagttagcggaactgaaacaatgaaatggtgcgcgagtgtcgcctgtccccgtcgcatccatcccaacgaagtttgggccctggaacggtgcacccagaaggcctgcggggagagacgctggggcatgatctggaagaaagacgtctcaggattcgaagggaatgcagctaaggtggcggcggaggttcgcctaggactggggaggcgtccctaggctcagaagttggcccggccggagcggagatttaaaggttggagcgcagaggctcttaaagaggccgagtcgaattcccactcggcgtccaccttaaagccagctccccggcaccacggatctgacccgggtctgacctacgagaaacatggcaaccagcgccgtccccagtgacaacctccccacatacaagctggtggtggtgggggatgggggtgtgggcaaaagtgccctcaccatccagtttttccagaagatctttgtgcctgactatgaccccaccattgaagactcctacctgaaacatacggagattgacaatcaatgggccatcttggacgttctggacacagctgggcaggaggaattcagcgccatgcgggagcaatacatgcgcacgggggatggcttcctcatcgtctactccgtcactgacaaggccagctttgagcacgtggaccgcttccaccagcttatcctgcgcgtcaaagacagggagtcattcccgatgatcctcgtggccaacaaggtcgatttgatgcacttgaggaagatcaccagggagcaaggaaaagaaatggcgaccaaacacaatattccgtacatagaaaccagtgccaaggacccacctctcaatgtcgacaaagccttccatgacctcgttagagtaattaggcaacagattccggaaaaaagccagaagaagaagaagaaaaccaaatggcggggagaccgggccacaggcacccacaaactgcaatgtgtgatcttgtgacaggcctgaggccctgggcacagtgacggtggcctggccagccctcgggacccctccccacctaactgcactgaaaccatttctaaccacaacccttggcccaaggacttggtacaggaagggagaagggcaggtgggcagggagcagacagggtctggctttgcccagagggcacgggctttcccacctctcaaagagacaaggaagccacctgtaagcagaagcagcatccaagtgcccctggcccccccatgtgttgattcaacccggttcctccccctctctcggtgggtgtgttgtttattgtaactacatagtgttggtttgatgtggaagtgtttatccacatacaaagtacaaaacaagccatgaacaagcttctttcccttaccccccatccacaatgtctgagcttggatgtcttttatagatttttaaattattttagtgattattattttattaaaggggtctgggctcactgcctggtgaagtttcaagtgttcagcagacctctctggtaacatatctggaatattgttgttgttttttaaccgagttttcccatcagtgccaaaactcaactcaatctgaaagtagagtgtctgagaggacagaaggtaatgggaactgtagctggaggcctcaggccatgggtcaaacctgggagggaaagagaccctacacatggcctagaaatgagagaagagagaggtatttacccagaggattttcctatggttggggatgcaaatattagaaaacagattgtattttgctgaggggagtggctgtcatgagcatgtcagttctaaaaggggttttcattatcctggaaatgtataaactaaagtaagctgattggctttgcaaacatgttcatttgtttttcagacagtatgggttaagttctctgccctccccaggggtctgaggaggctctgggtttctcagatctgtctcttgctgcgttttcacatcagctgtgctgcttggtgcctctctgatacgaatacactgacacgtcaaagtaacctaatgtggacaccatccagaaaactccagttcatgctggatcttaaccaaaaatgattcaatactgttatcactaaaacagcaccaagacctgaagccatcttcccttggagtcaactgactaccacctctataagcctagtcaatgagcagaccccttccagtatttgtaaaagtagtactaggttgcctttttggcaatttttattgacctgttgaatcttgactataaaatgatctgagaagtaaggaaggctgggctgatgtgtggctctcatataccttctgcaagggggcagtctccccagctccctgatgatgctcacccccgcccccccacctcaggtgctgctggtgtgagccaaagactggagtttttccagctggggtgggagtggagagacaacaggaacaacgctgcaccaaagaaaaggtcagaataaaaggcagcacagctggtgaccttattttctagatgttacaaatcaggtcactatgcaaactagaatatcctcagcaggtggcctggccactctggagaaagaaacccaaggaaagtgagcacccaactggatgccaagacacccgggttctgaaaatgtgctgtgttcctacctcggcaagatcaccagcactgaggggcccagctggagaatgattctgctacaaaaggagacagttgagacttttgcttgttggaaatcaaacttcttatttgtctaaattgcccctttttctgttcctaaaaggaaggataagagagaacattccaggtgaggcacttcaaagtttccttagaccctatagtgttaagaggtattttaaacactaaaaggacaaagctcttcccaatccttatgcttccctaagtggtatctgcagcagtttgttgtgtgcagtttgatggcagctgcaaactggaggtgaggcggaggaaaggcaggtaggaaggagtaaggatggagatgctcagaatcaagagcatggcggagtaggagaagaagccctgcacacagggcagtgtccacagccagaaaactcctgctgggcaccaaccactacgagcataccccatgcccaccgtggagctgcaactcctcgacagcactgagtttgatagtctcactggaagcagatcagctgatgtagaacagagacctcggccataaaggtgagaagacatagggatttcaaccacacagttgggacagaagggacagtgcatctgttcatccatcctgcacttggcccacgttgaactccatggtgcctgagagagactagttaagggttggtcttctgtatcctctgctgttgagcctctggtaagctttcatctcccatgaactcatttccccataaatgaaatgggtaaataatgccccatttgtagaagtgggccctcatgactgaggtagcttccagataggccagagtagagtgtagagtgtgccccgtgacatccctccatcttctcctccattatcatctagcagggtcagactgggaaacctggttggccacgccacaccatgaccgaggagccaactgggacttctggctgtttgacatcctcatgttcccgttggtcttccggagaatagtgctaccctcacatcccctggagcacagccttcctgaaatgccctcaccccatgcctttgccattgtgtgctctcagatttcttccactgtttgacaccctccttagagggctgctcttttttttccagagataatcctagccatcctctccactcccacggctggggacaatggccacttactacctgtgcactttgccactcgggacacctggatggtttctcttaggactttgcccacctccttctcatggcacttgctgtggaaaatgcctggctggcctcgtggggcctgtctcacttttccaggagacatgacccactaacgtggcaactttaacccaaaggcccctcagacatgttacagcaaatctggagccacagacaggttccctccattggcagcccattgtgtttgaaattccatgtcgggtttacttggaatgaaagatacttgaattattgtgcgcctgtgagcgcccagcttctgtttcatagtcttaacaggtggccattgtcgtgaaacgagtgatgcctgaagatctcagtgatgtttgaaccttctgtgtaactttttattaagtctttgtatctctcgactgattaataaagaagagaaacacg

SEQ ID NO: 155951 - DNA, 1803 bp, Homo sapiens
  Payload ID: 10627
  Gene Symbol: MRAS
  Gene Name: muscle RAS oncogene homolog
  Uniprot ID: O14807
  ENST ID: ENST00000423968
  CDS Start-End: 315-941
agggtcgaggcacccggcccgggctccccactggcgcgcccgcagcggcgctctatttttagcaggcgctgtggcaatataaggaatgcgcggcgcgctaggcgctcggggcgcacgctggcggcgcggtcgctttaaggaggcgccggggcggggacggaccggagtggccggctggcggggagccgtcagtccggcggccgcggggcccggcgggcgcgacgctgcctcctcaccggcgcaggctaggagggggcggcctgagtgccgtagccgagccggggctggagcgcgcggtctgacctacgagaaacatggcaaccagcgccgtccccagtgacaacctccccacatacaagctggtggtggtgggggatgggggtgtgggcaaaagtgccctcaccatccagtttttccagaagatctttgtgcctgactatgaccccaccattgaagactcctacctgaaacatacggagattgacaatcaatgggccatcttggacgttctggacacagctgggcaggaggaattcagcgccatgcgggagcaatacatgcgcacgggggatggcttcctcatcgtctactccgtcactgacaaggccagctttgagcacgtggaccgcttccaccagcttatcctgcgcgtcaaagacagggagtcattcccgatgatcctcgtggccaacaaggtcgatttgatgcacttgaggaagatcaccagggagcaaggaaaagaaatggcgaccaaacacaatattccgtacatagaaaccagtgccaaggacccacctctcaatgtcgacaaagccttccatgacctcgttagagtaattaggcaacagattccggaaaaaagccagaagaagaagaagaaaaccaaatggcggggagaccgggccacaggcacccacaaactgcaatgtgtgatcttgtgacaggcctgaggccctgggcacagtgacggtggcctggccagccctcgggacccctccccacctaactgcactgaaaccatttctaaccacaacccttggcccaaggacttggtacaggaagggagaagggcaggtgggcagggagcagacagggtctggctttgcccagagggcacgggctttcccacctctcaaagagacaaggaagccacctgtaagcagaagcagcatccaagtgcccctggcccccccatgtgttgattcaacccggttcctccccctctctcggtgggtgtgttgtttattgtaactacatagtgttggtttgatgtggaagtgtttatccacatacaaagtacaaaacaagccatgaacaagcttctttcccttaccccccatccacaatgtctgagcttggatgtcttttatagatttttaaattattttagtgattattattttattaaaggggtctgggctcactgcctggtgaagtttcaagtgttcagcagacctctctggtaacatatctggaatattgttgttgttttttaaccgagttttcccatcagtgccaaaactcaactcaatctgaaagtagagtgtctgagaggacagaaggtaatgggaactgtagctggaggcctcaggccatgggtcaaacctgggagggaaagagaccctacacatggcctagaaatgagagaagagagaggtatttacccagaggattttcctatggttggggatgcaaatattagaaaacagattgtattttgctgaggggagtggctgtcatgagcatgtcagttctaaaaggggttttcattatcctggaaatgtataaactaaagtaagctga

SEQ ID NO: 155952 - DNA, 271 bp, Homo sapiens
  Payload ID: 10627
  Gene Symbol: MRAS
  Gene Name: muscle RAS oncogene homolog
  ENST ID: ENST00000475711
  CDS Start-End: 202-271
aggtgtggccgccctccgggctcggccgcgctctccgcttgcggggtgcgccctgggaccggctgtgcgtggcgttttgcccccatcgcgggctcccgcgtaacggtgtgcgttcgtgaaatcggccacgaccaagaccccagtggggagggcctgcgcgccgctcagagagaccctttcatggtctgacctacgagaaacatggcaaccagcgccgtccccagtgacaacctccccacatacaagctggtggtggtgggggatgggggtg

SEQ ID NO: 155953 - DNA, 431 bp, Homo sapiens
  Payload ID: 10627
  Gene Symbol: MRAS
  Gene Name: muscle RAS oncogene homolog
  ENST ID: ENST00000494949
  CDS Start-End: 110-431
cgctgcctcctcaccggcgcaggctaggagggggcggcctgagtgccgtagccgagccggggctggagcgcgcgttctggacacagctgggcaggaggaattcagcgccatgcgggagcaatacatgcgcacgggggatggcttcctcatcgtctactccgtcactgacaaggccagctttgagcacgtggaccgcttccaccagcttatcctgcgcgtcaaagacagggagtcattcccgatgatcctcgtggccaacaaggtcgatttgatgcacttgaggaagatcaccagggagcaaggaaaagaaatggcgaccaaacacaatattccgtacatagaaaccagtgccaaggacccacctctcaatgtcgacaaagccttccatgacctcgttagagtaattaggcaacagattccggaaaaaagcc

SEQ ID NO: 155954 - DNA, 856 bp, Homo sapiens
  Payload ID: 10627
  Gene Symbol: MRAS
  Gene Name: muscle RAS oncogene homolog
  Uniprot ID: O14807
  ENST ID: ENST00000474559
  CDS Start-End: 137-763
gctgtggtcacaactagggcctgggctcatgcattgaactgatctggctgaggcatcagacacggtgccagtcctgccctgcggggaagacaagagcacaaagtgacaagccagtgtggtctgacctacgagaaacatggcaaccagcgccgtccccagtgacaacctccccacatacaagctggtggtggtgggggatgggggtgtgggcaaaagtgccctcaccatccagtttttccagaagatctttgtgcctgactatgaccccaccattgaagactcctacctgaaacatacggagattgacaatcaatgggccatcttggacgttctggacacagctgggcaggaggaattcagcgccatgcgggagcaatacatgcgcacgggggatggcttcctcatcgtctactccgtcactgacaaggccagctttgagcacgtggaccgcttccaccagcttatcctgcgcgtcaaagacagggagtcattcccgatgatcctcgtggccaacaaggtcgatttgatgcacttgaggaagatcaccagggagcaaggaaaagaaatggcgaccaaacacaatattccgtacatagaaaccagtgccaaggacccacctctcaatgtcgacaaagccttccatgacctcgttagagtaattaggcaacagattccggaaaaaagccagaagaagaagaagaaaaccaaatggcggggagaccgggccacaggcacccacaaactgcaatgtgtgatcttgtgacaggcctgaggccctgggcacagtgacggtggcctggccagccctcgggacccctccccacctaactgcactgaaaccatttctaaccacaac

SEQ ID NO: 155955 - DNA, 1534 bp, Homo sapiens
  Payload ID: 10627
  Gene Symbol: MRAS
  Gene Name: muscle RAS oncogene homolog
  Uniprot ID: O14807
  ENST ID: ENST00000464896
  CDS Start-End: 219-617
aggtgtggccgccctccgggctcggccgcgctctccgcttgcggggtgcgccctgggaccggctgtgcgtggcgttttgcccccatcgcgggctcccgcgtaacggtgtgcgttcgtgaaatcggccacgaccaagaccccagtggggagggcctgcgcgccgctcagagagaccctttcatgttctggacacagctgggcaggaggaattcagcgccatgcgggagcaatacatgcgcacgggggatggcttcctcatcgtctactccgtcactgacaaggccagctttgagcacgtggaccgcttccaccagcttatcctgcgcgtcaaagacagggagtcattcccgatgatcctcgtggccaacaaggtcgatttgatgcacttgaggaagatcaccagggagcaaggaaaagaaatggcgaccaaacacaatattccgtacatagaaaccagtgccaaggacccacctctcaatgtcgacaaagccttccatgacctcgttagagtaattaggcaacagattccggaaaaaagccagaagaagaagaagaaaaccaaatggcggggagaccgggccacaggcacccacaaactgcaatgtgtgatcttgtgacaggcctgaggccctgggcacagtgacggtggcctggccagccctcgggacccctccccacctaactgcactgaaaccatttctaaccacaacccttggcccaaggacttggtacaggaagggagaagggcaggtgggcagggagcagacagggtctggctttgcccagagggcacgggctttcccacctctcaaagagacaaggaagccacctgtaagcagaagcagcatccaagtgcccctggcccccccatgtgttgattcaacccggttcctccccctctctcggtgggtgtgttgtttattgtaactacatagtgttggtttgatgtggaagtgtttatccacatacaaagtacaaaacaagccatgaacaagcttctttcccttaccccccatccacaatgtctgagcttggatgtcttttatagatttttaaattattttagtgattattattttattaaaggggtctgggctcactgcctggtgaagtttcaagtgttcagcagacctctctggtaacatatctggaatattgttgttgttttttaaccgagttttcccatcagtgccaaaactcaactcaatctgaaagtagagtgtctgagaggacagaaggtaatgggaactgtagctggaggcctcaggccatgggtcaaacctgggagggaaagagaccctacacatggcctagaaatgagagaagagagaggtatttacccagaggattttcctatggttggggatgcaaatattagaaaacagattgtattttgctgaggggagtggctgtcatgagcatgtcagttctaaaaggggttttcattatcctggaaatgtataaactaaagtaagctgattggctttgcaaacatgttcatttgtttttcagacagtatgggttaagttctctg

SEQ ID NO: 155956 - DNA, 3801 bp, Homo sapiens
  Payload ID: 10627
  Gene Symbol: MRAS
  Gene Name: muscle RAS oncogene homolog
  Uniprot ID: O14807
  ENST ID: ENST00000621127
  CDS Start-End: 138-536
cggcggccgcggggcccggcgggcgcgacgctgcctcctcaccggcgcaggctaggagggggcggcctgagtgccgtagccgagccggggctggagcgcgcgttctggacacagctgggcaggaggaattcagcgccatgcgggagcaatacatgcgcacgggggatggcttcctcatcgtctactccgtcactgacaaggccagctttgagcacgtggaccgcttccaccagcttatcctgcgcgtcaaagacagggagtcattcccgatgatcctcgtggccaacaaggtcgatttgatgcacttgaggaagatcaccagggagcaaggaaaagaaatggcgaccaaacacaatattccgtacatagaaaccagtgccaaggacccacctctcaatgtcgacaaagccttccatgacctcgttagagtaattaggcaacagattccggaaaaaagccagaagaagaagaagaaaaccaaatggcggggagaccgggccacaggcacccacaaactgcaatgtgtgatcttgtgacaggcctgaggccctgggcacagtgacggtggcctggccagccctcgggacccctccccacctaactgcactgaaaccatttctaaccacaacccttggcccaaggacttggtacaggaagggagaagggcaggtgggcagggagcagacagggtctggctttgcccagagggcacgggctttcccacctctcaaagagacaaggaagccacctgtaagcagaagcagcatccaagtgcccctggcccccccatgtgttgattcaacccggttcctccccctctctcggtgggtgtgttgtttattgtaactacatagtgttggtttgatgtggaagtgtttatccacatacaaagtacaaaacaagccatgaacaagcttctttcccttaccccccatccacaatgtctgagcttggatgtcttttatagatttttaaattattttagtgattattattttattaaaggggtctgggctcactgcctggtgaagtttcaagtgttcagcagacctctctggtaacatatctggaatattgttgttgttttttaaccgagttttcccatcagtgccaaaactcaactcaatctgaaagtagagtgtctgagaggacagaaggtaatgggaactgtagctggaggcctcaggccatgggtcaaacctgggagggaaagagaccctacacatggcctagaaatgagagaagagagaggtatttacccagaggattttcctatggttggggatgcaaatattagaaaacagattgtattttgctgaggggagtggctgtcatgagcatgtcagttctaaaaggggttttcattatcctggaaatgtataaactaaagtaagctgattggctttgcaaacatgttcatttgtttttcagacagtatgggttaagttctctgccctccccaggggtctgaggaggctctgggtttctcagatctgtctcttgctgcgttttcacatcagctgtgctgcttggtgcctctctgatacgaatacactgacacgtcaaagtaacctaatgtggacaccatccagaaaactccagttcatgctggatcttaaccaaaaatgattcaatactgttatcactaaaacagcaccaagacctgaagccatcttcccttggagtcaactgactaccacctctataagcctagtcaatgagcagaccccttccagtatttgtaaaagtagtactaggttgcctttttggcaatttttattgacctgttgaatcttgactataaaatgatctgagaagtaaggaaggctgggctgatgtgtggctctcatataccttctgcaagggggcagtctccccagctccctgatgatgctcacccccgcccccccacctcaggtgctgctggtgtgagccaaagactggagtttttccagctggggtgggagtggagagacaacaggaacaacgctgcaccaaagaaaaggtcagaataaaaggcagcacagctggtgaccttattttctagatgttacaaatcaggtcactatgcaaactagaatatcctcagcaggtggcctggccactctggagaaagaaacccaaggaaagtgagcacccaactggatgccaagacacccgggttctgaaaatgtgctgtgttcctacctcggcaagatcaccagcactgaggggcccagctggagaatgattctgctacaaaaggagacagttgagacttttgcttgttggaaatcaaacttcttatttgtctaaattgcccctttttctgttcctaaaaggaaggataagagagaacattccaggtgaggcacttcaaagtttccttagaccctatagtgttaagaggtattttaaacactaaaaggacaaagctcttcccaatccttatgcttccctaagtggtatctgcagcagtttgttgtgtgcagtttgatggcagctgcaaactggaggtgaggcggaggaaaggcaggtaggaaggagtaaggatggagatgctcagaatcaagagcatggcggagtaggagaagaagccctgcacacagggcagtgtccacagccagaaaactcctgctgggcaccaaccactacgagcataccccatgcccaccgtggagctgcaactcctcgacagcactgagtttgatagtctcactggaagcagatcagctgatgtagaacagagacctcggccataaaggtgagaagacatagggatttcaaccacacagttgggacagaagggacagtgcatctgttcatccatcctgcacttggcccacgttgaactccatggtgcctgagagagactagttaagggttggtcttctgtatcctctgctgttgagcctctggtaagctttcatctcccatgaactcatttccccataaatgaaatgggtaaataatgccccatttgtagaagtgggccctcatgactgaggtagcttccagataggccagagtagagtgtagagtgtgccccgtgacatccctccatcttctcctccattatcatctagcagggtcagactgggaaacctggttggccacgccacaccatgaccgaggagccaactgggacttctggctgtttgacatcctcatgttcccgttggtcttccggagaatagtgctaccctcacatcccctggagcacagccttcctgaaatgccctcaccccatgcctttgccattgtgtgctctcagatttcttccactgtttgacaccctccttagagggctgctcttttttttccagagataatcctagccatcctctccactcccacggctggggacaatggccacttactacctgtgcactttgccactcgggacacctggatggtttctcttaggactttgcccacctccttctcatggcacttgctgtggaaaatgcctggctggcctcgtggggcctgtctcacttttccaggagacatgacccactaacgtggcaactttaacccaaaggcccctcagacatgttacagcaaatctggagccacagacaggttccctccattggcagcccattgtgtttgaaattccatgtcgggtttacttggaatgaaagatacttgaattattgtgcgcctgtgagcgcccagcttctgtttcatagtcttaacaggtggccattgtcgtgaaacgagtgatgcctgaagatctcagtgatgtttgaaccttctgtgtaactttttattaagtctttgtatctctcgactgattaataaagaagagaaacacgt

SEQ ID NO: 155957 - DNA, 4377 bp, Homo sapiens
  Payload ID: 10627
  Gene Symbol: MRAS
  Gene Name: muscle RAS oncogene homolog
  Uniprot ID: O14807
  ENST ID: ENST00000614350
  CDS Start-End: 714-1112
agtagcgcaatctcggctcactacaacctctgcctcccgggttcacgtgattctcctgcctcagcctcccgagtagatgagatcacaggcacgtgccgccatgccgggttgacttttgtatttttagtagagacggggtttcaccatgttgcctaggctggtcttgaactcctgacctcaggcgattcacccgcctcggcctcccaaagtgttaggattacaggcgtgagccaccgcgcccggcttgaattgtacacttcaaaaggtggaattttatggtgttgaattatatctttatttttttaacggggggaaaatgacgccgctggagaggagttagcggaactgaaacaatgaaatggtgcgcgagtgtcgcctgtccccgtcgcatccatcccaacgaagtttgggccctggaacggtgcacccagaaggcctgcggggagagacgctggggcatgatctggaagaaagacgtctcaggattcgaagggaatgcagctaaggtggcggcggaggttcgcctaggactggggaggcgtccctaggctcagaagttggcccggccggagcggagatttaaaggttggagcgcagaggctcttaaagaggccgagtcgaattcccactcggcgtccaccttaaagccagctccccggcaccacggatctgacccggttctggacacagctgggcaggaggaattcagcgccatgcgggagcaatacatgcgcacgggggatggcttcctcatcgtctactccgtcactgacaaggccagctttgagcacgtggaccgcttccaccagcttatcctgcgcgtcaaagacagggagtcattcccgatgatcctcgtggccaacaaggtcgatttgatgcacttgaggaagatcaccagggagcaaggaaaagaaatggcgaccaaacacaatattccgtacatagaaaccagtgccaaggacccacctctcaatgtcgacaaagccttccatgacctcgttagagtaattaggcaacagattccggaaaaaagccagaagaagaagaagaaaaccaaatggcggggagaccgggccacaggcacccacaaactgcaatgtgtgatcttgtgacaggcctgaggccctgggcacagtgacggtggcctggccagccctcgggacccctccccacctaactgcactgaaaccatttctaaccacaacccttggcccaaggacttggtacaggaagggagaagggcaggtgggcagggagcagacagggtctggctttgcccagagggcacgggctttcccacctctcaaagagacaaggaagccacctgtaagcagaagcagcatccaagtgcccctggcccccccatgtgttgattcaacccggttcctccccctctctcggtgggtgtgttgtttattgtaactacatagtgttggtttgatgtggaagtgtttatccacatacaaagtacaaaacaagccatgaacaagcttctttcccttaccccccatccacaatgtctgagcttggatgtcttttatagatttttaaattattttagtgattattattttattaaaggggtctgggctcactgcctggtgaagtttcaagtgttcagcagacctctctggtaacatatctggaatattgttgttgttttttaaccgagttttcccatcagtgccaaaactcaactcaatctgaaagtagagtgtctgagaggacagaaggtaatgggaactgtagctggaggcctcaggccatgggtcaaacctgggagggaaagagaccctacacatggcctagaaatgagagaagagagaggtatttacccagaggattttcctatggttggggatgcaaatattagaaaacagattgtattttgctgaggggagtggctgtcatgagcatgtcagttctaaaaggggttttcattatcctggaaatgtataaactaaagtaagctgattggctttgcaaacatgttcatttgtttttcagacagtatgggttaagttctctgccctccccaggggtctgaggaggctctgggtttctcagatctgtctcttgctgcgttttcacatcagctgtgctgcttggtgcctctctgatacgaatacactgacacgtcaaagtaacctaatgtggacaccatccagaaaactccagttcatgctggatcttaaccaaaaatgattcaatactgttatcactaaaacagcaccaagacctgaagccatcttcccttggagtcaactgactaccacctctataagcctagtcaatgagcagaccccttccagtatttgtaaaagtagtactaggttgcctttttggcaatttttattgacctgttgaatcttgactataaaatgatctgagaagtaaggaaggctgggctgatgtgtggctctcatataccttctgcaagggggcagtctccccagctccctgatgatgctcacccccgcccccccacctcaggtgctgctggtgtgagccaaagactggagtttttccagctggggtgggagtggagagacaacaggaacaacgctgcaccaaagaaaaggtcagaataaaaggcagcacagctggtgaccttattttctagatgttacaaatcaggtcactatgcaaactagaatatcctcagcaggtggcctggccactctggagaaagaaacccaaggaaagtgagcacccaactggatgccaagacacccgggttctgaaaatgtgctgtgttcctacctcggcaagatcaccagcactgaggggcccagctggagaatgattctgctacaaaaggagacagttgagacttttgcttgttggaaatcaaacttcttatttgtctaaattgcccctttttctgttcctaaaaggaaggataagagagaacattccaggtgaggcacttcaaagtttccttagaccctatagtgttaagaggtattttaaacactaaaaggacaaagctcttcccaatccttatgcttccctaagtggtatctgcagcagtttgttgtgtgcagtttgatggcagctgcaaactggaggtgaggcggaggaaaggcaggtaggaaggagtaaggatggagatgctcagaatcaagagcatggcggagtaggagaagaagccctgcacacagggcagtgtccacagccagaaaactcctgctgggcaccaaccactacgagcataccccatgcccaccgtggagctgcaactcctcgacagcactgagtttgatagtctcactggaagcagatcagctgatgtagaacagagacctcggccataaaggtgagaagacatagggatttcaaccacacagttgggacagaagggacagtgcatctgttcatccatcctgcacttggcccacgttgaactccatggtgcctgagagagactagttaagggttggtcttctgtatcctctgctgttgagcctctggtaagctttcatctcccatgaactcatttccccataaatgaaatgggtaaataatgccccatttgtagaagtgggccctcatgactgaggtagcttccagataggccagagtagagtgtagagtgtgccccgtgacatccctccatcttctcctccattatcatctagcagggtcagactgggaaacctggttggccacgccacaccatgaccgaggagccaactgggacttctggctgtttgacatcctcatgttcccgttggtcttccggagaatagtgctaccctcacatcccctggagcacagccttcctgaaatgccctcaccccatgcctttgccattgtgtgctctcagatttcttccactgtttgacaccctccttagagggctgctcttttttttccagagataatcctagccatcctctccactcccacggctggggacaatggccacttactacctgtgcactttgccactcgggacacctggatggtttctcttaggactttgcccacctccttctcatggcacttgctgtggaaaatgcctggctggcctcgtggggcctgtctcacttttccaggagacatgacccactaacgtggcaactttaacccaaaggcccctcagacatgttacagcaaatctggagccacagacaggttccctccattggcagcccattgtgtttgaaattccatgtcgggtttacttggaatgaaagatacttgaattattgtgcgcctgtgagcgcccagcttctgtttcatagtcttaacaggtggccattgtcgtgaaacgagtgatgcctgaagatctcagtgatgtttgaaccttctgtgtaactttttattaagtctttgtatctctcgactgattaataaagaagagaaacacgt

SEQ ID NO: 155958 - DNA, 2408 bp, Homo sapiens
  Payload ID: 10628
  Gene Symbol: MUSK
  Gene Name: muscle, skeletal, receptor tyrosine kinase
  Uniprot ID: O15146
  ENST ID: ENST00000189978
  CDS Start-End: 47-2398
tgcgttgtccagaaggaacttcgtcctgcgtgagcctggattaatcatgagagagctcgtcaacattccactggtacatattcttactctggttgccttcagcggaactgagaaacttccaaaagctcctgtcatcaccactcctcttgaaacagtggatgccttagttgaagaagtggctactttcatgtgtgcagtggaatcctacccccagcctgagatttcctggactagaaataaaattctcattaaactctttgacacccggtacagcatccgggagaatgggcagctcctcaccatcctgagtgtggaagacagtgatgatggcatttactgctgcacggccaacaatggtgtgggaggagctgtggagagttgtggagccctgcaagtgaagatgaaacctaaaataactcgtcctcccataaatgtgaaaataatagagggattaaaagcagtcctaccatgtactacaatgggtaatcccaaaccatcagtgtcttggataaagggagacagccctctcagggaaaattcccgaattgcagttcttgaatctgggagcttgaggattcataacgtacaaaaggaagatgcaggacagtatcgatgtgtggcaaaaaacagcctcgggacagcatattccaaagtggtgaagctggaagttgaggaagaaagtgaacccgaacaagatactaaagtttttgccaggatcctgcgggctcctgaatcccacaatgtcacctttggctcctttgtgaccctgcactgtacagcaacaggcattcctgtccccaccatcacctggattgaaaacggaaatgctgtttcttctgggtccattcaagagagtgtgaaagaccgagtgattgactcaagactgcagctgtttatcaccaagccaggactctacacatgcatagctaccaataagcatggggagaagttcagtactgccaaggctgcagccaccatcagcatagcagaatggagagagtactgcttggcagtaaaggagctcttctgcgcaaaagaatggctggtaatggaagagaagacccacagaggactctacagatccgagatgcatttgctgtccgtgccagaatgcagcaagcttcccagcatgcattgggaccccacggcctgtgccagactgccacatctagcattcccaccaatgacgtcctcaaagccaagtgtggacattccaaatctgccttcctcctcctcttcttccttctctgtctcacctacatactccatgactgtaataatctccatcatgtccagctttgcaatatttgtgcttcttaccataactactctctattgctgccgaagaagaaaacaatggaaaaataagaaaagagaatcagcagcagtaaccctcaccacactgccttctgagctcttactagatagacttcatcccaaccccatgtaccagaggatgccgctccttctgaaccccaaattgctcagcctggagtatccaaggaataacattgaatatgtgagagacatcggagagggagcgtttggaagggtgtttcaagcaagggcaccaggcttacttccctatgaacctttcactatggtggcagtaaagatgctcaaagaagaagcctcggcagatatgcaagcggactttcagagggaggcagccctcatggcagaatttgacaaccctaacattgtgaagctattaggagtgtgtgctgtcgggaagccaatgtgcctgctctttgaatacatggcctatggtgacctcaatgagttcctccgcagcatgtcccctcacaccgtgtgcagcctcagtcacagtgacttgtctatgagggctcaggtctccagccctgggcccccacccctctcctgtgctgagcagctttgcattgccaggcaggtggcagctggcatggcttacctctcagaacgtaagtttgttcaccgagatttagccaccaggaactgcctggtgggcgagaacatggtggtgaaaattgccgactttggcctctccaggaacatctactcagcagactactacaaagctaatgaaaacgacgctatccctatccgttggatgccaccagagtccattttttataaccgctacactacagagtctgatgtgtgggcctatggcgtggtcctctgggagatcttctcctatggcctgcagccctactatgggatggcccatgaggaggtcatttactacgtgcgagatggcaacatcctctcctgccctgagaactgccccgtggagctgtacaatctcatgcgtctatgttggagcaagctgcctgcagacagacccagtttcaccagtattcaccgaattctggaacgcatgtgtgagagggcagagggaactgtgagtgtctaaggttgaagac

SEQ ID NO: 155959 - DNA, 435 bp, Homo sapiens
  Payload ID: 10628
  Gene Symbol: MUSK
  Gene Name: muscle, skeletal, receptor tyrosine kinase
  ENST ID: ENST00000374439
  CDS Start-End: 1-399
aatggtgtgggaggagctgtggagagttgtggagccctgcaagtgaagatgaaacctaaaataactcgtcctcccataaatgtgaaaataatagagggattaaaagcagtcctaccatgtactacaatgggtaatcccaaaccatcagtgtcttggataaagggagacagccctctcagggaaaattcccgaattgcagttcttgaatctgggagcttgaggattcataacgtacaaaaggaagatgcaggacagtatcgatgtgtggcaaaaaacagcctcgggacagcatattccaaagtggtgaagctggaagttgagggtgctaaaggcattcacacccagtttgtggcttctgccctccagctaagatcgttccttagctgtccccaaatatgagaatgaatatacaatgataaaacaaaaataaatcaa

SEQ ID NO: 155960 - DNA, 2408 bp, Homo sapiens
  Payload ID: 10628
  Gene Symbol: MUSK
  Gene Name: muscle, skeletal, receptor tyrosine kinase
  ENST ID: ENST00000374440
  CDS Start-End: 47-2398
tgcgttgtccagaaggaacttcgtcctgcgtgagcctggattaatcatgagagagctcgtcaacattccactggtacatattcttactctggttgccttcagcggaactgagaaacttccaaaagctcctgtcatcaccactcctcttgaaacagtggatgccttagttgaagaagtggctactttcatgtgtgcagtggaatcctacccccagcctgagatttcctggactagaaataaaattctcattaaactctttgacacccggtacagcatccgggagaatgggcagctcctcaccatcctgagtgtggaagacagtgatgatggcatttactgctgcacggccaacaatggtgtgggaggagctgtggagagttgtggagccctgcaagtgaagatgaaacctaaaataactcgtcctcccataaatgtgaaaataatagagggattaaaagcagtcctaccatgtactacaatgggtaatcccaaaccatcagtgtcttggataaagggagacagccctctcagggaaaattcccgaattgcagttcttgaatctgggagcttgaggattcataacgtacaaaaggaagatgcaggacagtatcgatgtgtggcaaaaaacagcctcgggacagcatattccaaagtggtgaagctggaagttgaggaagaaagtgaacccgaacaagatactaaagtttttgccaggatcctgcgggctcctgaatcccacaatgtcacctttggctcctttgtgaccctgcactgtacagcaacaggcattcctgtccccaccatcacctggattgaaaacggaaatgctgtttcttctgggtccattcaagagagtgtgaaagaccgagtgattgactcaagactgcagctgtttatcaccaagccaggactctacacatgcatagctaccaataagcatggggagaagttcagtactgccaaggctgcagccaccatcagcatagcagattttagagagtactgcttggcagtaaaggagctcttctgcgcaaaagaatggctggtaatggaagagaagacccacagaggactctacagatccgagatgcatttgctgtccgtgccagaatgcagcaagcttcccagcatgcattgggaccccacggcctgtgccagactgccacatctagcattcccaccaatgacgtcctcaaagccaagtgtggacattccaaatctgccttcctcctcctcttcttccttctctgtctcacctacatactccatgactgtaataatctccatcatgtccagctttgcaatatttgtgcttcttaccataactactctctattgctgccgaagaagaaaacaatggaaaaataagaaaagagaatcagcagcagtaaccctcaccacactgccttctgagctcttactagatagacttcatcccaaccccatgtaccagaggatgccgctccttctgaaccccaaattgctcagcctggagtatccaaggaataacattgaatatgtgagagacatcggagagggagcgtttggaagggtgtttcaagcaagggcaccaggcttacttccctatgaacctttcactatggtggcagtaaagatgctcaaagaagaagcctcggcagatatgcaagcggactttcagagggaggcagccctcatggcagaatttgacaaccctaacattgtgaagctattaggagtgtgtgctgtcgggaagccaatgtgcctgctctttgaatacatggcctatggtgacctcaatgagttcctccgcagcatgtcccctcacaccgtgtgcagcctcagtcacagtgacttgtctatgagggctcaggtctccagccctgggcccccacccctctcctgtgctgagcagctttgcattgccaggcaggtggcagctggcatggcttacctctcagaacgtaagtttgttcaccgagatttagccaccaggaactgcctggtgggcgagaacatggtggtgaaaattgccgactttggcctctccaggaacatctactcagcagactactacaaagctaatgaaaacgacgctatccctatccgttggatgccaccagagtccattttttataaccgctacactacagagtctgatgtgtgggcctatggcgtggtcctctgggagatcttctcctatggcctgcagccctactatgggatggcccatgaggaggtcatttactacgtgcgagatggcaacatcctctcctgccctgagaactgccccgtggagctgtacaatctcatgcgtctatgttggagcaagctgcctgcagacagacccagtttcaccagtattcaccgaattctggaacgcatgtgtgagagggcagagggaactgtgagtgtctaaggttgaagac

SEQ ID NO: 155961 - DNA, 2754 bp, Homo sapiens
  Payload ID: 10628
  Gene Symbol: MUSK
  Gene Name: muscle, skeletal, receptor tyrosine kinase
  Uniprot ID: O15146
  ENST ID: ENST00000374448
  CDS Start-End: 135-2744
gtggagctgctgacacaaacagtcattagcagacaacccttttgcaacaaagtatgctttaaaatgtaaactgtggagccattttccttgcgttgtccagaaggaacttcgtcctgcgtgagcctggattaatcatgagagagctcgtcaacattccactggtacatattcttactctggttgccttcagcggaactgagaaacttccaaaagctcctgtcatcaccactcctcttgaaacagtggatgccttagttgaagaagtggctactttcatgtgtgcagtggaatcctacccccagcctgagatttcctggactagaaataaaattctcattaaactctttgacacccggtacagcatccgggagaatgggcagctcctcaccatcctgagtgtggaagacagtgatgatggcatttactgctgcacggccaacaatggtgtgggaggagctgtggagagttgtggagccctgcaagtgaagatgaaacctaaaataactcgtcctcccataaatgtgaaaataatagagggattaaaagcagtcctaccatgtactacaatgggtaatcccaaaccatcagtgtcttggataaagggagacagccctctcagggaaaattcccgaattgcagttcttgaatctgggagcttgaggattcataacgtacaaaaggaagatgcaggacagtatcgatgtgtggcaaaaaacagcctcgggacagcatattccaaagtggtgaagctggaagttgaggtttttgccaggatcctgcgggctcctgaatcccacaatgtcacctttggctcctttgtgaccctgcactgtacagcaacaggcattcctgtccccaccatcacctggattgaaaacggaaatgctgtttcttctgggtccattcaagagagtgtgaaagaccgagtgattgactcaagactgcagctgtttatcaccaagccaggactctacacatgcatagctaccaataagcatggggagaagttcagtactgccaaggctgcagccaccatcagcatagcagaatggagtaaaccacagaaagataacaaaggctactgcgcccagtacagaggggaggtgtgtaatgcagtcctggcaaaagatgctcttgtttttctcaacacctcctatgcggaccctgaggaggcccaagagctactggtccacacggcctggaatgaactgaaagtagtgagcccagtctgccggccagctgctgaggctttgttgtgtaaccacatcttccaggagtgcagtcctggagtagtgcctactcctattcccatttgcagagagtactgcttggcagtaaaggagctcttctgcgcaaaagaatggctggtaatggaagagaagacccacagaggactctacagatccgagatgcatttgctgtccgtgccagaatgcagcaagcttcccagcatgcattgggaccccacggcctgtgccagactgccacatctagattataacaaagaaaacctaaaaacattcccaccaatgacgtcctcaaagccaagtgtggacattccaaatctgccttcctcctcctcttcttccttctctgtctcacctacatactccatgactgtaataatctccatcatgtccagctttgcaatatttgtgcttcttaccataactactctctattgctgccgaagaagaaaacaatggaaaaataagaaaagagaatcagcagcagtaaccctcaccacactgccttctgagctcttactagatagacttcatcccaaccccatgtaccagaggatgccgctccttctgaaccccaaattgctcagcctggagtatccaaggaataacattgaatatgtgagagacatcggagagggagcgtttggaagggtgtttcaagcaagggcaccaggcttacttccctatgaacctttcactatggtggcagtaaagatgctcaaagaagaagcctcggcagatatgcaagcggactttcagagggaggcagccctcatggcagaatttgacaaccctaacattgtgaagctattaggagtgtgtgctgtcgggaagccaatgtgcctgctctttgaatacatggcctatggtgacctcaatgagttcctccgcagcatgtcccctcacaccgtgtgcagcctcagtcacagtgacttgtctatgagggctcaggtctccagccctgggcccccacccctctcctgtgctgagcagctttgcattgccaggcaggtggcagctggcatggcttacctctcagaacgtaagtttgttcaccgagatttagccaccaggaactgcctggtgggcgagaacatggtggtgaaaattgccgactttggcctctccaggaacatctactcagcagactactacaaagctaatgaaaacgacgctatccctatccgttggatgccaccagagtccattttttataaccgctacactacagagtctgatgtgtgggcctatggcgtggtcctctgggagatcttctcctatggcctgcagccctactatgggatggcccatgaggaggtcatttactacgtgcgagatggcaacatcctctcctgccctgagaactgccccgtggagctgtacaatctcatgcgtctatgttggagcaagctgcctgcagacagacccagtttcaccagtattcaccgaattctggaacgcatgtgtgagagggcagagggaactgtgagtgtctaaggttgaagac

SEQ ID NO: 155962 - DNA, 3344 bp, Homo sapiens
  Payload ID: 10628
  Gene Symbol: MUSK
  Gene Name: muscle, skeletal, receptor tyrosine kinase
  ENST ID: ENST00000416899
  CDS Start-End: 127-2712
gctgacacaaacagtcattagcagacaacccttttgcaacaaagtatgctttaaaatgtaaactgtggagccattttccttgcgttgtccagaaggaacttcgtcctgcgtgagcctggattaatcatgagagagctcgtcaacattccactggtacatattcttactctggttgccttcagcggaactgagaaacttccaaaagctcctgtcatcaccactcctcttgaaacagtggatgccttagttgaagaagtggctactttcatgtgtgcagtggaatcctacccccagcctgagatttcctggactagaaataaaattctcattaaactctttgacacccggtacagcatccgggagaatgggcagctcctcaccatcctgagtgtggaagacagtgatgatggcatttactgctgcacggccaacaatggtgtgggaggagctgtggagagttgtggagccctgcaagtgaagatgaaacctaaaataactcgtcctcccataaatgtgaaaataatagagggattaaaagcagtcctaccatgtactacaatgggtaatcccaaaccatcagtgtcttggataaagggagacagccctctcagggaaaattcccgaattgcagttcttgaatctgggagcttgaggattcataacgtacaaaaggaagatgcaggacagtatcgatgtgtggcaaaaaacagcctcgggacagcatattccaaagtggtgaagctggaagttgaggtttttgccaggatcctgcgggctcctgaatcccacaatgtcacctttggctcctttgtgaccctgcactgtacagcaacaggcattcctgtccccaccatcacctggattgaaaacggaaatgctgtttcttctgggtccattcaagagagtgtgaaagaccgagtgattgactcaagactgcagctgtttatcaccaagccaggactctacacatgcatagctaccaataagcatggggagaagttcagtactgccaaggctgcagccaccatcagcatagcagaatggagtaaaccacagaaagataacaaaggctactgcgcccagtacagaggggaggtgtgtaatgcagtcctggcaaaagatgctcttgtttttctcaacacctcctatgcggaccctgaggaggcccaagagctactggtccacacggcctggaatgaactgaaagtagtgagcccagtctgccggccagctgctgaggctttgttgtgtaaccacatcttccaggagtgcagtcctggagtagtgcctactcctattcccatttgcagagagtactgcttggcagtaaaggagctcttctgcgcaaaagaatggctggtaatggaagagaagacccacagaggactctacagatccgagatgcatttgctgtccgtgccagaatgcagcaagcttcccagcatgcattgggaccccacggcctgtgccagactgccacatctagcattcccaccaatgacgtcctcaaagccaagtgtggacattccaaatctgccttcctcctcctcttcttccttctctgtctcacctacatactccatgactgtaataatctccatcatgtccagctttgcaatatttgtgcttcttaccataactactctctattgctgccgaagaagaaaacaatggaaaaataagaaaagagaatcagcagcagtaaccctcaccacactgccttctgagctcttactagatagacttcatcccaaccccatgtaccagaggatgccgctccttctgaaccccaaattgctcagcctggagtatccaaggaataacattgaatatgtgagagacatcggagagggagcgtttggaagggtgtttcaagcaagggcaccaggcttacttccctatgaacctttcactatggtggcagtaaagatgctcaaagaagaagcctcggcagatatgcaagcggactttcagagggaggcagccctcatggcagaatttgacaaccctaacattgtgaagctattaggagtgtgtgctgtcgggaagccaatgtgcctgctctttgaatacatggcctatggtgacctcaatgagttcctccgcagcatgtcccctcacaccgtgtgcagcctcagtcacagtgacttgtctatgagggctcaggtctccagccctgggcccccacccctctcctgtgctgagcagctttgcattgccaggcaggtggcagctggcatggcttacctctcagaacgtaagtttgttcaccgagatttagccaccaggaactgcctggtgggcgagaacatggtggtgaaaattgccgactttggcctctccaggaacatctactcagcagactactacaaagctaatgaaaacgacgctatccctatccgttggatgccaccagagtccattttttataaccgctacactacagagtctgatgtgtgggcctatggcgtggtcctctgggagatcttctcctatggcctgcagccctactatgggatggcccatgaggaggtcatttactacgtgcgagatggcaacatcctctcctgccctgagaactgccccgtggagctgtacaatctcatgcgtctatgttggagcaagctgcctgcagacagacccagtttcaccagtattcaccgaattctggaacgcatgtgtgagagggcagagggaactgtgagtgtctaaggttgaagacgttcaaataaaatgctgcagtttcctctcagactctgtgagccaggggaatcctacaccagaggcccaacaagacccacataggaaagagtaagagtaaacatgagtagtgtgttgtttgcttcccagggagagcaaagacagtgcaaaacccatgtggtagacggacccattgaaagccagtgattggaaacacaggctaggaaatgtgtcagataatggagacaactattcttcttcatgaaggtttgtaatacacactgcacagggaagaatgtcatcctgttcagtttccaaagtagctggtcacagagtaaagctctgctgtattaaattttaatatgaaatgggattcagagcttcattttttaattgagttaattcctgtccattgtgaaagtagcttaatcgtcatgtaagacacttaggtgaagtacagaaaactaaaaagaaggaaaagccactcattctgtctccccccaaagacgagtcttagtgttttattaaatctttcttgcatttaatgcataattttatatttgtttgtattctgcagagttgtggttacattttattgatagagggtttctaaggaatgaaacagcaaatcagcaagcctgtaa

SEQ ID NO: 155963 - DNA, 6422 bp, Homo sapiens
  Payload ID: 10629
  Gene Symbol: MBNL1
  Gene Name: muscleblind-like splicing regulator 1
  Uniprot ID: Q9NR56
  ENST ID: ENST00000282486
  CDS Start-End: 1843-3009
ttacatcttatagcacccagtgaattatgatatggggctgcggtttatttgctctggcgacaatatggcttacttgccgtggaatatcccggtatttcagaagtaacatattatttttaaagagggagctttgctttctctaaatcacatggtgcaaagttgggaatacagtggcctgtaaattacaaatattatttacaaactagaaggaaagctgacatgtgtttgtgcctgtgtgacagtttcactaaggaattccaaaactgtggatagcctgttacttgagaaaaatacacggtggcagtcttgcagatgtttttcccgcctgttagccctccaggttcaaaaactgtttggtgcattttaaggcggcagtctcaccagatcgcaggattctagtctaattggcttctaaccttcaatctaaccttgccggcttccttgcaaagcccggtgcaagggcctctttcaaaatgaacccactggtgtgcctagcagtcggtagaagaagcgggagggcgtccggtctgcacgcccgccgcgaggttacaatgctgaacgcatgagatggaagataccaacgggaggccgaggggatccacggcgcccgcgcgggctccggcttcctcctgctctcggcgccgctgggcgaccgcccatgacccgctcttgcgggctctgtccggttgacaggcgaccctgtggcccggggaagcgcgggagggcgccggcggaaagttgaagagcgtttttctcgccgccgcgtgcattaggagctcgacgagtccgccctgggcttcctggtggggctgggcgggcgggggaggggccgcgcagcagcagcggaagccagacctcggcgataagaggctgcacagcgacatgcaacagtcttttcactgcagctgaatgagttgtggcgcccacaatgctcccatgacaaggagctgacaagttccattttccgtcgcgggcatcttggaatcatgactcccacaatgccttgggcacttggtcgacagtggggccgcctctgaaaaaaaaatgtgagaggttggtactaagaagtgcctttcctgacgtctctgctgcttggaaccgcttctagagcagtctctgcttttgccttgcttgctgccagctagactgtgacgacagcacatccaccctccacctctagcccagacacccccatttctacttataatcaagagaaaagctctaagtatctggcattgccctaggctgctttagtgttaaaagaaaagtttgctgaaaaagtaagatatcttctgccaggaaatcaaggaggaaaaaaaaaatcattttctcgattttgctctaaactgctgcatctgtctatgccaaactaatcaataccgattgcaccaccaaactccattgcaaattcagctgtgaggagattccctttcagacaactttgctgaaagcagcttggaaattcggtgtcgaagggtctgccacgttttcatgcttgcattttgggctccaaattggcactgggaaggggttactgagagcacaaggctgataccaggccctacttttaaacgttcatctacttacaatcctagtatttctctaaaaaccaaaacctctttgaattaacagtttcatgctgtgaatttctagtgggagatcttttccttgatattgacgacacaattttccatgtacttttaaagcagggagtggggaaaagtattttgaggggacattttcatcatcagttcagctttttttttttggttgttgctcttttttgggggggttgggtttgttggtttcactgaaacatttaactacctgtaaaatctaaacatggctgttagtgtcacaccaattcgggacacaaaatggctaacactggaagtatgtagagagttccagagggggacttgctcacggccagacacggaatgtaaatttgcacatccttcgaaaagctgccaagttgaaaatggacgagtaatcgcctgctttgattcattgaaaggccgttgctccagggagaactgcaaatatcttcatccacccccacatttaaaaacgcagttggagataaatggacgcaataacttgattcagcagaagaacatggccatgttggcccagcaaatgcaactagccaatgccatgatgcctggtgccccattacaacccgtgccaatgttttcagttgcaccaagcttagccaccaatgcatcagcagccgcctttaatccctatctgggacctgtttctccaagcctggtcccggcagagatcttgccgactgcaccaatgttggttacagggaatccgggtgtccctgtacctgcagctgctgcagctgctgcacagaaattaatgcgaacagacagacttgaggtatgtcgagagtaccaacgtggcaattgcaaccgaggagaaaatgattgtcggtttgctcatcctgctgacagcacaatgattgacaccaatgacaacacagtcactgtgtgtatggattacatcaaagggagatgctctcgggaaaagtgcaaatactttcatccccctgcacatttgcaagccaagatcaaggctgcccaataccaggtcaaccaggctgcagctgcacaggctgcagccaccgcagctgccatgactcagtcggctgtcaaatcactgaagcgacccctcgaggcaacctttgacctgggaattcctcaagctgtacttcccccattaccaaagaggcctgctcttgaaaaaaccaacggtgccaccgcagtctttaacactggtattttccaataccaacaggctctagccaacatgcagttacaacagcatacagcatttctcccaccagttcccatggtgcacggtgctacgccagccactgtgtccgcagcaacaacatctgccacaagtgttcccttcgctgcaacagccacagccaaccagatacccataatatctgccgaacatctgactagccacaagtatgttacccagatgtagaattttcatcactaaacaatcatgctaaagaggaaaggacagtgtgcttggttagagtaaaggacgaggtcattagccatattgtatatatcgtcaagcaacacacacaaaagttcctcagccacaagacatccacatattgcatgttaaccagaagaaaagacaacattttccggaaatccactgcacactgttgcctatacactttgtacatttaattgatatttgtgctgaggtgatattcctgtctaaaagaacaacattgtctttcttttctagcacagagttatgcattcaaagatgcatacctagttagtttcctatatattcatgccatcttgaaaagacagactatggtgtaaccatgattctattatgtattggtacgtctgtagaccaagatataattttttaaaaataagtttatttctttcaaggtttacaaataacaaaggtgcaccttgtatttaaaattgccattatagatgagagcgtgcatgcacagtcatttttgtttaagagtaatatttttaatgtaatagattgtaagacgtggtgagggagggatctgacagagatgaatgtgccaagcaaaaccacaactgtgtatattttaaagcacatcatggctttaagtaccatgttgttaaggattctcatgaagtgccatagactgtacatcaaattagagtattatttcttcagtgttattgttttcagagccacattttgttgcatatttgctagtactaatcagtcaaagggcaccattctttttttttttttttgaaaccaaagctgtctcagaaatggccaatttaactttacagtaacaatagacagcacaacacaaactctctcaatacagataaactcacacatactggagatatatatataatagatatatataaaattattttaatgcattgtagtgtaatatttatgcatactatactgtataacatgttattcaaaagggattgccatttctgagacacagtaacaaaaaaatgaggaaattattttgcttctatttatagcctctgtcaaaagtcaaaagactataaatgctttgcaaaaatggtttcacgtttgcttaaatgcttcatcacagtcacattcaaaatagtgactctaaacaaagaagaaagcagcactgtcatcagatgcatgataaaccaaaatatgaaaatgggaaatgtttaattaacctagtaattgggtgggttaagtacatgggtgaattttatatgtgatttttgttttgttttgttttgttcagattaactgcttatagccttagaaagccttttacaaaattaaaaaaaaaatagatgtgcattcagtttttaagaatggaatcatccaaaggaattcctttttttgaggtttggatgttgcagctagtaaaggatatttttgctctgttcagcagttctaaaaattgctgaagtaggggccaggtcactggtagttatagtatggaatgggagaagtgaaagttcagttatagaactttccatacttccaagtttactgcaagtttttatgcttgagagagatgctttctaatataagactgatgtgttgattttactgattgtactgtacatctattaaagccttagattattacattacgggttggaacccataccaatgtaatttcaatcgtgttaagaaagtaatggtgacttcacatgttattgtagttagttacattatagaatattacttatttttcttgttaaaatgtagtttttcatttcctacatttattagattttcattttctattaacaattgaataccatttcagtttatagacttgttttattagattttaccaatgaatttttcaaaatacaaaaaaaagtagtttttccttcataacatactcagttttgaattacatgtagtgtcacatgaatattcgtattgttaactaaatgatttatattttactgatttaatattacagtgtaagaatgtcagtcattgttagttcttgtctagttttcattaaaagaacaaagatcttttatatggatatcttataaatatataatcattgctaagtaagaagttaagttgttgctatcgcaacaatcctggcagacaattgagtaatattttgatgatttattttgtttgtaattagttattataagaagatctagatcctagatattagaataaaatttattttctactgtatccatttcaaatgttaaaatattgtttaatatttttgaaatccctgagtatcaggccttgttataaataagctgcataatcaataaatagaacaagggactttttgttgataatccaaatactcaaagtttacgtaatgaaaattatagcgtgtgtgcaaactcttgagggttgattatgctgcaatttagcatgttggaacgtctagggagaaggttgactttttgcacttctgtatatagtcaaaagagagaaacctgtataatagtaagatcttattttgaataaaaacgtctataattacaaggagttttgttaaggctaatacaatgacagactgagcaaaattgcttgcaaaagtggcacagagttagcactccataccccttcaaacatgttgctttgctttcttgtggacagcttgtagtttgccaggattttttcagctggaaagatacgccatcctttcaaaccctcatgactgacaaaaactccatggggccaaatctgcctgaagatcattaccaaaaatagcaggtacttctaccattaaggtgaaatcatggatcagatattccttacatttttcaaaactactgcatgtttaaaacttcaacaaaaaaagagagaaagaactatactaagaacatatattattcagatcagtttctgccaatttcagtggtttattgttcacaaaaaaatcttcaaaacaagtattgactttcacaaaatttaaatcataaacaggcaaaccaaacagcacactgtagctatagttgttatgtgattgttttttaattgctgtaggatcctgttctttcagcaggtgaaaaataaaacgcagttcaaatttcatggttttaattttcaactcagaagcactcaaaaatgcaaaatgtgataatgggcacttgtttaaaagaattagtgtatccagccttcactccagctggttaaaaatgttgcacttatcagcaaccctaccactttcatctgctgaaaggacaaatgtgcttggttttactattatgtaatcacaacttactttctgcttgtagttgcttaaaattatgtattttgtcttgggctgcaatttgttttatgcttattttattattactgcagtagttgactttgctgtatggaaaaataaagtgaaattgccctaataaaacttctctttcttaagt

SEQ ID NO: 155964 - DNA, 6458 bp, Homo sapiens
  Payload ID: 10629
  Gene Symbol: MBNL1
  Gene Name: muscleblind-like splicing regulator 1
  ENST ID: ENST00000282488
  CDS Start-End: 1843-3045
ttacatcttatagcacccagtgaattatgatatggggctgcggtttatttgctctggcgacaatatggcttacttgccgtggaatatcccggtatttcagaagtaacatattatttttaaagagggagctttgctttctctaaatcacatggtgcaaagttgggaatacagtggcctgtaaattacaaatattatttacaaactagaaggaaagctgacatgtgtttgtgcctgtgtgacagtttcactaaggaattccaaaactgtggatagcctgttacttgagaaaaatacacggtggcagtcttgcagatgtttttcccgcctgttagccctccaggttcaaaaactgtttggtgcattttaaggcggcagtctcaccagatcgcaggattctagtctaattggcttctaaccttcaatctaaccttgccggcttccttgcaaagcccggtgcaagggcctctttcaaaatgaacccactggtgtgcctagcagtcggtagaagaagcgggagggcgtccggtctgcacgcccgccgcgaggttacaatgctgaacgcatgagatggaagataccaacgggaggccgaggggatccacggcgcccgcgcgggctccggcttcctcctgctctcggcgccgctgggcgaccgcccatgacccgctcttgcgggctctgtccggttgacaggcgaccctgtggcccggggaagcgcgggagggcgccggcggaaagttgaagagcgtttttctcgccgccgcgtgcattaggagctcgacgagtccgccctgggcttcctggtggggctgggcgggcgggggaggggccgcgcagcagcagcggaagccagacctcggcgataagaggctgcacagcgacatgcaacagtcttttcactgcagctgaatgagttgtggcgcccacaatgctcccatgacaaggagctgacaagttccattttccgtcgcgggcatcttggaatcatgactcccacaatgccttgggcacttggtcgacagtggggccgcctctgaaaaaaaaatgtgagaggttggtactaagaagtgcctttcctgacgtctctgctgcttggaaccgcttctagagcagtctctgcttttgccttgcttgctgccagctagactgtgacgacagcacatccaccctccacctctagcccagacacccccatttctacttataatcaagagaaaagctctaagtatctggcattgccctaggctgctttagtgttaaaagaaaagtttgctgaaaaagtaagatatcttctgccaggaaatcaaggaggaaaaaaaaaatcattttctcgattttgctctaaactgctgcatctgtctatgccaaactaatcaataccgattgcaccaccaaactccattgcaaattcagctgtgaggagattccctttcagacaactttgctgaaagcagcttggaaattcggtgtcgaagggtctgccacgttttcatgcttgcattttgggctccaaattggcactgggaaggggttactgagagcacaaggctgataccaggccctacttttaaacgttcatctacttacaatcctagtatttctctaaaaaccaaaacctctttgaattaacagtttcatgctgtgaatttctagtgggagatcttttccttgatattgacgacacaattttccatgtacttttaaagcagggagtggggaaaagtattttgaggggacattttcatcatcagttcagctttttttttttggttgttgctcttttttgggggggttgggtttgttggtttcactgaaacatttaactacctgtaaaatctaaacatggctgttagtgtcacaccaattcgggacacaaaatggctaacactggaagtatgtagagagttccagagggggacttgctcacggccagacacggaatgtaaatttgcacatccttcgaaaagctgccaagttgaaaatggacgagtaatcgcctgctttgattcattgaaaggccgttgctccagggagaactgcaaatatcttcatccacccccacatttaaaaacgcagttggagataaatggacgcaataacttgattcagcagaagaacatggccatgttggcccagcaaatgcaactagccaatgccatgatgcctggtgccccattacaacccgtgccaatgttttcagttgcaccaagcttagccaccaatgcatcagcagccgcctttaatccctatctgggacctgtttctccaagcctggtcccggcagagatcttgccgactgcaccaatgttggttacagggaatccgggtgtccctgtacctgcagctgctgcagctgctgcacagaaattaatgcgaacagacagacttgaggtatgtcgagagtaccaacgtggcaattgcaaccgaggagaaaatgattgtcggtttgctcatcctgctgacagcacaatgattgacaccaatgacaacacagtcactgtgtgtatggattacatcaaagggagatgctctcgggaaaagtgcaaatactttcatccccctgcacatttgcaagccaagatcaaggctgcccaataccaggtcaaccaggctgcagctgcacaggctgcagccaccgcagctgccatgactcagtcggctgtcaaatcactgaagcgacccctcgaggcaacctttgacctgggaattcctcaagctgtacttcccccattaccaaagaggcctgctcttgaaaaaaccaacggtgccaccgcagtctttaacactggtattttccaataccaacaggctctagccaacatgcagttacaacagcatacagcatttctcccaccaggctcaatattgtgcatgacacccgctacaagtgttgttcccatggtgcacggtgctacgccagccactgtgtccgcagcaacaacatctgccacaagtgttcccttcgctgcaacagccacagccaaccagatacccataatatctgccgaacatctgactagccacaagtatgttacccagatgtagaattttcatcactaaacaatcatgctaaagaggaaaggacagtgtgcttggttagagtaaaggacgaggtcattagccatattgtatatatcgtcaagcaacacacacaaaagttcctcagccacaagacatccacatattgcatgttaaccagaagaaaagacaacattttccggaaatccactgcacactgttgcctatacactttgtacatttaattgatatttgtgctgaggtgatattcctgtctaaaagaacaacattgtctttcttttctagcacagagttatgcattcaaagatgcatacctagttagtttcctatatattcatgccatcttgaaaagacagactatggtgtaaccatgattctattatgtattggtacgtctgtagaccaagatataattttttaaaaataagtttatttctttcaaggtttacaaataacaaaggtgcaccttgtatttaaaattgccattatagatgagagcgtgcatgcacagtcatttttgtttaagagtaatatttttaatgtaatagattgtaagacgtggtgagggagggatctgacagagatgaatgtgccaagcaaaaccacaactgtgtatattttaaagcacatcatggctttaagtaccatgttgttaaggattctcatgaagtgccatagactgtacatcaaattagagtattatttcttcagtgttattgttttcagagccacattttgttgcatatttgctagtactaatcagtcaaagggcaccattctttttttttttttttgaaaccaaagctgtctcagaaatggccaatttaactttacagtaacaatagacagcacaacacaaactctctcaatacagataaactcacacatactggagatatatatataatagatatatataaaattattttaatgcattgtagtgtaatatttatgcatactatactgtataacatgttattcaaaagggattgccatttctgagacacagtaacaaaaaaatgaggaaattattttgcttctatttatagcctctgtcaaaagtcaaaagactataaatgctttgcaaaaatggtttcacgtttgcttaaatgcttcatcacagtcacattcaaaatagtgactctaaacaaagaagaaagcagcactgtcatcagatgcatgataaaccaaaatatgaaaatgggaaatgtttaattaacctagtaattgggtgggttaagtacatgggtgaattttatatgtgatttttgttttgttttgttttgttcagattaactgcttatagccttagaaagccttttacaaaattaaaaaaaaaatagatgtgcattcagtttttaagaatggaatcatccaaaggaattcctttttttgaggtttggatgttgcagctagtaaaggatatttttgctctgttcagcagttctaaaaattgctgaagtaggggccaggtcactggtagttatagtatggaatgggagaagtgaaagttcagttatagaactttccatacttccaagtttactgcaagtttttatgcttgagagagatgctttctaatataagactgatgtgttgattttactgattgtactgtacatctattaaagccttagattattacattacgggttggaacccataccaatgtaatttcaatcgtgttaagaaagtaatggtgacttcacatgttattgtagttagttacattatagaatattacttatttttcttgttaaaatgtagtttttcatttcctacatttattagattttcattttctattaacaattgaataccatttcagtttatagacttgttttattagattttaccaatgaatttttcaaaatacaaaaaaaagtagtttttccttcataacatactcagttttgaattacatgtagtgtcacatgaatattcgtattgttaactaaatgatttatattttactgatttaatattacagtgtaagaatgtcagtcattgttagttcttgtctagttttcattaaaagaacaaagatcttttatatggatatcttataaatatataatcattgctaagtaagaagttaagttgttgctatcgcaacaatcctggcagacaattgagtaatattttgatgatttattttgtttgtaattagttattataagaagatctagatcctagatattagaataaaatttattttctactgtatccatttcaaatgttaaaatattgtttaatatttttgaaatccctgagtatcaggccttgttataaataagctgcataatcaataaatagaacaagggactttttgttgataatccaaatactcaaagtttacgtaatgaaaattatagcgtgtgtgcaaactcttgagggttgattatgctgcaatttagcatgttggaacgtctagggagaaggttgactttttgcacttctgtatatagtcaaaagagagaaacctgtataatagtaagatcttattttgaataaaaacgtctataattacaaggagttttgttaaggctaatacaatgacagactgagcaaaattgcttgcaaaagtggcacagagttagcactccataccccttcaaacatgttgctttgctttcttgtggacagcttgtagtttgccaggattttttcagctggaaagatacgccatcctttcaaaccctcatgactgacaaaaactccatggggccaaatctgcctgaagatcattaccaaaaatagcaggtacttctaccattaaggtgaaatcatggatcagatattccttacatttttcaaaactactgcatgtttaaaacttcaacaaaaaaagagagaaagaactatactaagaacatatattattcagatcagtttctgccaatttcagtggtttattgttcacaaaaaaatcttcaaaacaagtattgactttcacaaaatttaaatcataaacaggcaaaccaaacagcacactgtagctatagttgttatgtgattgttttttaattgctgtaggatcctgttctttcagcaggtgaaaaataaaacgcagttcaaatttcatggttttaattttcaactcagaagcactcaaaaatgcaaaatgtgataatgggcacttgtttaaaagaattagtgtatccagccttcactccagctggttaaaaatgttgcacttatcagcaaccctaccactttcatctgctgaaaggacaaatgtgcttggttttactattatgtaatcacaacttactttctgcttgtagttgcttaaaattatgtattttgtcttgggctgcaatttgttttatgcttattttattattactgcagtagttgactttgctgtatggaaaaataaagtgaaattgccctaataaaacttctctttcttaagt

SEQ ID NO: 155965 - DNA, 5225 bp, Homo sapiens
  Payload ID: 10629
  Gene Symbol: MBNL1
  Gene Name: muscleblind-like splicing regulator 1
  Uniprot ID: Q9NR56
  ENST ID: ENST00000324196
  CDS Start-End: 790-1812
gttggtactaagaagtgcctttcctgacgtctctgctgcttggaaccgcttctagagcagtctctgcttttgccttgcttgctgccagctagactgtgacgacagcacatccaccctccacctctagcccagacacccccatttctacttataatcaagagaaaagctctaagtatctggcattgccctaggctgctttagtgttaaaagaaaagtttgctgaaaaagtaagatatcttctgccaggaaatcaaggaggaaaaaaaaaatcattttctcgattttgctctaaactgctgcatctgtctatgccaaactaatcaataccgattgcaccaccaaactccattgcaaattcagctgtgaggagattccctttcagacaactttgctgaaagcagcttggaaattcggtgtcgaagggtctgccacgttttcatgcttgcattttgggctccaaattggcactgggaaggggttactgagagcacaaggctgataccaggccctacttttaaacgttcatctacttacaatcctagtatttctctaaaaaccaaaacctctttgaattaacagtttcatgctgtgaatttctagtgggagatcttttccttgatattgacgacacaattttccatgtacttttaaagcagggagtggggaaaagtattttgaggggacattttcatcatcagttcagctttttttttttggttgttgctcttttttgggggggttgggtttgttggtttcactgaaacatttaactacctgtaaaatctaaacatggctgttagtgtcacaccaattcgggacacaaaatggctaacactggaagtatgtagagagttccagagggggacttgctcacggccagacacggaatgtaaatttgcacatccttcgaaaagctgccaagttgaaaatggacgagtaatcgcctgctttgattcattgaaaggccgttgctccagggagaactgcaaatatcttcatccacccccacatttaaaaacgcagttggagataaatggacgcaataacttgattcagcagaagaacatggccatgttggcccagcaaatgcaactagccaatgccatgatgcctggtgccccattacaacccgtgccaatgttttcagttgcaccaagcttagccaccaatgcatcagcagccgcctttaatccctatctgggacctgtttctccaagcctggtcccggcagagatcttgccgactgcaccaatgttggttacagggaatccgggtgtccctgtacctgcagctgctgcagctgctgcacagaaattaatgcgaacagacagacttgaggtatgtcgagagtaccaacgtggcaattgcaaccgaggagaaaatgattgtcggtttgctcatcctgctgacagcacaatgattgacaccaatgacaacacagtcactgtgtgtatggattacatcaaagggagatgctctcgggaaaagtgcaaatactttcatccccctgcacatttgcaagccaagatcaaggctgcccaataccaggtcaaccaggctgcagctgcacaggctgcagccaccgcagctgccatgttcccatggtgcacggtgctacgccagccactgtgtccgcagcaacaacatctgccacaagtgttcccttcgctgcaacagccacagccaaccagccccatccttgatgcttctacactgttgggtgcaacatcctgtcctgcagcagcaggaaaaatgatacccataatatctgccgaacatctgactagccacaagtatgttacccagatgtagaattttcatcactaaacaatcatgctaaagaggaaaggacagtgtgcttggttagagtaaaggacgaggtcattagccatattgtatatatcgtcaagcaacacacacaaaagttcctcagccacaagacatccacatattgcatgttaaccagaagaaaagacaacattttccggaaatccactgcacactgttgcctatacactttgtacatttaattgatatttgtgctgaggtgatattcctgtctaaaagaacaacattgtctttcttttctagcacagagttatgcattcaaagatgcatacctagttagtttcctatatattcatgccatcttgaaaagacagactatggtgtaaccatgattctattatgtattggtacgtctgtagaccaagatataattttttaaaaataagtttatttctttcaaggtttacaaataacaaaggtgcaccttgtatttaaaattgccattatagatgagagcgtgcatgcacagtcatttttgtttaagagtaatatttttaatgtaatagattgtaagacgtggtgagggagggatctgacagagatgaatgtgccaagcaaaaccacaactgtgtatattttaaagcacatcatggctttaagtaccatgttgttaaggattctcatgaagtgccatagactgtacatcaaattagagtattatttcttcagtgttattgttttcagagccacattttgttgcatatttgctagtactaatcagtcaaagggcaccattctttttttttttttttgaaaccaaagctgtctcagaaatggccaatttaactttacagtaacaatagacagcacaacacaaactctctcaatacagataaactcacacatactggagatatatatataatagatatatataaaattattttaatgcattgtagtgtaatatttatgcatactatactgtataacatgttattcaaaagggattgccatttctgagacacagtaacaaaaaaatgaggaaattattttgcttctatttatagcctctgtcaaaagtcaaaagactataaatgctttgcaaaaatggtttcacgtttgcttaaatgcttcatcacagtcacattcaaaatagtgactctaaacaaagaagaaagcagcactgtcatcagatgcatgataaaccaaaatatgaaaatgggaaatgtttaattaacctagtaattgggtgggttaagtacatgggtgaattttatatgtgatttttgttttgttttgttttgttcagattaactgcttatagccttagaaagccttttacaaaattaaaaaaaaaatagatgtgcattcagtttttaagaatggaatcatccaaaggaattcctttttttgaggtttggatgttgcagctagtaaaggatatttttgctctgttcagcagttctaaaaattgctgaagtaggggccaggtcactggtagttatagtatggaatgggagaagtgaaagttcagttatagaactttccatacttccaagtttactgcaagtttttatgcttgagagagatgctttctaatataagactgatgtgttgattttactgattgtactgtacatctattaaagccttagattattacattacgggttggaacccataccaatgtaatttcaatcgtgttaagaaagtaatggtgacttcacatgttattgtagttagttacattatagaatattacttatttttcttgttaaaatgtagtttttcatttcctacatttattagattttcattttctattaacaattgaataccatttcagtttatagacttgttttattagattttaccaatgaatttttcaaaatacaaaaaaaagtagtttttccttcataacatactcagttttgaattacatgtagtgtcacatgaatattcgtattgttaactaaatgatttatattttactgatttaatattacagtgtaagaatgtcagtcattgttagttcttgtctagttttcattaaaagaacaaagatcttttatatggatatcttataaatatataatcattgctaagtaagaagttaagttgttgctatcgcaacaatcctggcagacaattgagtaatattttgatgatttattttgtttgtaattagttattataagaagatctagatcctagatattagaataaaatttattttctactgtatccatttcaaatgttaaaatattgtttaatatttttgaaatccctgagtatcaggccttgttataaataagctgcataatcaataaatagaacaagggactttttgttgataatccaaatactcaaagtttacgtaatgaaaattatagcgtgtgtgcaaactcttgagggttgattatgctgcaatttagcatgttggaacgtctagggagaaggttgactttttgcacttctgtatatagtcaaaagagagaaacctgtataatagtaagatcttattttgaataaaaacgtctataattacaaggagttttgttaaggctaatacaatgacagactgagcaaaattgcttgcaaaagtggcacagagttagcactccataccccttcaaacatgttgctttgctttcttgtggacagcttgtagtttgccaggattttttcagctggaaagatacgccatcctttcaaaccctcatgactgacaaaaactccatggggccaaatctgcctgaagatcattaccaaaaatagcaggtacttctaccattaaggtgaaatcatggatcagatattccttacatttttcaaaactactgcatgtttaaaacttcaacaaaaaaagagagaaagaactatactaagaacatatattattcagatcagtttctgccaatttcagtggtttattgttcacaaaaaaatcttcaaaacaagtattgactttcacaaaatttaaatcataaacaggcaaaccaaacagcacactgtagctatagttgttatgtgattgttttttaattgctgtaggatcctgttctttcagcaggtgaaaaataaaacgcagttcaaatttcatggttttaattttcaactcagaagcactcaaaaatgcaaaatgtgataatgggcacttgtttaaaagaattagtgtatccagccttcactccagctggttaaaaatgttgcacttatcagcaaccctaccactttcatctgctgaaaggacaaatgtgcttggttttactattatgtaatcacaacttactttctgcttgtagttgcttaaaattatgtattttgtcttgggctgcaatttgttttatgcttattttattattactgcagtagttgactttgctgtatggaaaaataaagtgaaattgccctaataaaacttctctttcttaagt

SEQ ID NO: 155966 - DNA, 5465 bp, Homo sapiens
  Payload ID: 10629
  Gene Symbol: MBNL1
  Gene Name: muscleblind-like splicing regulator 1
  Uniprot ID: Q9NR56
  ENST ID: ENST00000324210
  CDS Start-End: 920-2068
ccacaatgctcccatgacaaggagctgacaagttccattttccgtcgcgggcatcttggaatcatgactcccacaatgccttgggcacttggtcgacagtggggccgcctctgaaaaaaaaatgtgagaggttggtactaagaagtgcctttcctgacgtctctgctgcttggaaccgcttctagagcagtctctgcttttgccttgcttgctgccagctagactgtgacgacagcacatccaccctccacctctagcccagacacccccatttctacttataatcaagagaaaagctctaagtatctggcattgccctaggctgctttagtgttaaaagaaaagtttgctgaaaaagtaagatatcttctgccaggaaatcaaggaggaaaaaaaaaatcattttctcgattttgctctaaactgctgcatctgtctatgccaaactaatcaataccgattgcaccaccaaactccattgcaaattcagctgtgaggagattccctttcagacaactttgctgaaagcagcttggaaattcggtgtcgaagggtctgccacgttttcatgcttgcattttgggctccaaattggcactgggaaggggttactgagagcacaaggctgataccaggccctacttttaaacgttcatctacttacaatcctagtatttctctaaaaaccaaaacctctttgaattaacagtttcatgctgtgaatttctagtgggagatcttttccttgatattgacgacacaattttccatgtacttttaaagcagggagtggggaaaagtattttgaggggacattttcatcatcagttcagctttttttttttggttgttgctcttttttgggggggttgggtttgttggtttcactgaaacatttaactacctgtaaaatctaaacatggctgttagtgtcacaccaattcgggacacaaaatggctaacactggaagtatgtagagagttccagagggggacttgctcacggccagacacggaatgtaaatttgcacatccttcgaaaagctgccaagttgaaaatggacgagtaatcgcctgctttgattcattgaaaggccgttgctccagggagaactgcaaatatcttcatccacccccacatttaaaaacgcagttggagataaatggacgcaataacttgattcagcagaagaacatggccatgttggcccagcaaatgcaactagccaatgccatgatgcctggtgccccattacaacccgtgccaatgttttcagttgcaccaagcttagccaccaatgcatcagcagccgcctttaatccctatctgggacctgtttctccaagcctggtcccggcagagatcttgccgactgcaccaatgttggttacagggaatccgggtgtccctgtacctgcagctgctgcagctgctgcacagaaattaatgcgaacagacagacttgaggtatgtcgagagtaccaacgtggcaattgcaaccgaggagaaaatgattgtcggtttgctcatcctgctgacagcacaatgattgacaccaatgacaacacagtcactgtgtgtatggattacatcaaagggagatgctctcgggaaaagtgcaaatactttcatccccctgcacatttgcaagccaagatcaaggctgcccaataccaggtcaaccaggctgcagctgcacaggctgcagccaccgcagctgccatgggaattcctcaagctgtacttcccccattaccaaagaggcctgctcttgaaaaaaccaacggtgccaccgcagtctttaacactggtattttccaataccaacaggctctagccaacatgcagttacaacagcatacagcatttctcccaccaggctcaatattgtgcatgacacccgctacaagtgttgttcccatggtgcacggtgctacgccagccactgtgtccgcagcaacaacatctgccacaagtgttcccttcgctgcaacagccacagccaaccagatacccataatatctgccgaacatctgactagccacaagtatgttacccagatgtagaattttcatcactaaacaatcatgctaaagaggaaaggacagtgtgcttggttagagtaaaggacgaggtcattagccatattgtatatatcgtcaagcaacacacacaaaagttcctcagccacaagacatccacatattgcatgttaaccagaagaaaagacaacattttccggaaatccactgcacactgttgcctatacactttgtacatttaattgatatttgtgctgaggtgatattcctgtctaaaagaacaacattgtctttcttttctagcacagagttatgcattcaaagatgcatacctagttagtttcctatatattcatgccatcttgaaaagacagactatggtgtaaccatgattctattatgtattggtacgtctgtagaccaagatataattttttaaaaataagtttatttctttcaaggtttacaaataacaaaggtgcaccttgtatttaaaattgccattatagatgagagcgtgcatgcacagtcatttttgtttaagagtaatatttttaatgtaatagattgtaagacgtggtgagggagggatctgacagagatgaatgtgccaagcaaaaccacaactgtgtatattttaaagcacatcatggctttaagtaccatgttgttaaggattctcatgaagtgccatagactgtacatcaaattagagtattatttcttcagtgttattgttttcagagccacattttgttgcatatttgctagtactaatcagtcaaagggcaccattctttttttttttttttgaaaccaaagctgtctcagaaatggccaatttaactttacagtaacaatagacagcacaacacaaactctctcaatacagataaactcacacatactggagatatatatataatagatatatataaaattattttaatgcattgtagtgtaatatttatgcatactatactgtataacatgttattcaaaagggattgccatttctgagacacagtaacaaaaaaatgaggaaattattttgcttctatttatagcctctgtcaaaagtcaaaagactataaatgctttgcaaaaatggtttcacgtttgcttaaatgcttcatcacagtcacattcaaaatagtgactctaaacaaagaagaaagcagcactgtcatcagatgcatgataaaccaaaatatgaaaatgggaaatgtttaattaacctagtaattgggtgggttaagtacatgggtgaattttatatgtgatttttgttttgttttgttttgttcagattaactgcttatagccttagaaagccttttacaaaattaaaaaaaaaatagatgtgcattcagtttttaagaatggaatcatccaaaggaattcctttttttgaggtttggatgttgcagctagtaaaggatatttttgctctgttcagcagttctaaaaattgctgaagtaggggccaggtcactggtagttatagtatggaatgggagaagtgaaagttcagttatagaactttccatacttccaagtttactgcaagtttttatgcttgagagagatgctttctaatataagactgatgtgttgattttactgattgtactgtacatctattaaagccttagattattacattacgggttggaacccataccaatgtaatttcaatcgtgttaagaaagtaatggtgacttcacatgttattgtagttagttacattatagaatattacttatttttcttgttaaaatgtagtttttcatttcctacatttattagattttcattttctattaacaattgaataccatttcagtttatagacttgttttattagattttaccaatgaatttttcaaaatacaaaaaaaagtagtttttccttcataacatactcagttttgaattacatgtagtgtcacatgaatattcgtattgttaactaaatgatttatattttactgatttaatattacagtgtaagaatgtcagtcattgttagttcttgtctagttttcattaaaagaacaaagatcttttatatggatatcttataaatatataatcattgctaagtaagaagttaagttgttgctatcgcaacaatcctggcagacaattgagtaatattttgatgatttattttgtttgtaattagttattataagaagatctagatcctagatattagaataaaatttattttctactgtatccatttcaaatgttaaaatattgtttaatatttttgaaatccctgagtatcaggccttgttataaataagctgcataatcaataaatagaacaagggactttttgttgataatccaaatactcaaagtttacgtaatgaaaattatagcgtgtgtgcaaactcttgagggttgattatgctgcaatttagcatgttggaacgtctagggagaaggttgactttttgcacttctgtatatagtcaaaagagagaaacctgtataatagtaagatcttattttgaataaaaacgtctataattacaaggagttttgttaaggctaatacaatgacagactgagcaaaattgcttgcaaaagtggcacagagttagcactccataccccttcaaacatgttgctttgctttcttgtggacagcttgtagtttgccaggattttttcagctggaaagatacgccatcctttcaaaccctcatgactgacaaaaactccatggggccaaatctgcctgaagatcattaccaaaaatagcaggtacttctaccattaaggtgaaatcatggatcagatattccttacatttttcaaaactactgcatgtttaaaacttcaacaaaaaaagagagaaagaactatactaagaacatatattattcagatcagtttctgccaatttcagtggtttattgttcacaaaaaaatcttcaaaacaagtattgactttcacaaaatttaaatcataaacaggcaaaccaaacagcacactgtagctatagttgttatgtgattgttttttaattgctgtaggatcctgttctttcagcaggtgaaaaataaaacgcagttcaaatttcatggttttaattttcaactcagaagcactcaaaaatgcaaaatgtgataatgggcacttgtttaaaagaattagtgtatccagccttcactccagctggttaaaaatgttgcacttatcagcaaccctaccactttcatctgctgaaaggacaaatgtgcttggttttactattatgtaatcacaacttactttctgcttgtagttgcttaaaattatgtattttgtcttgggctgcaatttgttttatgcttattttattattactgcagtagttgactttgctgtatggaaaaataaagtgaaattgccctaataaaa

SEQ ID NO: 155967 - DNA, 5941 bp, Homo sapiens
  Payload ID: 10629
  Gene Symbol: MBNL1
  Gene Name: muscleblind-like splicing regulator 1
  Uniprot ID: Q9NR56
  ENST ID: ENST00000355460
  CDS Start-End: 1415-2527
cttgccggcttccttgcaaagcccggtgcaagggcctctttcaaaatgaacccactggtgtgcctagcagtcggtagaagaagcgggagggcgtccggtctgcacgcccgccgcgaggttacaatgctgaacgcatgagatggaagataccaacgggaggccgaggggatccacggcgcccgcgcgggctccggcttcctcctgctctcggcgccgctgggcgaccgcccatgacccgctcttgcgggctctgtccggttgacaggcgaccctgtggcccggggaagcgcgggagggcgccggcggaaagttgaagagcgtttttctcgccgccgcgtgcattaggagctcgacgagtccgccctgggcttcctggtggggctgggcgggcgggggaggggccgcgcagcagcagcggaagccagacctcggcgataagaggctgcacagcgacatgcaacagtcttttcactgcagctgaatgagttgtggcgcccacaatgctcccatgacaaggagctgacaagttccattttccgtcgcgggcatcttggaatcatgactcccacaatgccttgggcacttggtcgacagtggggccgcctctgaaaaaaaaatgtgagaggttggtactaagaagtgcctttcctgacgtctctgctgcttggaaccgcttctagagcagtctctgcttttgccttgcttgctgccagctagactgtgacgacagcacatccaccctccacctctagcccagacacccccatttctacttataatcaagagaaaagctctaagtatctggcattgccctaggctgctttagtgttaaaagaaaagtttgctgaaaaagtaagatatcttctgccaggaaatcaaggaggaaaaaaaaaatcattttctcgattttgctctaaactgctgcatctgtctatgccaaactaatcaataccgattgcaccaccaaactccattgcaaattcagctgtgaggagattccctttcagacaactttgctgaaagcagcttggaaattcggtgtcgaagggtctgccacgttttcatgcttgcattttgggctccaaattggcactgggaaggggttactgagagcacaaggctgataccaggccctacttttaaacgttcatctacttacaatcctagtatttctctaaaaaccaaaacctctttgaattaacagtttcatgctgtgaatttctagtgggagatcttttccttgatattgacgacacaattttccatgtacttttaaagcagggagtggggaaaagtattttgaggggacattttcatcatcagttcagctttttttttttggttgttgctcttttttgggggggttgggtttgttggtttcactgaaacatttaactacctgtaaaatctaaacatggctgttagtgtcacaccaattcgggacacaaaatggctaacactggaagtatgtagagagttccagagggggacttgctcacggccagacacggaatgtaaatttgcacatccttcgaaaagctgccaagttgaaaatggacgagtaatcgcctgctttgattcattgaaaggccgttgctccagggagaactgcaaatatcttcatccacccccacatttaaaaacgcagttggagataaatggacgcaataacttgattcagcagaagaacatggccatgttggcccagcaaatgcaactagccaatgccatgatgcctggtgccccattacaacccgtgccaatgttttcagttgcaccaagcttagccaccaatgcatcagcagccgcctttaatccctatctgggacctgtttctccaagcctggtcccggcagagatcttgccgactgcaccaatgttggttacagggaatccgggtgtccctgtacctgcagctgctgcagctgctgcacagaaattaatgcgaacagacagacttgaggtatgtcgagagtaccaacgtggcaattgcaaccgaggagaaaatgattgtcggtttgctcatcctgctgacagcacaatgattgacaccaatgacaacacagtcactgtgtgtatggattacatcaaagggagatgctctcgggaaaagtgcaaatactttcatccccctgcacatttgcaagccaagatcaaggctgcccaataccaggtcaaccaggctgcagctgcacaggctgcagccaccgcagctgccatgggaattcctcaagctgtacttcccccattaccaaagaggcctgctcttgaaaaaaccaacggtgccaccgcagtctttaacactggtattttccaataccaacaggctctagccaacatgcagttacaacagcatacagcatttctcccaccagttcccatggtgcacggtgctacgccagccactgtgtccgcagcaacaacatctgccacaagtgttcccttcgctgcaacagccacagccaaccagatacccataatatctgccgaacatctgactagccacaagtatgttacccagatgtagaattttcatcactaaacaatcatgctaaagaggaaaggacagtgtgcttggttagagtaaaggacgaggtcattagccatattgtatatatcgtcaagcaacacacacaaaagttcctcagccacaagacatccacatattgcatgttaaccagaagaaaagacaacattttccggaaatccactgcacactgttgcctatacactttgtacatttaattgatatttgtgctgaggtgatattcctgtctaaaagaacaacattgtctttcttttctagcacagagttatgcattcaaagatgcatacctagttagtttcctatatattcatgccatcttgaaaagacagactatggtgtaaccatgattctattatgtattggtacgtctgtagaccaagatataattttttaaaaataagtttatttctttcaaggtttacaaataacaaaggtgcaccttgtatttaaaattgccattatagatgagagcgtgcatgcacagtcatttttgtttaagagtaatatttttaatgtaatagattgtaagacgtggtgagggagggatctgacagagatgaatgtgccaagcaaaaccacaactgtgtatattttaaagcacatcatggctttaagtaccatgttgttaaggattctcatgaagtgccatagactgtacatcaaattagagtattatttcttcagtgttattgttttcagagccacattttgttgcatatttgctagtactaatcagtcaaagggcaccattctttttttttttttttgaaaccaaagctgtctcagaaatggccaatttaactttacagtaacaatagacagcacaacacaaactctctcaatacagataaactcacacatactggagatatatatataatagatatatataaaattattttaatgcattgtagtgtaatatttatgcatactatactgtataacatgttattcaaaagggattgccatttctgagacacagtaacaaaaaaatgaggaaattattttgcttctatttatagcctctgtcaaaagtcaaaagactataaatgctttgcaaaaatggtttcacgtttgcttaaatgcttcatcacagtcacattcaaaatagtgactctaaacaaagaagaaagcagcactgtcatcagatgcatgataaaccaaaatatgaaaatgggaaatgtttaattaacctagtaattgggtgggttaagtacatgggtgaattttatatgtgatttttgttttgttttgttttgttcagattaactgcttatagccttagaaagccttttacaaaattaaaaaaaaaatagatgtgcattcagtttttaagaatggaatcatccaaaggaattcctttttttgaggtttggatgttgcagctagtaaaggatatttttgctctgttcagcagttctaaaaattgctgaagtaggggccaggtcactggtagttatagtatggaatgggagaagtgaaagttcagttatagaactttccatacttccaagtttactgcaagtttttatgcttgagagagatgctttctaatataagactgatgtgttgattttactgattgtactgtacatctattaaagccttagattattacattacgggttggaacccataccaatgtaatttcaatcgtgttaagaaagtaatggtgacttcacatgttattgtagttagttacattatagaatattacttatttttcttgttaaaatgtagtttttcatttcctacatttattagattttcattttctattaacaattgaataccatttcagtttatagacttgttttattagattttaccaatgaatttttcaaaatacaaaaaaaagtagtttttccttcataacatactcagttttgaattacatgtagtgtcacatgaatattcgtattgttaactaaatgatttatattttactgatttaatattacagtgtaagaatgtcagtcattgttagttcttgtctagttttcattaaaagaacaaagatcttttatatggatatcttataaatatataatcattgctaagtaagaagttaagttgttgctatcgcaacaatcctggcagacaattgagtaatattttgatgatttattttgtttgtaattagttattataagaagatctagatcctagatattagaataaaatttattttctactgtatccatttcaaatgttaaaatattgtttaatatttttgaaatccctgagtatcaggccttgttataaataagctgcataatcaataaatagaacaagggactttttgttgataatccaaatactcaaagtttacgtaatgaaaattatagcgtgtgtgcaaactcttgagggttgattatgctgcaatttagcatgttggaacgtctagggagaaggttgactttttgcacttctgtatatagtcaaaagagagaaacctgtataatagtaagatcttattttgaataaaaacgtctataattacaaggagttttgttaaggctaatacaatgacagactgagcaaaattgcttgcaaaagtggcacagagttagcactccataccccttcaaacatgttgctttgctttcttgtggacagcttgtagtttgccaggattttttcagctggaaagatacgccatcctttcaaaccctcatgactgacaaaaactccatggggccaaatctgcctgaagatcattaccaaaaatagcaggtacttctaccattaaggtgaaatcatggatcagatattccttacatttttcaaaactactgcatgtttaaaacttcaacaaaaaaagagagaaagaactatactaagaacatatattattcagatcagtttctgccaatttcagtggtttattgttcacaaaaaaatcttcaaaacaagtattgactttcacaaaatttaaatcataaacaggcaaaccaaacagcacactgtagctatagttgttatgtgattgttttttaattgctgtaggatcctgttctttcagcaggtgaaaaataaaacgcagttcaaatttcatggttttaattttcaactcagaagcactcaaaaatgcaaaatgtgataatgggcacttgtttaaaagaattagtgtatccagccttcactccagctggttaaaaatgttgcacttatcagcaaccctaccactttcatctgctgaaaggacaaatgtgcttggttttactattatgtaatcacaacttactttctgcttgtagttgcttaaaattatgtattttgtcttgggctgcaatttgttttatgcttattttattattactgcagtagttgactttgctgtatggaaaaataaagtgaaattgccctaataaaacttctctttcttaagta

SEQ ID NO: 155968 - DNA, 5256 bp, Homo sapiens
  Payload ID: 10629
  Gene Symbol: MBNL1
  Gene Name: muscleblind-like splicing regulator 1
  Uniprot ID: Q9NR56
  ENST ID: ENST00000357472
  CDS Start-End: 790-1818
gttggtactaagaagtgcctttcctgacgtctctgctgcttggaaccgcttctagagcagtctctgcttttgccttgcttgctgccagctagactgtgacgacagcacatccaccctccacctctagcccagacacccccatttctacttataatcaagagaaaagctctaagtatctggcattgccctaggctgctttagtgttaaaagaaaagtttgctgaaaaagtaagatatcttctgccaggaaatcaaggaggaaaaaaaaaatcattttctcgattttgctctaaactgctgcatctgtctatgccaaactaatcaataccgattgcaccaccaaactccattgcaaattcagctgtgaggagattccctttcagacaactttgctgaaagcagcttggaaattcggtgtcgaagggtctgccacgttttcatgcttgcattttgggctccaaattggcactgggaaggggttactgagagcacaaggctgataccaggccctacttttaaacgttcatctacttacaatcctagtatttctctaaaaaccaaaacctctttgaattaacagtttcatgctgtgaatttctagtgggagatcttttccttgatattgacgacacaattttccatgtacttttaaagcagggagtggggaaaagtattttgaggggacattttcatcatcagttcagctttttttttttggttgttgctcttttttgggggggttgggtttgttggtttcactgaaacatttaactacctgtaaaatctaaacatggctgttagtgtcacaccaattcgggacacaaaatggctaacactggaagtatgtagagagttccagagggggacttgctcacggccagacacggaatgtaaatttgcacatccttcgaaaagctgccaagttgaaaatggacgagtaatcgcctgctttgattcattgaaaggccgttgctccagggagaactgcaaatatcttcatccacccccacatttaaaaacgcagttggagataaatggacgcaataacttgattcagcagaagaacatggccatgttggcccagcaaatgcaactagccaatgccatgatgcctggtgccccattacaacccgtgccaatgttttcagttgcaccaagcttagccaccaatgcatcagcagccgcctttaatccctatctgggacctgtttctccaagcctggtcccggcagagatcttgccgactgcaccaatgttggttacagggaatccgggtgtccctgtacctgcagctgctgcagctgctgcacagaaattaatgcgaacagacagacttgaggtatgtcgagagtaccaacgtggcaattgcaaccgaggagaaaatgattgtcggtttgctcatcctgctgacagcacaatgattgacaccaatgacaacacagtcactgtgtgtatggattacatcaaagggagatgctctcgggaaaagtgcaaatactttcatccccctgcacatttgcaagccaagatcaaggctgcccaataccaggtcaaccaggctgcagctgcacaggctgcagccaccgcagctgccatgggaattcctcaagctgtacttcccccattaccaaagaggcctgctcttgaaaaaaccaacggtgccaccgcagtctttaacactggtattttccaataccaacaggctctagccaacatgcagttacaacagcatacagcatttctcccaccaggctcaatattgtgcatgacacccgctacaagtgttgatacccataatatctgccgaacatctgactagccacaagtatgttacccagatgtagaattttcatcactaaacaatcatgctaaagaggaaaggacagtgtgcttggttagagtaaaggacgaggtcattagccatattgtatatatcgtcaagcaacacacacaaaagttcctcagccacaagacatccacatattgcatgttaaccagaagaaaagacaacattttccggaaatccactgcacactgttgcctatacactttgtacatttaattgatatttgtgctgaggtgatattcctgtctaaaagaacaacattgtctttcttttctagcacagagttatgcattcaaagatgcatacctagttagtttcctatatattcatgccatcttgaaaagacagactatggtgtaaccatgattctattatgtattggtacgtctgtagaccaagatataattttttaaaaataagtttatttctttcaaggtttacaaataacaaaggtgcaccttgtatttaaaattgccattatagatgagagcgtgcatgcacagtcatttttgtttaagagtaatatttttaatgtaatagattgtaagacgtggtgagggagggatctgacagagatgaatgtgccaagcaaaaccacaactgtgtatattttaaagcacatcatggctttaagtaccatgttgttaaggattctcatgaagtgccatagactgtacatcaaattagagtattatttcttcagtgttattgttttcagagccacattttgttgcatatttgctagtactaatcagtcaaagggcaccattctttttttttttttttgaaaccaaagctgtctcagaaatggccaatttaactttacagtaacaatagacagcacaacacaaactctctcaatacagataaactcacacatactggagatatatatataatagatatatataaaattattttaatgcattgtagtgtaatatttatgcatactatactgtataacatgttattcaaaagggattgccatttctgagacacagtaacaaaaaaatgaggaaattattttgcttctatttatagcctctgtcaaaagtcaaaagactataaatgctttgcaaaaatggtttcacgtttgcttaaatgcttcatcacagtcacattcaaaatagtgactctaaacaaagaagaaagcagcactgtcatcagatgcatgataaaccaaaatatgaaaatgggaaatgtttaattaacctagtaattgggtgggttaagtacatgggtgaattttatatgtgatttttgttttgttttgttttgttcagattaactgcttatagccttagaaagccttttacaaaattaaaaaaaaaatagatgtgcattcagtttttaagaatggaatcatccaaaggaattcctttttttgaggtttggatgttgcagctagtaaaggatatttttgctctgttcagcagttctaaaaattgctgaagtaggggccaggtcactggtagttatagtatggaatgggagaagtgaaagttcagttatagaactttccatacttccaagtttactgcaagtttttatgcttgagagagatgctttctaatataagactgatgtgttgattttactgattgtactgtacatctattaaagccttagattattacattacgggttggaacccataccaatgtaatttcaatcgtgttaagaaagtaatggtgacttcacatgttattgtagttagttacattatagaatattacttatttttcttgttaaaatgtagtttttcatttcctacatttattagattttcattttctattaacaattgaataccatttcagtttatagacttgttttattagattttaccaatgaatttttcaaaatacaaaaaaaagtagtttttccttcataacatactcagttttgaattacatgtagtgtcacatgaatattcgtattgttaactaaatgatttatattttactgatttaatattacagtgtaagaatgtcagtcattgttagttcttgtctagttttcattaaaagaacaaagatcttttatatggatatcttataaatatataatcattgctaagtaagaagttaagttgttgctatcgcaacaatcctggcagacaattgagtaatattttgatgatttattttgtttgtaattagttattataagaagatctagatcctagatattagaataaaatttattttctactgtatccatttcaaatgttaaaatattgtttaatatttttgaaatccctgagtatcaggccttgttataaataagctgcataatcaataaatagaacaagggactttttgttgataatccaaatactcaaagtttacgtaatgaaaattatagcgtgtgtgcaaactcttgagggttgattatgctgcaatttagcatgttggaacgtctagggagaaggttgactttttgcacttctgtatatagtcaaaagagagaaacctgtataatagtaagatcttattttgaataaaaacgtctataattacaaggagttttgttaaggctaatacaatgacagactgagcaaaattgcttgcaaaagtggcacagagttagcactccataccccttcaaacatgttgctttgctttcttgtggacagcttgtagtttgccaggattttttcagctggaaagatacgccatcctttcaaaccctcatgactgacaaaaactccatggggccaaatctgcctgaagatcattaccaaaaatagcaggtacttctaccattaaggtgaaatcatggatcagatattccttacatttttcaaaactactgcatgtttaaaacttcaacaaaaaaagagagaaagaactatactaagaacatatattattcagatcagtttctgccaatttcagtggtttattgttcacaaaaaaatcttcaaaacaagtattgactttcacaaaatttaaatcataaacaggcaaaccaaacagcacactgtagctatagttgttatgtgattgttttttaattgctgtaggatcctgttctttcagcaggtgaaaaataaaacgcagttcaaatttcatggttttaattttcaactcagaagcactcaaaaatgcaaaatgtgataatgggcacttgtttaaaagaattagtgtatccagccttcactccagctggttaaaaatgttgcacttatcagcaaccctaccactttcatctgctgaaaggacaaatgtgcttggttttactattatgtaatcacaacttactttctgcttgtagttgcttaaaattatgtattttgtcttgggctgcaatttgttttatgcttattttattattactgcagtagttgactttgctgtatggaaaaataaagtgaaattgccctaataaaacttctctttcttaagt

SEQ ID NO: 155969 - DNA, 594 bp, Homo sapiens
  Payload ID: 10629
  Gene Symbol: MBNL1
  Gene Name: muscleblind-like splicing regulator 1
  ENST ID: ENST00000459747
  CDS Start-End: 420-594
attttcacagtttccccgcgccgcttcattgttcggactccggcgggtctgcccgtggctgaaggaggaagtgcgaggaggtgctcgccggccgcggttctcccgggcaggggcgggccgctcgcggtagttggtttcgcgtccctcagcacctcctgcccgggggaaggcgggagggtgagccgcagccgctcctgcgcccttccctgccgcgggctctgcggacgctgtcacggcacagcccgcgcacggcttggcagcccagcgggacccagggagaaacaggggggcgagaagagaaacagcagtcactcaggaaatgttgtttaaggggaaccttctggatccttttcatggcaccatggcaagaagaagctgtatcttatctatggaagataaagcatggagttggctaatggatgctgggccgttgctccagggagaactgcaaatatcttcatccacccccacatttaaaaacgcagttggagataaatggacgcaataacttgattcagcagaagaacatggccatgttggcccagcaaatgcaactagccaatgccatgatgcctggtgccccattacaacccg

SEQ ID NO: 155970 - DNA, 945 bp, Homo sapiens
  Payload ID: 10629
  Gene Symbol: MBNL1
  Gene Name: muscleblind-like splicing regulator 1
  Uniprot ID: Q9NR56
  ENST ID: ENST00000465907
  CDS Start-End: 1-945
atggctgttagtgtcacaccaattcgggacacaaaatggctaacactggaagtatgtagagagttccagagggggacttgctcacggccagacacggaatgtaaatttgcacatccttcgaaaagctgccaagttgaaaatggacgagtaatcgcctgctttgattcattgaaaggccgttgctccagggagaactgcaaatatcttcatccacccccacatttaaaaacgcagttggagataaatggacgcaataacttgattcagcagaagaacatggccatgttggcccagcaaatgcaactagccaatgccatgatgcctggtgccccattacaacccgtggtatgtcgagagtaccaacgtggcaattgcaaccgaggagaaaatgattgtcggtttgctcatcctgctgacagcacaatgattgacaccaatgacaacacagtcactgtgtgtatggattacatcaaagggagatgctctcgggaaaagtgcaaatactttcatccccctgcacatttgcaagccaagatcaaggctgcccaataccaggtcaaccaggctgcagctgcacaggctgcagccaccgcagctgccatgggaattcctcaagctgtacttcccccattaccaaagaggcctgctcttgaaaaaaccaacggtgccaccgcagtctttaacactggtattttccaataccaacaggctctagccaacatgcagttacaacagcatacagcatttctcccaccaggctcaatattgtgcatgacacccgctacaagtgttgttcccatggtgcacggtgctacgccagccactgtgtccgcagcaacaacatctgccacaagtgttcccttcgctgcaacagccacagccaaccagatacccataatatctgccgaacatctgactagccacaagtatgttacccagatgtag

SEQ ID NO: 155971 - DNA, 545 bp, Homo sapiens
  Payload ID: 10629
  Gene Symbol: MBNL1
  Gene Name: muscleblind-like splicing regulator 1
  ENST ID: ENST00000495875
  CDS Start-End: 276-545
acatgcaacagtcttttcactgcagctgaatgagttgtggcgcccacaatgctcccatgacaaggagctgacaagttccattttccgtcgcgggcatcttggaatcatgactcccacaatgccttgggcacttggtcgacagtggggccgcctctgaaaaaaaaatgtgagagggccgttgctccagggagaactgcaaatatcttcatccacccccacatttaaaaacgcagttggagataaatggacgcaataacttgattcagcagaagaacatggccatgttggcccagcaaatgcaactagccaatgccatgatgcctggtgccccattacaacccgtgccaatgttttcagttgcaccaagcttagccaccaatgcatcagcagccgcctttaatccctatctgggacctgtttctccaagcctggtcccggcagagatcttgccgactgcaccaatgttggttacagggaatccgggtgtccctgtacctgcagctgctgcagctgctgcacagaaattaatgcgaacagacagactt

SEQ ID NO: 155972 - DNA, 5092 bp, Homo sapiens
  Payload ID: 10629
  Gene Symbol: MBNL1
  Gene Name: muscleblind-like splicing regulator 1
  Uniprot ID: Q9NR56
  ENST ID: ENST00000463374
  CDS Start-End: 512-1678
cgattttgctctaaactgctgcatctgtctatgccaaactaatcaataccgattgcaccaccaaactccattgcaaattcagctgtgaggagattccctttcagacaactttgctgaaagcagcttggaaattcggtgtcgaagggtctgccacgttttcatgcttgcattttgggctccaaattggcactgggaaggggttactgagagcacaaggctgataccaggccctacttttaaacgttcatctacttacaatcctagtatttctctaaaaaccaaaacctctttgaattaacagtttcatgctgtgaatttctagtgggagatcttttccttgatattgacgacacaattttccatgtacttttaaagcagggagtggggaaaagtattttgaggggacattttcatcatcagttcagctttttttttttggttgttgctcttttttgggggggttgggtttgttggtttcactgaaacatttaactacctgtaaaatctaaacatggctgttagtgtcacaccaattcgggacacaaaatggctaacactggaagtatgtagagagttccagagggggacttgctcacggccagacacggaatgtaaatttgcacatccttcgaaaagctgccaagttgaaaatggacgagtaatcgcctgctttgattcattgaaaggccgttgctccagggagaactgcaaatatcttcatccacccccacatttaaaaacgcagttggagataaatggacgcaataacttgattcagcagaagaacatggccatgttggcccagcaaatgcaactagccaatgccatgatgcctggtgccccattacaacccgtgccaatgttttcagttgcaccaagcttagccaccaatgcatcagcagccgcctttaatccctatctgggacctgtttctccaagcctggtcccggcagagatcttgccgactgcaccaatgttggttacagggaatccgggtgtccctgtacctgcagctgctgcagctgctgcacagaaattaatgcgaacagacagacttgaggtatgtcgagagtaccaacgtggcaattgcaaccgaggagaaaatgattgtcggtttgctcatcctgctgacagcacaatgattgacaccaatgacaacacagtcactgtgtgtatggattacatcaaagggagatgctctcgggaaaagtgcaaatactttcatccccctgcacatttgcaagccaagatcaaggctgcccaataccaggtcaaccaggctgcagctgcacaggctgcagccaccgcagctgccatgactcagtcggctgtcaaatcactgaagcgacccctcgaggcaacctttgacctgggaattcctcaagctgtacttcccccattaccaaagaggcctgctcttgaaaaaaccaacggtgccaccgcagtctttaacactggtattttccaataccaacaggctctagccaacatgcagttacaacagcatacagcatttctcccaccagttcccatggtgcacggtgctacgccagccactgtgtccgcagcaacaacatctgccacaagtgttcccttcgctgcaacagccacagccaaccagatacccataatatctgccgaacatctgactagccacaagtatgttacccagatgtagaattttcatcactaaacaatcatgctaaagaggaaaggacagtgtgcttggttagagtaaaggacgaggtcattagccatattgtatatatcgtcaagcaacacacacaaaagttcctcagccacaagacatccacatattgcatgttaaccagaagaaaagacaacattttccggaaatccactgcacactgttgcctatacactttgtacatttaattgatatttgtgctgaggtgatattcctgtctaaaagaacaacattgtctttcttttctagcacagagttatgcattcaaagatgcatacctagttagtttcctatatattcatgccatcttgaaaagacagactatggtgtaaccatgattctattatgtattggtacgtctgtagaccaagatataattttttaaaaataagtttatttctttcaaggtttacaaataacaaaggtgcaccttgtatttaaaattgccattatagatgagagcgtgcatgcacagtcatttttgtttaagagtaatatttttaatgtaatagattgtaagacgtggtgagggagggatctgacagagatgaatgtgccaagcaaaaccacaactgtgtatattttaaagcacatcatggctttaagtaccatgttgttaaggattctcatgaagtgccatagactgtacatcaaattagagtattatttcttcagtgttattgttttcagagccacattttgttgcatatttgctagtactaatcagtcaaagggcaccattctttttttttttttttgaaaccaaagctgtctcagaaatggccaatttaactttacagtaacaatagacagcacaacacaaactctctcaatacagataaactcacacatactggagatatatatataatagatatatataaaattattttaatgcattgtagtgtaatatttatgcatactatactgtataacatgttattcaaaagggattgccatttctgagacacagtaacaaaaaaatgaggaaattattttgcttctatttatagcctctgtcaaaagtcaaaagactataaatgctttgcaaaaatggtttcacgtttgcttaaatgcttcatcacagtcacattcaaaatagtgactctaaacaaagaagaaagcagcactgtcatcagatgcatgataaaccaaaatatgaaaatgggaaatgtttaattaacctagtaattgggtgggttaagtacatgggtgaattttatatgtgatttttgttttgttttgttttgttcagattaactgcttatagccttagaaagccttttacaaaattaaaaaaaaaatagatgtgcattcagtttttaagaatggaatcatccaaaggaattcctttttttgaggtttggatgttgcagctagtaaaggatatttttgctctgttcagcagttctaaaaattgctgaagtaggggccaggtcactggtagttatagtatggaatgggagaagtgaaagttcagttatagaactttccatacttccaagtttactgcaagtttttatgcttgagagagatgctttctaatataagactgatgtgttgattttactgattgtactgtacatctattaaagccttagattattacattacgggttggaacccataccaatgtaatttcaatcgtgttaagaaagtaatggtgacttcacatgttattgtagttagttacattatagaatattacttatttttcttgttaaaatgtagtttttcatttcctacatttattagattttcattttctattaacaattgaataccatttcagtttatagacttgttttattagattttaccaatgaatttttcaaaatacaaaaaaaagtagtttttccttcataacatactcagttttgaattacatgtagtgtcacatgaatattcgtattgttaactaaatgatttatattttactgatttaatattacagtgtaagaatgtcagtcattgttagttcttgtctagttttcattaaaagaacaaagatcttttatatggatatcttataaatatataatcattgctaagtaagaagttaagttgttgctatcgcaacaatcctggcagacaattgagtaatattttgatgatttattttgtttgtaattagttattataagaagatctagatcctagatattagaataaaatttattttctactgtatccatttcaaatgttaaaatattgtttaatatttttgaaatccctgagtatcaggccttgttataaataagctgcataatcaataaatagaacaagggactttttgttgataatccaaatactcaaagtttacgtaatgaaaattatagcgtgtgtgcaaactcttgagggttgattatgctgcaatttagcatgttggaacgtctagggagaaggttgactttttgcacttctgtatatagtcaaaagagagaaacctgtataatagtaagatcttattttgaataaaaacgtctataattacaaggagttttgttaaggctaatacaatgacagactgagcaaaattgcttgcaaaagtggcacagagttagcactccataccccttcaaacatgttgctttgctttcttgtggacagcttgtagtttgccaggattttttcagctggaaagatacgccatcctttcaaaccctcatgactgacaaaaactccatggggccaaatctgcctgaagatcattaccaaaaatagcaggtacttctaccattaaggtgaaatcatggatcagatattccttacatttttcaaaactactgcatgtttaaaacttcaacaaaaaaagagagaaagaactatactaagaacatatattattcagatcagtttctgccaatttcagtggtttattgttcacaaaaaaatcttcaaaacaagtattgactttcacaaaatttaaatcataaacaggcaaaccaaacagcacactgtagctatagttgttatgtgattgttttttaattgctgtaggatcctgttctttcagcaggtgaaaaataaaacgcagttcaaatttcatggttttaattttcaactcagaagcactcaaaaatgcaaaatgtgataatgggcacttgtttaaaagaattagtgtatccagccttcactccagctggttaaaaatgttgcacttatcagcaaccctaccactttcatctgctgaaaggacaaatgtgcttggttttactattatgtaatcacaacttactttctgcttgtagttgcttaaaattatgtattttgtcttgggctgcaatttgttttatgcttattttattattactgcagtagttgactttgctgtatggaaaaataaagtgaaattgccctaataaaacttctctttcttaagta

SEQ ID NO: 155973 - DNA, 989 bp, Homo sapiens
  Payload ID: 10629
  Gene Symbol: MBNL1
  Gene Name: muscleblind-like splicing regulator 1
  ENST ID: ENST00000464596
  CDS Start-End: 1-989
ctgttagtgtcacaccaattcgggacacaaaatggctaacactggaagtatgtagagagttccagagggggacttgctcacggccagacacggaatgtaaatttgcacatccttcgaaaagctgccaagttgaaaatggacgagtaatcgcctgctttgattcattgaaaggccgttgctccagggagaactgcaaatatcttcatccacccccacatttaaaaacgcagttggagataaatggacgcaataacttgattcagcagaagaacatggccatgttggcccagcaaatgcaactagccaatgccatgatgcctggtgccccattacaacccgtgccaatgttttcagttgcaccaagcttagccaccaatgcatcagcagccgcctttaatccctatctgggacctgtttctccaagcctggtcccggcagagatcttgccgactgcaccaatgttggttacagggaatccgggtgtccctgtacctgcagctgctgcagctgctgcacagaaattaatgcgaacagacagacttgaggtatgtcgagagtaccaacgtggcaattgcaaccgaggagaaaatgattgtcggtttgctcatcctgctgacagcacaatgattgacaccaatgacaacacagtcactgtgtgtatggattacatcaaagggagatgctctcgggaaaagtgcaaatactttcatccccctgcacatttgcaagccaagatcaaggctgcccaataccaggtcaaccaggctgcagctgcacaggctgcagccaccgcagctgccatgggaattcctcaagctgtacttcccccattaccaaagaggcctgctcttgaaaaaaccaacggtgccaccgcagtctttaacactggtattttccaataccaacaggctctagccaacatgcagttacaacagcatacagcatttctcccaccagatacccataatatctgccgaacatctgactag

SEQ ID NO: 155974 - DNA, 4257 bp, Homo sapiens
  Payload ID: 10629
  Gene Symbol: MBNL1
  Gene Name: muscleblind-like splicing regulator 1
  Uniprot ID: Q9NR56
  ENST ID: ENST00000485910
  CDS Start-End: 512-1420
cgattttgctctaaactgctgcatctgtctatgccaaactaatcaataccgattgcaccaccaaactccattgcaaattcagctgtgaggagattccctttcagacaactttgctgaaagcagcttggaaattcggtgtcgaagggtctgccacgttttcatgcttgcattttgggctccaaattggcactgggaaggggttactgagagcacaaggctgataccaggccctacttttaaacgttcatctacttacaatcctagtatttctctaaaaaccaaaacctctttgaattaacagtttcatgctgtgaatttctagtgggagatcttttccttgatattgacgacacaattttccatgtacttttaaagcagggagtggggaaaagtattttgaggggacattttcatcatcagttcagctttttttttttggttgttgctcttttttgggggggttgggtttgttggtttcactgaaacatttaactacctgtaaaatctaaacatggctgttagtgtcacaccaattcgggacacaaaatggctaacactggaagtatgtagagagttccagagggggacttgctcacggccagacacggaatgtaaatttgcacatccttcgaaaagctgccaagttgaaaatggacgagtaatcgcctgctttgattcattgaaaggccgttgctccagggagaactgcaaatatcttcatccacccccacatttaaaaacgcagttggagataaatggacgcaataacttgattcagcagaagaacatggccatgttggcccagcaaatgcaactagccaatgccatgatgcctggtgccccattacaacccgtggtatgtcgagagtaccaacgtggcaattgcaaccgaggagaaaatgattgtcggtttgctcatcctgctgacagcacaatgattgacaccaatgacaacacagtcactgtgtgtatggattacatcaaagggagatgctctcgggaaaagtgcaaatactttcatccccctgcacatttgcaagccaagatcaaggctgcccaataccaggtcaaccaggctgcagctgcacaggctgcagccaccgcagctgccatgggaattcctcaagctgtacttcccccattaccaaagaggcctgctcttgaaaaaaccaacggtgccaccgcagtctttaacactggtattttccaataccaacaggctctagccaacatgcagttacaacagcatacagcatttctcccaccagttcccatggtgcacggtgctacgccagccactgtgtccgcagcaacaacatctgccacaagtgttcccttcgctgcaacagccacagccaaccagatacccataatatctgccgaacatctgactagccacaagtatgttacccagatgtagaattttcatcactaaacaatcatgctaaagaggaaaggacagtgtgcttggttagagtaaaggacgaggtcattagccatattgtatatatcgtcaagcaacacacacaaaagttcctcagccacaagacatccacatattgcatgttaaccagaagaaaagacaacattttccggaaatccactgcacactgttgcctatacactttgtacatttaattgatatttgtgctgaggtgatattcctgtctaaaagaacaacattgtctttcttttctagcacagagttatgcattcaaagatgcatacctagttagtttcctatatattcatgccatcttgaaaagacagactatggtgtaaccatgattctattatgtattggtacgtctgtagaccaagatataattttttaaaaataagtttatttctttcaaggtttacaaataacaaaggtgcaccttgtatttaaaattgccattatagatgagagcgtgcatgcacagtcatttttgtttaagagtaatatttttaatgtaatagattgtaagacgtggtgagggagggatctgacagagatgaatgtgccaagcaaaaccacaactgtgtatattttaaagcacatcatggctttaagtaccatgttgttaaggattctcatgaagtgccatagactgtacatcaaattagagtattatttcttcagtgttattgttttcagagccacattttgttgcatatttgctagtactaatcagtcaaagggcaccattctttttttttttttttgaaaccaaagctgtctcagaaatggccaatttaactttacagtaacaatagacagcacaacacaaactctctcaatacagataaactcacacatactggagatatatatataatagatatatataaaattattttaatgcattgtagtgtaatatttatgcatactatactgtataacatgttattcaaaagggattgccatttctgagacacagtaacaaaaaaatgaggaaattattttgcttctatttatagcctctgtcaaaagtcaaaagactataaatgctttgcaaaaatggtttcacgtttgcttaaatgcttcatcacagtcacattcaaaatagtgactctaaacaaagaagaaagcagcactgtcatcagatgcatgataaaccaaaatatgaaaatgggaaatgtttaattaacctagtaattgggtgggttaagtacatgggtgaattttatatgtgatttttgttttgttttgttttgttcagattaactgcttatagccttagaaagccttttacaaaattaaaaaaaaaatagatgtgcattcagtttttaagaatggaatcatccaaaggaattcctttttttgaggtttggatgttgcagctagtaaaggatatttttgctctgttcagcagttctaaaaattgctgaagtaggggccaggtcactggtagttatagtatggaatgggagaagtgaaagttcagttatagaactttccatacttccaagtttactgcaagtttttatgcttgagagagatgctttctaatataagactgatgtgttgattttactgattgtactgtacatctattaaagccttagattattacattacgggttggaacccataccaatgtaatttcaatcgtgttaagaaagtaatggtgacttcacatgttattgtagttagttacattatagaatattacttatttttcttgttaaaatgtagtttttcatttcctacatttattagattttcattttctattaacaattgaataccatttcagtttatagacttgttttattagattttaccaatgaatttttcaaaatacaaaaaaaagtagtttttccttcataacatactcagttttgaattacatgtagtgtcacatgaatattcgtattgttaactaaatgatttatattttactgatttaatattacagtgtaagaatgtcagtcattgttagttcttgtctagttttcattaaaagaacaaagatcttttatatggatatcttataaatatataatcattgctaagtaagaagttaagttgttgctatcgcaacaatcctggcagacaattgagtaatattttgatgatttattttgtttgtaattagttattataagaagatctagatcctagatattagaataaaatttattttctactgtatccatttcaaatgttaaaatattgtttaatatttttgaaatccctgagtatcaggccttgttataaataagctgcataatcaataaatagaacaagggactttttgttgataatccaaatactcaaagtttacgtaatgaaaattatagcgtgtgtgcaaactcttgagggttgattatgctgcaatttagcatgttggaacgtctagggagaaggttgactttttgcacttctgtatatagtcaaaagagagaaacctgtataatagtaagatcttattttgaataaaaacgtctataattacaaggagttttgttaaggctaatacaatgacagactgagcaaaattgcttgcaaaagtggcacagagttagcactccataccccttcaaacatgttgctttgctttcttgtggacagcttgtagtttgccaggattttttcagctggaaagatacgccatcctttcaaaccctcatgactgacaaaaactccatggggccaaatctgcctgaagatcattaccaaaaatagcaggtacttctaccattaaggtgaaatcatggatcagatattccttacatttttcaaaactactgcatgtttaaaacttcaac

SEQ ID NO: 155975 - DNA, 1451 bp, Homo sapiens
  Payload ID: 10629
  Gene Symbol: MBNL1
  Gene Name: muscleblind-like splicing regulator 1
  ENST ID: ENST00000478535
  CDS Start-End: 1-633
cagcaaatgcaactagccaatgccatgatgcctggtgccccattacaacccgtgccaatgttttcagttgcaccaagcttagccaccaatgcatcagcagccgcctttaatccctatctgggacctgtttctccaagcctggtcccggcagagatcttgccgactgcaccaatgttggttacagggaatccgggtgtccctgtacctgcagctgctgcagctgctgcacagaaattaatgcgaacagacagacttgaggtatgtcgagagtaccaacgtggcaattgcaaccgaggagaaaatgattgtcggtttgctcatcctgctgacagcacaatgattgacaccaatgacaacacagtcactgtgtgtatggattacatcaaagggagatgctctcgggaaaagtgcaaatactttcatccccctgcacatttgcaagccaagatcaaggctgcccaataccaggtcaaccaggctgcagctgcacaggctgcagccaccgcagctgccatggctctagccaacatgcagttacaacagcatacagcatttctcccaccaggctcaatattgtgcatgacacccgctacaagtgttgatacccataatatctgccgaacatctgactagccacaagtatgttacccagatgtagaattttcatcactaaacaatcatgctaaagaggaaaggacagtgtgcttggttagagtaaaggacgaggtcattagccatattgtatatatcgtcaagcaacacacacaaaagttcctcagccacaagacatccacatattgcatgttaaccagaagaaaagacaacattttccggaaatccactgcacactgttgcctatacactttgtacatttaattgatatttgtgctgaggtgatattcctgtctaaaagaacaacattgtctttcttttctagcacagagttatgcattcaaagatgcatacctagttagtttcctatatattcatgccatcttgaaaagacagactatggtgtaaccatgattctattatgtattggtacgtctgtagaccaagatataattttttaaaaataagtttatttctttcaaggtttacaaataacaaaggtgcaccttgtatttaaaattgccattatagatgagagcgtgcatgcacagtcatttttgtttaagagtaatatttttaatgtaatagattgtaagacgtggtgagggagggatctgacagagatgaatgtgccaagcaaaaccacaactgtgtatattttaaagcacatcatggctttaagtaccatgttgttaaggattctcatgaagtgccatagactgtacatcaaattagagtattatttcttcagtgttattgttttcagagccacattttgttgcatatttgctagtactaatcagtcaaagggcaccattctttttttttttttttgaaac

SEQ ID NO: 155976 - DNA, 1023 bp, Homo sapiens
  Payload ID: 10629
  Gene Symbol: MBNL1
  Gene Name: muscleblind-like splicing regulator 1
  Uniprot ID: Q9NR56
  ENST ID: ENST00000485509
  CDS Start-End: 1-1023
atggctgttagtgtcacaccaattcgggacacaaaatggctaacactggaagtatgtagagagttccagagggggacttgctcacggccagacacggaatgtaaatttgcacatccttcgaaaagctgccaagttgaaaatggacgagtaatcgcctgctttgattcattgaaaggccgttgctccagggagaactgcaaatatcttcatccacccccacatttaaaaacgcagttggagataaatggacgcaataacttgattcagcagaagaacatggccatgttggcccagcaaatgcaactagccaatgccatgatgcctggtgccccattacaacccgtgccaatgttttcagttgcaccaagcttagccaccaatgcatcagcagccgcctttaatccctatctgggacctgtttctccaagcctggtcccggcagagatcttgccgactgcaccaatgttggttacagggaatccgggtgtccctgtacctgcagctgctgcagctgctgcacagaaattaatgcgaacagacagacttgaggtatgtcgagagtaccaacgtggcaattgcaaccgaggagaaaatgattgtcggtttgctcatcctgctgacagcacaatgattgacaccaatgacaacacagtcactgtgtgtatggattacatcaaagggagatgctctcgggaaaagtgcaaatactttcatccccctgcacatttgcaagccaagatcaaggctgcccaataccaggtcaaccaggctgcagctgcacaggctgcagccaccgcagctgccatgttcccatggtgcacggtgctacgccagccactgtgtccgcagcaacaacatctgccacaagtgttcccttcgctgcaacagccacagccaaccagccccatccttgatgcttctacactgttgggtgcaacatcctgtcctgcagcagcaggaaaaatgatacccataatatctgccgaacatctgactagccacaagtatgttacccagatgtag

SEQ ID NO: 155977 - DNA, 4205 bp, Homo sapiens
  Payload ID: 10629
  Gene Symbol: MBNL1
  Gene Name: muscleblind-like splicing regulator 1
  ENST ID: ENST00000493459
  CDS Start-End: 322-1353
gaatgagttgtggcgcccacaatgctcccatgacaaggagctgacaagttccattttccgtcgcgggcatcttggaatcatgactcccacaatgccttgggcacttggtcgacagtggggccgcctctgaaaaaaaaatgtgagagcagtcactcaggaaatgttgtttaaggggaaccttctggatccttttcatggcaccatggcaagaagaagctgtatcttatctatggaagataaagcatggagttggctaatggatgctgataggaccatctagttgcaggaaaacaagctcagggctcccactgattctacattatgggccgttgctccagggagaactgcaaatatcttcatccacccccacatttaaaaacgcagttggagataaatggacgcaataacttgattcagcagaagaacatggccatgttggcccagcaaatgcaactagccaatgccatgatgcctggtgccccattacaacccgtgccaatgttttcagttgcaccaagcttagccaccaatgcatcagcagccgcctttaatccctatctgggacctgtttctccaagcctggtcccggcagagatcttgccgactgcaccaatgttggttacagggaatccgggtgtccctgtacctgcagctgctgcagctgctgcacagaaattaatgcgaacagacagacttgaggtatgtcgagagtaccaacgtggcaattgcaaccgaggagaaaatgattgtcggtttgctcatcctgctgacagcacaatgattgacaccaatgacaacacagtcactgtgtgtatggattacatcaaagggagatgctctcgggaaaagtgcaaatactttcatccccctgcacatttgcaagccaagatcaaggctgcccaataccaggtcaaccaggctgcagctgcacaggctgcagccaccgcagctgccatgactcagtcggctgtcaaatcactgaagcgacccctcgaggcaacctttgacctgggaattcctcaagctgtacttcccccattaccaaagaggcctgctcttgaaaaaaccaacggtgccaccgcagtctttaacactggtattttccaataccaacaggctctagccaacatgcagttacaacagcatacagcatttctcccaccaggctcaatattgtgcatgacacccgctacaagtgttgttcccatggtgcacggtgctacgccagccactgtgtccgcagcaacaacatctgccacaagtgttcccttcgctgcaacagccacagccaaccagatacccataatatctgccgaacatctgactagccacaagtatgttacccagatgtagaattttcatcactaaacaatcatgctaaagaggaaaggacagtgtgcttggttagagtaaaggacgaggtcattagccatattgtatatatcgtcaagcaacacacacaaaagttcctcagccacaagacatccacatattgcatgttaaccagaagaaaagacaacattttccggaaatccactgcacactgttgcctatacactttgtacatttaattgatatttgtgctgaggtgatattcctgtctaaaagaacaacattgtctttcttttctagcacagagttatgcattcaaagatgcatacctagttagtttcctatatattcatgccatcttgaaaagacagactatggtgtaaccatgattctattatgtattggtacgtctgtagaccaagatataattttttaaaaataagtttatttctttcaaggtttacaaataacaaaggtgcaccttgtatttaaaattgccattatagatgagagcgtgcatgcacagtcatttttgtttaagagtaatatttttaatgtaatagattgtaagacgtggtgagggagggatctgacagagatgaatgtgccaagcaaaaccacaactgtgtatattttaaagcacatcatggctttaagtaccatgttgttaaggattctcatgaagtgccatagactgtacatcaaattagagtattatttcttcagtgttattgttttcagagccacattttgttgcatatttgctagtactaatcagtcaaagggcaccattctttttttttttttttgaaaccaaagctgtctcagaaatggccaatttaactttacagtaacaatagacagcacaacacaaactctctcaatacagataaactcacacatactggagatatatatataatagatatatataaaattattttaatgcattgtagtgtaatatttatgcatactatactgtataacatgttattcaaaagggattgccatttctgagacacagtaacaaaaaaatgaggaaattattttgcttctatttatagcctctgtcaaaagtcaaaagactataaatgctttgcaaaaatggtttcacgtttgcttaaatgcttcatcacagtcacattcaaaatagtgactctaaacaaagaagaaagcagcactgtcatcagatgcatgataaaccaaaatatgaaaatgggaaatgtttaattaacctagtaattgggtgggttaagtacatgggtgaattttatatgtgatttttgttttgttttgttttgttcagattaactgcttatagccttagaaagccttttacaaaattaaaaaaaaaatagatgtgcattcagtttttaagaatggaatcatccaaaggaattcctttttttgaggtttggatgttgcagctagtaaaggatatttttgctctgttcagcagttctaaaaattgctgaagtaggggccaggtcactggtagttatagtatggaatgggagaagtgaaagttcagttatagaactttccatacttccaagtttactgcaagtttttatgcttgagagagatgctttctaatataagactgatgtgttgattttactgattgtactgtacatctattaaagccttagattattacattacgggttggaacccataccaatgtaatttcaatcgtgttaagaaagtaatggtgacttcacatgttattgtagttagttacattatagaatattacttatttttcttgttaaaatgtagtttttcatttcctacatttattagattttcattttctattaacaattgaataccatttcagtttatagacttgttttattagattttaccaatgaatttttcaaaatacaaaaaaaagtagtttttccttcataacatactcagttttgaattacatgtagtgtcacatgaatattcgtattgttaactaaatgatttatattttactgatttaatattacagtgtaagaatgtcagtcattgttagttcttgtctagttttcattaaaagaacaaagatcttttatatggatatcttataaatatataatcattgctaagtaagaagttaagttgttgctatcgcaacaatcctggcagacaattgagtaatattttgatgatttattttgtttgtaattagttattataagaagatctagatcctagatattagaataaaatttattttctactgtatccatttcaaatgttaaaatattgtttaatatttttgaaatccctgagtatcaggccttgttataaataagctgcataatcaataaatagaacaagggactttttgttgataatccaaatactcaaagtttacgtaatgaaaattatagcgtgtgtgcaaactcttgagggttgattatgctgcaatttagcatgttggaacgtctagggagaaggttgactttttgcacttctgtatatagtcaaaagagagaaacctgtataatagtaagatcttattttgaataaaaacgtctataattacaaggagttttgttaaggctaatacaatgacagactgagcaaaattgcttgcaaaagtggcacagagttagcactccataccccttcaaacatgttgctttgctttcttgtggacagcttgtagtttgccaggattttttcagctggaaagatacgccatcctttcaaaccctcatgactgacaaaaactccatggggccaaatctgcctgaagatcattaccaaaaatagcaggtacttctaccattaaggtgaaatcatggatcagatattccttacatttttcaaaactactgcatgtttaaaacttcaacaaaaaaagagagaaa

SEQ ID NO: 155978 - DNA, 1054 bp, Homo sapiens
  Payload ID: 10629
  Gene Symbol: MBNL1
  Gene Name: muscleblind-like splicing regulator 1
  Uniprot ID: Q9NR56
  ENST ID: ENST00000492948
  CDS Start-End: 1-1029
atggctgttagtgtcacaccaattcgggacacaaaatggctaacactggaagtatgtagagagttccagagggggacttgctcacggccagacacggaatgtaaatttgcacatccttcgaaaagctgccaagttgaaaatggacgagtaatcgcctgctttgattcattgaaaggccgttgctccagggagaactgcaaatatcttcatccacccccacatttaaaaacgcagttggagataaatggacgcaataacttgattcagcagaagaacatggccatgttggcccagcaaatgcaactagccaatgccatgatgcctggtgccccattacaacccgtgccaatgttttcagttgcaccaagcttagccaccaatgcatcagcagccgcctttaatccctatctgggacctgtttctccaagcctggtcccggcagagatcttgccgactgcaccaatgttggttacagggaatccgggtgtccctgtacctgcagctgctgcagctgctgcacagaaattaatgcgaacagacagacttgaggtatgtcgagagtaccaacgtggcaattgcaaccgaggagaaaatgattgtcggtttgctcatcctgctgacagcacaatgattgacaccaatgacaacacagtcactgtgtgtatggattacatcaaagggagatgctctcgggaaaagtgcaaatactttcatccccctgcacatttgcaagccaagatcaaggctgcccaataccaggtcaaccaggctgcagctgcacaggctgcagccaccgcagctgccatgggaattcctcaagctgtacttcccccattaccaaagaggcctgctcttgaaaaaaccaacggtgccaccgcagtctttaacactggtattttccaataccaacaggctctagccaacatgcagttacaacagcatacagcatttctcccaccaggctcaatattgtgcatgacacccgctacaagtgttgatacccataatatctgccgaacatctgactagccacaagtatgttacccagatgtag

SEQ ID NO: 155979 - DNA, 5258 bp, Homo sapiens
  Payload ID: 10629
  Gene Symbol: MBNL1
  Gene Name: muscleblind-like splicing regulator 1
  ENST ID: ENST00000498502
  CDS Start-End: 790-1836
gttggtactaagaagtgcctttcctgacgtctctgctgcttggaaccgcttctagagcagtctctgcttttgccttgcttgctgccagctagactgtgacgacagcacatccaccctccacctctagcccagacacccccatttctacttataatcaagagaaaagctctaagtatctggcattgccctaggctgctttagtgttaaaagaaaagtttgctgaaaaagtaagatatcttctgccaggaaatcaaggaggaaaaaaaaaatcattttctcgattttgctctaaactgctgcatctgtctatgccaaactaatcaataccgattgcaccaccaaactccattgcaaattcagctgtgaggagattccctttcagacaactttgctgaaagcagcttggaaattcggtgtcgaagggtctgccacgttttcatgcttgcattttgggctccaaattggcactgggaaggggttactgagagcacaaggctgataccaggccctacttttaaacgttcatctacttacaatcctagtatttctctaaaaaccaaaacctctttgaattaacagtttcatgctgtgaatttctagtgggagatcttttccttgatattgacgacacaattttccatgtacttttaaagcagggagtggggaaaagtattttgaggggacattttcatcatcagttcagctttttttttttggttgttgctcttttttgggggggttgggtttgttggtttcactgaaacatttaactacctgtaaaatctaaacatggctgttagtgtcacaccaattcgggacacaaaatggctaacactggaagtatgtagagagttccagagggggacttgctcacggccagacacggaatgtaaatttgcacatccttcgaaaagctgccaagttgaaaatggacgagtaatcgcctgctttgattcattgaaaggccgttgctccagggagaactgcaaatatcttcatccacccccacatttaaaaacgcagttggagataaatggacgcaataacttgattcagcagaagaacatggccatgttggcccagcaaatgcaactagccaatgccatgatgcctggtgccccattacaacccgtgccaatgttttcagttgcaccaagcttagccaccaatgcatcagcagccgcctttaatccctatctgggacctgtttctccaagcctggtcccggcagagatcttgccgactgcaccaatgttggttacagggaatccgggtgtccctgtacctgcagctgctgcagctgctgcacagaaattaatgcgaacagacagacttgaggtatgtcgagagtaccaacgtggcaattgcaaccgaggagaaaatgattgtcggtttgctcatcctgctgacagcacaatgattgacaccaatgacaacacagtcactgtgtgtatggattacatcaaagggagatgctctcgggaaaagtgcaaatactttcatccccctgcacatttgcaagccaagatcaaggctgcccaataccaggtcaaccaggctgcagctgcacaggctgcagccaccgcagctgccatgactcagtcggctgtcaaatcactgaagcgacccctcgaggcaacctttgacctgggaattcctcaagctgtacttcccccattaccaaagaggcctgctcttgaaaaaaccaacggtgccaccgcagtctttaacactggtattttccaataccaacaggctctagccaacatgcagttacaacagcatacagcatttctcccaccagatacccataatatctgccgaacatctgactagccacaagtatgttacccagatgtagaattttcatcactaaacaatcatgctaaagaggaaaggacagtgtgcttggttagagtaaaggacgaggtcattagccatattgtatatatcgtcaagcaacacacacaaaagttcctcagccacaagacatccacatattgcatgttaaccagaagaaaagacaacattttccggaaatccactgcacactgttgcctatacactttgtacatttaattgatatttgtgctgaggtgatattcctgtctaaaagaacaacattgtctttcttttctagcacagagttatgcattcaaagatgcatacctagttagtttcctatatattcatgccatcttgaaaagacagactatggtgtaaccatgattctattatgtattggtacgtctgtagaccaagatataattttttaaaaataagtttatttctttcaaggtttacaaataacaaaggtgcaccttgtatttaaaattgccattatagatgagagcgtgcatgcacagtcatttttgtttaagagtaatatttttaatgtaatagattgtaagacgtggtgagggagggatctgacagagatgaatgtgccaagcaaaaccacaactgtgtatattttaaagcacatcatggctttaagtaccatgttgttaaggattctcatgaagtgccatagactgtacatcaaattagagtattatttcttcagtgttattgttttcagagccacattttgttgcatatttgctagtactaatcagtcaaagggcaccattctttttttttttttttgaaaccaaagctgtctcagaaatggccaatttaactttacagtaacaatagacagcacaacacaaactctctcaatacagataaactcacacatactggagatatatatataatagatatatataaaattattttaatgcattgtagtgtaatatttatgcatactatactgtataacatgttattcaaaagggattgccatttctgagacacagtaacaaaaaaatgaggaaattattttgcttctatttatagcctctgtcaaaagtcaaaagactataaatgctttgcaaaaatggtttcacgtttgcttaaatgcttcatcacagtcacattcaaaatagtgactctaaacaaagaagaaagcagcactgtcatcagatgcatgataaaccaaaatatgaaaatgggaaatgtttaattaacctagtaattgggtgggttaagtacatgggtgaattttatatgtgatttttgttttgttttgttttgttcagattaactgcttatagccttagaaagccttttacaaaattaaaaaaaaaatagatgtgcattcagtttttaagaatggaatcatccaaaggaattcctttttttgaggtttggatgttgcagctagtaaaggatatttttgctctgttcagcagttctaaaaattgctgaagtaggggccaggtcactggtagttatagtatggaatgggagaagtgaaagttcagttatagaactttccatacttccaagtttactgcaagtttttatgcttgagagagatgctttctaatataagactgatgtgttgattttactgattgtactgtacatctattaaagccttagattattacattacgggttggaacccataccaatgtaatttcaatcgtgttaagaaagtaatggtgacttcacatgttattgtagttagttacattatagaatattacttatttttcttgttaaaatgtagtttttcatttcctacatttattagattttcattttctattaacaattgaataccatttcagtttatagacttgttttattagattttaccaatgaatttttcaaaatacaaaaaaaagtagtttttccttcataacatactcagttttgaattacatgtagtgtcacatgaatattcgtattgttaactaaatgatttatattttactgatttaatattacagtgtaagaatgtcagtcattgttagttcttgtctagttttcattaaaagaacaaagatcttttatatggatatcttataaatatataatcattgctaagtaagaagttaagttgttgctatcgcaacaatcctggcagacaattgagtaatattttgatgatttattttgtttgtaattagttattataagaagatctagatcctagatattagaataaaatttattttctactgtatccatttcaaatgttaaaatattgtttaatatttttgaaatccctgagtatcaggccttgttataaataagctgcataatcaataaatagaacaagggactttttgttgataatccaaatactcaaagtttacgtaatgaaaattatagcgtgtgtgcaaactcttgagggttgattatgctgcaatttagcatgttggaacgtctagggagaaggttgactttttgcacttctgtatatagtcaaaagagagaaacctgtataatagtaagatcttattttgaataaaaacgtctataattacaaggagttttgttaaggctaatacaatgacagactgagcaaaattgcttgcaaaagtggcacagagttagcactccataccccttcaaacatgttgctttgctttcttgtggacagcttgtagtttgccaggattttttcagctggaaagatacgccatcctttcaaaccctcatgactgacaaaaactccatggggccaaatctgcctgaagatcattaccaaaaatagcaggtacttctaccattaaggtgaaatcatggatcagatattccttacatttttcaaaactactgcatgtttaaaacttcaacaaaaaaagagagaaagaactatactaagaacatatattattcagatcagtttctgccaatttcagtggtttattgttcacaaaaaaatcttcaaaacaagtattgactttcacaaaatttaaatcataaacaggcaaaccaaacagcacactgtagctatagttgttatgtgattgttttttaattgctgtaggatcctgttctttcagcaggtgaaaaataaaacgcagttcaaatttcatggttttaattttcaactcagaagcactcaaaaatgcaaaatgtgataatgggcacttgtttaaaagaattagtgtatccagccttcactccagctggttaaaaatgttgcacttatcagcaaccctaccactttcatctgctgaaaggacaaatgtgcttggttttactattatgtaatcacaacttactttctgcttgtagttgcttaaaattatgtattttgtcttgggctgcaatttgttttatgcttattttattattactgcagtagttgactttgctgtatggaaaaataaagtgaaattgccctaataaaa

SEQ ID NO: 155980 - DNA, 898 bp, Homo sapiens
  Payload ID: 10629
  Gene Symbol: MBNL1
  Gene Name: muscleblind-like splicing regulator 1
  ENST ID: ENST00000460591
  CDS Start-End: 433-898
ggaaggtgtgagtccctctgagtcgagcggcgcgcgggtcttcccggcggctcccgcatccctggccccggggctgccatcccgcccggttttcatctgggccaaatatgtgcacgcaaaggttaattctctgcttgctacccataaattacgcatgacatgtttagctgggctgccttatatggagagtgctgtatttcaggccagtttgccttttgccaagtttacagggcggaagacgccctgtaggagagggctgcctcctccttttcttcttcttcttttttttttcatcgttttgtagtgcgtcactcaaaaactgtaagaaaaggccgttgctccagggagaactgcaaatatcttcatccacccccacatttaaaaacgcagttggagataaatggacgcaataacttgattcagcagaagaacatggccatgttggcccagcaaatgcaactagccaatgccatgatgcctggtgccccattacaacccgtgccaatgttttcagttgcaccaagcttagccaccaatgcatcagcagccgcctttaatccctatctgggacctgtttctccaagcctggtcccggcagagatcttgccgactgcaccaatgttggttacagggaatccgggtgtccctgtacctgcagctgctgcagctgctgcacagaaattaatgcgaacagacagacttgaggtatgtcgagagtaccaacgtggcaattgcaaccgaggagaaaatgattgtcggtttgctcatcctgctgacagcacaatgattgacaccaatgacaacacagtcactgtgtgtatggattacatcaaagggagatgctctcgggaaaagtgcaaatactttcatccccctgcacatttgcaagccaagatca

SEQ ID NO: 155981 - DNA, 5147 bp, Homo sapiens
  Payload ID: 10629
  Gene Symbol: MBNL1
  Gene Name: muscleblind-like splicing regulator 1
  Uniprot ID: Q9NR56
  ENST ID: ENST00000545754
  CDS Start-End: 790-1734
gttggtactaagaagtgcctttcctgacgtctctgctgcttggaaccgcttctagagcagtctctgcttttgccttgcttgctgccagctagactgtgacgacagcacatccaccctccacctctagcccagacacccccatttctacttataatcaagagaaaagctctaagtatctggcattgccctaggctgctttagtgttaaaagaaaagtttgctgaaaaagtaagatatcttctgccaggaaatcaaggaggaaaaaaaaaatcattttctcgattttgctctaaactgctgcatctgtctatgccaaactaatcaataccgattgcaccaccaaactccattgcaaattcagctgtgaggagattccctttcagacaactttgctgaaagcagcttggaaattcggtgtcgaagggtctgccacgttttcatgcttgcattttgggctccaaattggcactgggaaggggttactgagagcacaaggctgataccaggccctacttttaaacgttcatctacttacaatcctagtatttctctaaaaaccaaaacctctttgaattaacagtttcatgctgtgaatttctagtgggagatcttttccttgatattgacgacacaattttccatgtacttttaaagcagggagtggggaaaagtattttgaggggacattttcatcatcagttcagctttttttttttggttgttgctcttttttgggggggttgggtttgttggtttcactgaaacatttaactacctgtaaaatctaaacatggctgttagtgtcacaccaattcgggacacaaaatggctaacactggaagtatgtagagagttccagagggggacttgctcacggccagacacggaatgtaaatttgcacatccttcgaaaagctgccaagttgaaaatggacgagtaatcgcctgctttgattcattgaaaggccgttgctccagggagaactgcaaatatcttcatccacccccacatttaaaaacgcagttggagataaatggacgcaataacttgattcagcagaagaacatggccatgttggcccagcaaatgcaactagccaatgccatgatgcctggtgccccattacaacccgtggtatgtcgagagtaccaacgtggcaattgcaaccgaggagaaaatgattgtcggtttgctcatcctgctgacagcacaatgattgacaccaatgacaacacagtcactgtgtgtatggattacatcaaagggagatgctctcgggaaaagtgcaaatactttcatccccctgcacatttgcaagccaagatcaaggctgcccaataccaggtcaaccaggctgcagctgcacaggctgcagccaccgcagctgccatgggaattcctcaagctgtacttcccccattaccaaagaggcctgctcttgaaaaaaccaacggtgccaccgcagtctttaacactggtattttccaataccaacaggctctagccaacatgcagttacaacagcatacagcatttctcccaccaggctcaatattgtgcatgacacccgctacaagtgttgttcccatggtgcacggtgctacgccagccactgtgtccgcagcaacaacatctgccacaagtgttcccttcgctgcaacagccacagccaaccagatacccataatatctgccgaacatctgactagccacaagtatgttacccagatgtagaattttcatcactaaacaatcatgctaaagaggaaaggacagtgtgcttggttagagtaaaggacgaggtcattagccatattgtatatatcgtcaagcaacacacacaaaagttcctcagccacaagacatccacatattgcatgttaaccagaagaaaagacaacattttccggaaatccactgcacactgttgcctatacactttgtacatttaattgatatttgtgctgaggtgatattcctgtctaaaagaacaacattgtctttcttttctagcacagagttatgcattcaaagatgcatacctagttagtttcctatatattcatgccatcttgaaaagacagactatggtgtaaccatgattctattatgtattggtacgtctgtagaccaagatataattttttaaaaataagtttatttctttcaaggtttacaaataacaaaggtgcaccttgtatttaaaattgccattatagatgagagcgtgcatgcacagtcatttttgtttaagagtaatatttttaatgtaatagattgtaagacgtggtgagggagggatctgacagagatgaatgtgccaagcaaaaccacaactgtgtatattttaaagcacatcatggctttaagtaccatgttgttaaggattctcatgaagtgccatagactgtacatcaaattagagtattatttcttcagtgttattgttttcagagccacattttgttgcatatttgctagtactaatcagtcaaagggcaccattctttttttttttttttgaaaccaaagctgtctcagaaatggccaatttaactttacagtaacaatagacagcacaacacaaactctctcaatacagataaactcacacatactggagatatatatataatagatatatataaaattattttaatgcattgtagtgtaatatttatgcatactatactgtataacatgttattcaaaagggattgccatttctgagacacagtaacaaaaaaatgaggaaattattttgcttctatttatagcctctgtcaaaagtcaaaagactataaatgctttgcaaaaatggtttcacgtttgcttaaatgcttcatcacagtcacattcaaaatagtgactctaaacaaagaagaaagcagcactgtcatcagatgcatgataaaccaaaatatgaaaatgggaaatgtttaattaacctagtaattgggtgggttaagtacatgggtgaattttatatgtgatttttgttttgttttgttttgttcagattaactgcttatagccttagaaagccttttacaaaattaaaaaaaaaatagatgtgcattcagtttttaagaatggaatcatccaaaggaattcctttttttgaggtttggatgttgcagctagtaaaggatatttttgctctgttcagcagttctaaaaattgctgaagtaggggccaggtcactggtagttatagtatggaatgggagaagtgaaagttcagttatagaactttccatacttccaagtttactgcaagtttttatgcttgagagagatgctttctaatataagactgatgtgttgattttactgattgtactgtacatctattaaagccttagattattacattacgggttggaacccataccaatgtaatttcaatcgtgttaagaaagtaatggtgacttcacatgttattgtagttagttacattatagaatattacttatttttcttgttaaaatgtagtttttcatttcctacatttattagattttcattttctattaacaattgaataccatttcagtttatagacttgttttattagattttaccaatgaatttttcaaaatacaaaaaaaagtagtttttccttcataacatactcagttttgaattacatgtagtgtcacatgaatattcgtattgttaactaaatgatttatattttactgatttaatattacagtgtaagaatgtcagtcattgttagttcttgtctagttttcattaaaagaacaaagatcttttatatggatatcttataaatatataatcattgctaagtaagaagttaagttgttgctatcgcaacaatcctggcagacaattgagtaatattttgatgatttattttgtttgtaattagttattataagaagatctagatcctagatattagaataaaatttattttctactgtatccatttcaaatgttaaaatattgtttaatatttttgaaatccctgagtatcaggccttgttataaataagctgcataatcaataaatagaacaagggactttttgttgataatccaaatactcaaagtttacgtaatgaaaattatagcgtgtgtgcaaactcttgagggttgattatgctgcaatttagcatgttggaacgtctagggagaaggttgactttttgcacttctgtatatagtcaaaagagagaaacctgtataatagtaagatcttattttgaataaaaacgtctataattacaaggagttttgttaaggctaatacaatgacagactgagcaaaattgcttgcaaaagtggcacagagttagcactccataccccttcaaacatgttgctttgctttcttgtggacagcttgtagtttgccaggattttttcagctggaaagatacgccatcctttcaaaccctcatgactgacaaaaactccatggggccaaatctgcctgaagatcattaccaaaaatagcaggtacttctaccattaaggtgaaatcatggatcagatattccttacatttttcaaaactactgcatgtttaaaacttcaacaaaaaaagagagaaagaactatactaagaacatatattattcagatcagtttctgccaatttcagtggtttattgttcacaaaaaaatcttcaaaacaagtattgactttcacaaaatttaaatcataaacaggcaaaccaaacagcacactgtagctatagttgttatgtgattgttttttaattgctgtaggatcctgttctttcagcaggtgaaaaataaaacgcagttcaaatttcatggttttaattttcaactcagaagcactcaaaaatgcaaaatgtgataatgggcacttgtttaaaagaattagtgtatccagccttcactccagctggttaaaaatgttgcacttatcagcaaccctaccactttcatctgctgaaaggacaaatgtgcttggttttactattatgtaatcacaacttactttctgcttgtagttgcttaaaattatgtattttgtcttgggctgcaatttgttttatgcttattttattattactgcagtagttgactttgctgtatggaaaaataaagtgaaattgccctaataaaacttctctttcttaagt

SEQ ID NO: 155982 - DNA, 4669 bp, Homo sapiens
  Payload ID: 10630
  Gene Symbol: MBNL2
  Gene Name: muscleblind-like splicing regulator 2
  Uniprot ID: Q5VZF2
  ENST ID: ENST00000345429
  CDS Start-End: 782-1885
tgaaggtaaaattttccagatacggcagacggctttcagagtacaataaacagggaatgagaactatttacatggaagtttctttctcatgatgcggtggagaagcctcggccacttggttctgccagatgttcctggggttactgtaaatgggaaggacaggcagagctaaacaaggtttatcatttaaaagtgcctgtgtgaagtcacttttgctggaaaactgcagcttgggagctttctttgtattcacatcccactcttctgtcaagtacactttaccctgaccttatgagtggatgaagatacctcagttgtctgactttgccaattgcttaatttcagaatttaaaaaggggaaagaaaaacatcctgctaaaatatgaacatctgagtgtcttattttccaacatcgtcaatagctgtgagcgtcagcattaaatattctcccaaggagtgccatgatattgaagtcactttattaataacagctgtatctgcaaaacagtcaagagactcggacgttgaaagccagagatgacactgagcatgcttttattgcggcctaccatctttaagtgggacatattgattgatgagtgattgcctgtccatacactctctcatcatcctgttccttggattggacttcactaagcaatttatcactcaccttcagacttacatgtgggagttttcacaacagtagttttggaatcattagaacttggattgatttcatcatttaacagaaacaaacagcccaaattactttatcaccatggctttgaacgttgccccagtcagagatacaaaatggctgacattagaagtctgcagacagtttcaaagaggaacatgctcacgctctgatgaagaatgcaaatttgctcatccccccaaaagttgtcaggttgaaaatggaagagtaattgcctgctttgattccctaaagggccgttgttcgagagagaactgcaagtatcttcaccctccgacacacttaaaaactcaactagaaattaatggaaggaacaatttgattcagcaaaaaactgcagcagcaatgcttgcccagcagatgcaatttatgtttccaggaacaccacttcatccagtgcccactttccctgtaggtcccgcgatagggacaaatacggctattagctttgctccttacctagcacctgtaacccctggagttgggttggtcccaacggaaattctgcccaccacgcctgttattgttcccggaagtccaccggtcactgtcccgggctcaactgcaactcagaaacttctcaggactgacaaactggaggtatgcagggagttccagcgaggaaactgtgcccggggagagaccgactgccgctttgcacaccccgcagacagcaccatgatcgacacaagtgacaacaccgtaaccgtttgtatggattacataaaggggcgttgcatgagggagaaatgcaaatattttcaccctcctgcacacttgcaggccaaaatcaaagctgcgcagcaccaagccaaccaagctgcggtggccgcccaggcagccgcggccgcggccacagtcatggcctttccccctggtgctcttcatcctttaccaaagagacaagcacttgaaaaaagcaatggtaccagcgcggtctttaaccccagcgtcttgcactaccagcaggctctcaccagcgcacagttgcagcaacacgccgcgttcattccaacagggtcagttttgtgcatgacacccgctaccagtattgtacccatgatgcacagcgctacgtccgccactgtctctgcagcaacaactcctgcaacaagtgtccccttcgcagcaacagccacagccaatcagataattctgaaataatcagcagaaacggaatggaatgccaagaatctgcattgagaataactaaacattgttactgtacatactatcctgtttcctcctcaatagaattgccacaaactgcatgctaaataaagatgtagttcttctggacagaccacaactctaagaagctagtgctgctatctcatatatgagtattaaatatggtatgcttagtatattccaacctaagatagttaactacctgagaccagctgtgatgtttaaagacataaaggataaagtttacttttaaagggtttctaaacatagtttctgtcctaggaatattgtcttatctccataactatagctgatgcagaaagtccagccagtttactcatttcgattcagaatatttcaaatttagcaataaacaattagcattagttaaaaaagaaacatattccaagggcaggttcgattctagctctaattactgtcatgtcatttacccactggatcaaagggtatgtttcacttcttgacaatataaatgctgcagcaaagatgagaggtgaagtaaaaccgatacctgtcctgcaggtctaaaatttgaatggaaattcaagcacaagtactggggacacatcaaagtgtggtgtttggtttgcctggagatgccacgttgaatcatgtgattctagattaacattaaatagattgaaaaagaaactttgcacggtatgagcttcataccccaccaaacaaagtcttgaaggtattattttacaagtatatttttaaagttgttttataagagagactttgtagaagtgcctagattttgccagacttcatccagcttgacaagattgagaggcccatgccaacagtctaatctaagagattagtctttcaaactcaccatccagttgcctgttacagaataactcttcttaactaaaaacctagtcaaacaaggaagctgtaggtgaggagatctgtataatattctaatttaagtaagtttgagtttagtcactgcaaatttgactgtgactttaatctaaattactatgtaaacaaaaagtagatagtttcactttttaaaaaatccattactgttttgcatttcaaaagttggattaaagggttgtaactgactacagcatggaaaaaaatagttcttttaattctttcaccttaaagcatattttatgtctcaaaagtataaaaaactttaatacaagtacatacatattatatatacacatacatatatatactatatatggatgaaacatattttaatgttgtttacttttttaaatacttggttgatcttcaaggtaatagcgatacaattaaattttgttcagaaagtttgttttaaagtttattttaagcactatcgtaccaaatatttcatatttcacattttatatgttgcacatagcctatacagtacctacatagtttttaaattattgtttaaaaaacaaaacagctgttataaatgaatattatgtgtaattgtttcaaacatccattttctttgtgaacatattagtgattgaagtattttgacttttgagattgaatgtaaaatattttaaatttgggatcatcgcctgttctgaaaactagatgcaccaaccgtatcattatttgtttgaggaaaaaaagaaatctgcattttaattcatgttggtcaaagtcgaattactatctatttatcttatatcgtagatctgataaccctatctaaaagaaagtcacacgctaaatgtattcttacatagtgcttgtatcgttgcatttgttttaatttgtggaaaagtattgtatctaacttgtattactttggtagtttcatctttatgtattattgatatttgtaattttctcaactataacaatgtagttacgctacaacttgcctaaaacattcaaacttgttttcttttttctgtttttttctttgttaattcatttaaactcattgaaaacatagtatacattactaaaaggtaaattatgggaatcactgaaatatttttgtagattaattgttgtaacattgtctttcttttttttcttttgtttcatgattttgatttttaaaattattagcacacaactattttcagccctttaataatggagcatcaaaaacatcacctgtaaccccaagcaaatatagaagactgtattttttactatgatatccattttccagaattgtgattacaatatgcaaagagtcataaatatgccatttacaataaggaggaggcaaggcaaatgcatagatgtacaaatatatgtacaacagattttgctttttatttatttataatgtaattttatagaataattctgggatttgagaggatctaaaactatttttctgtataaatattatttgccaaaagtttgtttatattcagaagtctgactatgatgaataaatcttaaatgctttgtttaattaaaaaacaaaaatcaccaatatccaagacatgaagatatcagttcaacaaatactgtagttaagagactaactctccacttgtatgggaactacatttcactcttggttttcaggatataacagcacttcaccgaaatattctttcagccataccactggtaacatttctactaaatctttctgtaacacttaaagaattccctcattcattaccttacagtgtaaacaggagtctaatttgtatcaatactatgttttggttgtaatattcagttcactcacccaatgtacaaccaatgaaataaaagaagcatttaaaagga

SEQ ID NO: 155983 - DNA, 4596 bp, Homo sapiens
  Payload ID: 10630
  Gene Symbol: MBNL2
  Gene Name: muscleblind-like splicing regulator 2
  Uniprot ID: Q5VZF2
  ENST ID: ENST00000343600
  CDS Start-End: 841-1926
tcggaaggaagggctgcagcttacagcaacagagtttagactgtctttgcttcatcatctgaaggtaaaattttccagatacggcagacggctttcagagtacaataaacagggaatgagaactatttacatggaagtttctttctcatgatgcggtggagaagcctcggccacttggttctgccagatgttcctggggttactgtaaatgggaaggacaggcagagctaaacaaggtttatcatttaaaagtgcctgtgtgaagtcacttttgctggaaaactgcagcttgggagctttctttgtattcacatcccactcttctgtcaagtacactttaccctgaccttatgagtggatgaagatacctcagttgtctgactttgccaattgcttaatttcagaatttaaaaaggggaaagaaaaacatcctgctaaaatatgaacatctgagtgtcttattttccaacatcgtcaatagctgtgagcgtcagcattaaatattctcccaaggagtgccatgatattgaagtcactttattaataacagctgtatctgcaaaacagtcaagagactcggacgttgaaagccagagatgacactgagcatgcttttattgcggcctaccatctttaagtgggacatattgattgatgagtgattgcctgtccatacactctctcatcatcctgttccttggattggacttcactaagcaatttatcactcaccttcagacttacatgtgggagttttcacaacagtagttttggaatcattagaacttggattgatttcatcatttaacagaaacaaacagcccaaattactttatcaccatggctttgaacgttgccccagtcagagatacaaaatggctgacattagaagtctgcagacagtttcaaagaggaacatgctcacgctctgatgaagaatgcaaatttgctcatccccccaaaagttgtcaggttgaaaatggaagagtaattgcctgctttgattccctaaagggccgttgttcgagagagaactgcaagtatcttcaccctccgacacacttaaaaactcaactagaaattaatggaaggaacaatttgattcagcaaaaaactgcagcagcaatgcttgcccagcagatgcaatttatgtttccaggaacaccacttcatccagtgcccactttccctgtaggtcccgcgatagggacaaatacggctattagctttgctccttacctagcacctgtaacccctggagttgggttggtcccaacggaaattctgcccaccacgcctgttattgttcccggaagtccaccggtcactgtcccgggctcaactgcaactcagaaacttctcaggactgacaaactggaggtatgcagggagttccagcgaggaaactgtgcccggggagagaccgactgccgctttgcacaccccgcagacagcaccatgatcgacacaagtgacaacaccgtaaccgtttgtatggattacataaaggggcgttgcatgagggagaaatgcaaatattttcaccctcctgcacacttgcaggccaaaatcaaagctgcgcagcaccaagccaaccaagctgcggtggccgcccaggcagccgcggccgcggccacagtcatggcctttccccctggtgctcttcatcctttaccaaagagacaagcacttgaaaaaagcaatggtaccagcgcggtctttaaccccagcgtcttgcactaccagcaggctctcaccagcgcacagttgcagcaacacgccgcgttcattccaacagataattctgaaataatcagcagaaacggaatggaatgccaagaatctgcattgagaataactaaacattgttactgtacatactatcctgtttcctcctcaatagaattgccacaaactgcatgctaaataaagatgtagttcttctggacagaccacaactctaagaagctagtgctgctatctcatatatgagtattaaatatggtatgcttagtatattccaacctaagatagttaactacctgagaccagctgtgatgtttaaagacataaaggataaagtttacttttaaagggtttctaaacatagtttctgtcctaggaatattgtcttatctccataactatagctgatgcagaaagtccagccagtttactcatttcgattcagaatatttcaaatttagcaataaacaattagcattagttaaaaaagaaacatattccaagggcaggttcgattctagctctaattactgtcatgtcatttacccactggatcaaagggtatgtttcacttcttgacaatataaatgctgcagcaaagatgagaggtgaagtaaaaccgatacctgtcctgcaggtctaaaatttgaatggaaattcaagcacaagtactggggacacatcaaagtgtggtgtttggtttgcctggagatgccacgttgaatcatgtgattctagattaacattaaatagattgaaaaagaaactttgcacggtatgagcttcataccccaccaaacaaagtcttgaaggtattattttacaagtatatttttaaagttgttttataagagagactttgtagaagtgcctagattttgccagacttcatccagcttgacaagattgagaggcccatgccaacagtctaatctaagagattagtctttcaaactcaccatccagttgcctgttacagaataactcttcttaactaaaaacctagtcaaacaaggaagctgtaggtgaggagatctgtataatattctaatttaagtaagtttgagtttagtcactgcaaatttgactgtgactttaatctaaattactatgtaaacaaaaagtagatagtttcactttttaaaaaatccattactgttttgcatttcaaaagttggattaaagggttgtaactgactacagcatggaaaaaaatagttcttttaattctttcaccttaaagcatattttatgtctcaaaagtataaaaaactttaatacaagtacatacatattatatatacacatacatatatatactatatatggatgaaacatattttaatgttgtttacttttttaaatacttggttgatcttcaaggtaatagcgatacaattaaattttgttcagaaagtttgttttaaagtttattttaagcactatcgtaccaaatatttcatatttcacattttatatgttgcacatagcctatacagtacctacatagtttttaaattattgtttaaaaaacaaaacagctgttataaatgaatattatgtgtaattgtttcaaacatccattttctttgtgaacatattagtgattgaagtattttgacttttgagattgaatgtaaaatattttaaatttgggatcatcgcctgttctgaaaactagatgcaccaaccgtatcattatttgtttgaggaaaaaaagaaatctgcattttaattcatgttggtcaaagtcgaattactatctatttatcttatatcgtagatctgataaccctatctaaaagaaagtcacacgctaaatgtattcttacatagtgcttgtatcgttgcatttgttttaatttgtggaaaagtattgtatctaacttgtattactttggtagtttcatctttatgtattattgatatttgtaattttctcaactataacaatgtagttacgctacaacttgcctaaaacattcaaacttgttttcttttttctgtttttttctttgttaattcatttaaactcattgaaaacatagtatacattactaaaaggtaaattatgggaatcactgaaatatttttgtagattaattgttgtaacattgtctttcttttttttcttttgtttcatgattttgatttttaaaattattagcacacaactattttcagccctttaataatggagcatcaaaaacatcacctgtaaccccaagcaaatatagaagactgtattttttactatgatatccattttccagaattgtgattacaatatgcaaagagtcataaatatgccatttacaataaggaggaggcaaggcaaatgcatagatgtacaaatatatgtacaacagattttgctttttatttatttataatgtaattttatagaataattctgggatttgagaggatctaaaactatttttctgtataaatattatttgccaaaagtttgtttatattcagaagtctgactatgatgaataaatcttaaatgctttgtttaattaaaaaacaaaaatcaccaatatccaagacatgaagatatcagttcaacaaatactgtagttaagagactaactctccacttgtatgggaactacatttcactcttggttttcaggatataacagcacttcaccgaaatattctttcagccataccactggtaacatttctactaaatctttctgtaacacttaaagaattccctcattcattaccttacagtgtaaacaggagtctaatttgtatcaatactatgttttggttgtaatattcagttcactcacccaatgtacaaccaatgaaataaaagaagcatttaaaagg

SEQ ID NO: 155984 - DNA, 4632 bp, Homo sapiens
  Payload ID: 10630
  Gene Symbol: MBNL2
  Gene Name: muscleblind-like splicing regulator 2
  Uniprot ID: Q5VZF2
  ENST ID: ENST00000376673
  CDS Start-End: 841-1962
tcggaaggaagggctgcagcttacagcaacagagtttagactgtctttgcttcatcatctgaaggtaaaattttccagatacggcagacggctttcagagtacaataaacagggaatgagaactatttacatggaagtttctttctcatgatgcggtggagaagcctcggccacttggttctgccagatgttcctggggttactgtaaatgggaaggacaggcagagctaaacaaggtttatcatttaaaagtgcctgtgtgaagtcacttttgctggaaaactgcagcttgggagctttctttgtattcacatcccactcttctgtcaagtacactttaccctgaccttatgagtggatgaagatacctcagttgtctgactttgccaattgcttaatttcagaatttaaaaaggggaaagaaaaacatcctgctaaaatatgaacatctgagtgtcttattttccaacatcgtcaatagctgtgagcgtcagcattaaatattctcccaaggagtgccatgatattgaagtcactttattaataacagctgtatctgcaaaacagtcaagagactcggacgttgaaagccagagatgacactgagcatgcttttattgcggcctaccatctttaagtgggacatattgattgatgagtgattgcctgtccatacactctctcatcatcctgttccttggattggacttcactaagcaatttatcactcaccttcagacttacatgtgggagttttcacaacagtagttttggaatcattagaacttggattgatttcatcatttaacagaaacaaacagcccaaattactttatcaccatggctttgaacgttgccccagtcagagatacaaaatggctgacattagaagtctgcagacagtttcaaagaggaacatgctcacgctctgatgaagaatgcaaatttgctcatccccccaaaagttgtcaggttgaaaatggaagagtaattgcctgctttgattccctaaagggccgttgttcgagagagaactgcaagtatcttcaccctccgacacacttaaaaactcaactagaaattaatggaaggaacaatttgattcagcaaaaaactgcagcagcaatgcttgcccagcagatgcaatttatgtttccaggaacaccacttcatccagtgcccactttccctgtaggtcccgcgatagggacaaatacggctattagctttgctccttacctagcacctgtaacccctggagttgggttggtcccaacggaaattctgcccaccacgcctgttattgttcccggaagtccaccggtcactgtcccgggctcaactgcaactcagaaacttctcaggactgacaaactggaggtatgcagggagttccagcgaggaaactgtgcccggggagagaccgactgccgctttgcacaccccgcagacagcaccatgatcgacacaagtgacaacaccgtaaccgtttgtatggattacataaaggggcgttgcatgagggagaaatgcaaatattttcaccctcctgcacacttgcaggccaaaatcaaagctgcgcagcaccaagccaaccaagctgcggtggccgcccaggcagccgcggccgcggccacagtcatggcctttccccctggtgctcttcatcctttaccaaagagacaagcacttgaaaaaagcaatggtaccagcgcggtctttaaccccagcgtcttgcactaccagcaggctctcaccagcgcacagttgcagcaacacgccgcgttcattccaacagggtcagttttgtgcatgacacccgctaccagtattgataattctgaaataatcagcagaaacggaatggaatgccaagaatctgcattgagaataactaaacattgttactgtacatactatcctgtttcctcctcaatagaattgccacaaactgcatgctaaataaagatgtagttcttctggacagaccacaactctaagaagctagtgctgctatctcatatatgagtattaaatatggtatgcttagtatattccaacctaagatagttaactacctgagaccagctgtgatgtttaaagacataaaggataaagtttacttttaaagggtttctaaacatagtttctgtcctaggaatattgtcttatctccataactatagctgatgcagaaagtccagccagtttactcatttcgattcagaatatttcaaatttagcaataaacaattagcattagttaaaaaagaaacatattccaagggcaggttcgattctagctctaattactgtcatgtcatttacccactggatcaaagggtatgtttcacttcttgacaatataaatgctgcagcaaagatgagaggtgaagtaaaaccgatacctgtcctgcaggtctaaaatttgaatggaaattcaagcacaagtactggggacacatcaaagtgtggtgtttggtttgcctggagatgccacgttgaatcatgtgattctagattaacattaaatagattgaaaaagaaactttgcacggtatgagcttcataccccaccaaacaaagtcttgaaggtattattttacaagtatatttttaaagttgttttataagagagactttgtagaagtgcctagattttgccagacttcatccagcttgacaagattgagaggcccatgccaacagtctaatctaagagattagtctttcaaactcaccatccagttgcctgttacagaataactcttcttaactaaaaacctagtcaaacaaggaagctgtaggtgaggagatctgtataatattctaatttaagtaagtttgagtttagtcactgcaaatttgactgtgactttaatctaaattactatgtaaacaaaaagtagatagtttcactttttaaaaaatccattactgttttgcatttcaaaagttggattaaagggttgtaactgactacagcatggaaaaaaatagttcttttaattctttcaccttaaagcatattttatgtctcaaaagtataaaaaactttaatacaagtacatacatattatatatacacatacatatatatactatatatggatgaaacatattttaatgttgtttacttttttaaatacttggttgatcttcaaggtaatagcgatacaattaaattttgttcagaaagtttgttttaaagtttattttaagcactatcgtaccaaatatttcatatttcacattttatatgttgcacatagcctatacagtacctacatagtttttaaattattgtttaaaaaacaaaacagctgttataaatgaatattatgtgtaattgtttcaaacatccattttctttgtgaacatattagtgattgaagtattttgacttttgagattgaatgtaaaatattttaaatttgggatcatcgcctgttctgaaaactagatgcaccaaccgtatcattatttgtttgaggaaaaaaagaaatctgcattttaattcatgttggtcaaagtcgaattactatctatttatcttatatcgtagatctgataaccctatctaaaagaaagtcacacgctaaatgtattcttacatagtgcttgtatcgttgcatttgttttaatttgtggaaaagtattgtatctaacttgtattactttggtagtttcatctttatgtattattgatatttgtaattttctcaactataacaatgtagttacgctacaacttgcctaaaacattcaaacttgttttcttttttctgtttttttctttgttaattcatttaaactcattgaaaacatagtatacattactaaaaggtaaattatgggaatcactgaaatatttttgtagattaattgttgtaacattgtctttcttttttttcttttgtttcatgattttgatttttaaaattattagcacacaactattttcagccctttaataatggagcatcaaaaacatcacctgtaaccccaagcaaatatagaagactgtattttttactatgatatccattttccagaattgtgattacaatatgcaaagagtcataaatatgccatttacaataaggaggaggcaaggcaaatgcatagatgtacaaatatatgtacaacagattttgctttttatttatttataatgtaattttatagaataattctgggatttgagaggatctaaaactatttttctgtataaatattatttgccaaaagtttgtttatattcagaagtctgactatgatgaataaatcttaaatgctttgtttaattaaaaaacaaaaatcaccaatatccaagacatgaagatatcagttcaacaaatactgtagttaagagactaactctccacttgtatgggaactacatttcactcttggttttcaggatataacagcacttcaccgaaatattctttcagccataccactggtaacatttctactaaatctttctgtaacacttaaagaattccctcattcattaccttacagtgtaaacaggagtctaatttgtatcaatactatgttttggttgtaatattcagttcactcacccaatgtacaaccaatgaaataaaagaagcatttaaaagg

SEQ ID NO: 155985 - DNA, 4487 bp, Homo sapiens
  Payload ID: 10630
  Gene Symbol: MBNL2
  Gene Name: muscleblind-like splicing regulator 2
  Uniprot ID: Q5VZF2
  ENST ID: ENST00000397601
  CDS Start-End: 731-1816
caggaaactccagcacctcctagaacatcttttgtggaatggcacctcatgggggcccttggatcatgtaccccttgtattcaacagtaaacatcttcctataatcattgcttcattaacgataatgtttatcatttaaaagtgcctgtgtgaagtcacttttgctggaaaactgcagcttgggagctttctttgtattcacatcccactcttctgtcaagtacactttaccctgaccttatgagtggatgaagatacctcagttgtctgactttgccaattgcttaatttcagaatttaaaaaggggaaagaaaaacatcctgctaaaatatgaacatctgagtgtcttattttccaacatcgtcaatagctgtgagcgtcagcattaaatattctcccaaggagtgccatgatattgaagtcactttattaataacagctgtatctgcaaaacagtcaagagactcggacgttgaaagccagagatgacactgagcatgcttttattgcggcctaccatctttaagtgggacatattgattgatgagtgattgcctgtccatacactctctcatcatcctgttccttggattggacttcactaagcaatttatcactcaccttcagacttacatgtgggagttttcacaacagtagttttggaatcattagaacttggattgatttcatcatttaacagaaacaaacagcccaaattactttatcaccatggctttgaacgttgccccagtcagagatacaaaatggctgacattagaagtctgcagacagtttcaaagaggaacatgctcacgctctgatgaagaatgcaaatttgctcatccccccaaaagttgtcaggttgaaaatggaagagtaattgcctgctttgattccctaaagggccgttgttcgagagagaactgcaagtatcttcaccctccgacacacttaaaaactcaactagaaattaatggaaggaacaatttgattcagcaaaaaactgcagcagcaatgcttgcccagcagatgcaatttatgtttccaggaacaccacttcatccagtgcccactttccctgtaggtcccgcgatagggacaaatacggctattagctttgctccttacctagcacctgtaacccctggagttgggttggtcccaacggaaattctgcccaccacgcctgttattgttcccggaagtccaccggtcactgtcccgggctcaactgcaactcagaaacttctcaggactgacaaactggaggtatgcagggagttccagcgaggaaactgtgcccggggagagaccgactgccgctttgcacaccccgcagacagcaccatgatcgacacaagtgacaacaccgtaaccgtttgtatggattacataaaggggcgttgcatgagggagaaatgcaaatattttcaccctcctgcacacttgcaggccaaaatcaaagctgcgcagcaccaagccaaccaagctgcggtggccgcccaggcagccgcggccgcggccacagtcatggcctttccccctggtgctcttcatcctttaccaaagagacaagcacttgaaaaaagcaatggtaccagcgcggtctttaaccccagcgtcttgcactaccagcaggctctcaccagcgcacagttgcagcaacacgccgcgttcattccaacagataattctgaaataatcagcagaaacggaatggaatgccaagaatctgcattgagaataactaaacattgttactgtacatactatcctgtttcctcctcaatagaattgccacaaactgcatgctaaataaagatgtagttcttctggacagaccacaactctaagaagctagtgctgctatctcatatatgagtattaaatatggtatgcttagtatattccaacctaagatagttaactacctgagaccagctgtgatgtttaaagacataaaggataaagtttacttttaaagggtttctaaacatagtttctgtcctaggaatattgtcttatctccataactatagctgatgcagaaagtccagccagtttactcatttcgattcagaatatttcaaatttagcaataaacaattagcattagttaaaaaagaaacatattccaagggcaggttcgattctagctctaattactgtcatgtcatttacccactggatcaaagggtatgtttcacttcttgacaatataaatgctgcagcaaagatgagaggtgaagtaaaaccgatacctgtcctgcaggtctaaaatttgaatggaaattcaagcacaagtactggggacacatcaaagtgtggtgtttggtttgcctggagatgccacgttgaatcatgtgattctagattaacattaaatagattgaaaaagaaactttgcacggtatgagcttcataccccaccaaacaaagtcttgaaggtattattttacaagtatatttttaaagttgttttataagagagactttgtagaagtgcctagattttgccagacttcatccagcttgacaagattgagaggcccatgccaacagtctaatctaagagattagtctttcaaactcaccatccagttgcctgttacagaataactcttcttaactaaaaacctagtcaaacaaggaagctgtaggtgaggagatctgtataatattctaatttaagtaagtttgagtttagtcactgcaaatttgactgtgactttaatctaaattactatgtaaacaaaaagtagatagtttcactttttaaaaaatccattactgttttgcatttcaaaagttggattaaagggttgtaactgactacagcatggaaaaaaatagttcttttaattctttcaccttaaagcatattttatgtctcaaaagtataaaaaactttaatacaagtacatacatattatatatacacatacatatatatactatatatggatgaaacatattttaatgttgtttacttttttaaatacttggttgatcttcaaggtaatagcgatacaattaaattttgttcagaaagtttgttttaaagtttattttaagcactatcgtaccaaatatttcatatttcacattttatatgttgcacatagcctatacagtacctacatagtttttaaattattgtttaaaaaacaaaacagctgttataaatgaatattatgtgtaattgtttcaaacatccattttctttgtgaacatattagtgattgaagtattttgacttttgagattgaatgtaaaatattttaaatttgggatcatcgcctgttctgaaaactagatgcaccaaccgtatcattatttgtttgaggaaaaaaagaaatctgcattttaattcatgttggtcaaagtcgaattactatctatttatcttatatcgtagatctgataaccctatctaaaagaaagtcacacgctaaatgtattcttacatagtgcttgtatcgttgcatttgttttaatttgtggaaaagtattgtatctaacttgtattactttggtagtttcatctttatgtattattgatatttgtaattttctcaactataacaatgtagttacgctacaacttgcctaaaacattcaaacttgttttcttttttctgtttttttctttgttaattcatttaaactcattgaaaacatagtatacattactaaaaggtaaattatgggaatcactgaaatatttttgtagattaattgttgtaacattgtctttcttttttttcttttgtttcatgattttgatttttaaaattattagcacacaactattttcagccctttaataatggagcatcaaaaacatcacctgtaaccccaagcaaatatagaagactgtattttttactatgatatccattttccagaattgtgattacaatatgcaaagagtcataaatatgccatttacaataaggaggaggcaaggcaaatgcatagatgtacaaatatatgtacaacagattttgctttttatttatttataatgtaattttatagaataattctgggatttgagaggatctaaaactatttttctgtataaatattatttgccaaaagtttgtttatattcagaagtctgactatgatgaataaatcttaaatgctttgtttaattaaaaaacaaaaatcaccaatatccaagacatgaagatatcagttcaacaaatactgtagttaagagactaactctccacttgtatgggaactacatttcactcttggttttcaggatataacagcacttcaccgaaatattctttcagccataccactggtaacatttctactaaatctttctgtaacacttaaagaattccctcattcattaccttacagtgtaaacaggagtctaatttgtatcaatactatgttttggttgtaatattcagttcactcacccaatgtacaaccaatgaaataaaagaagcatttaaaagga

SEQ ID NO: 155986 - DNA, 581 bp, Homo sapiens
  Payload ID: 10630
  Gene Symbol: MBNL2
  Gene Name: muscleblind-like splicing regulator 2
  ENST ID: ENST00000449284
  CDS Start-End: 1-318
actcagtcgactgccaaagcaatgaagcgacctctcgaagcaactgtagacctggcctttccccctggtgctcttcatcctttaccaaagagacaagcacttgaaaaaagcaatggtaccagcgcggtctttaaccccagcgtcttgcactaccagcaggctctcaccagcgcacagttgcagcaacacgccgcgttcattccaacagtacccatgatgcacagcgctacgtccgccactgtctctgcagcaacaactcctgcaacaagtgtccccttcgcagcaacagccacagccaatcagataattctgaaataatcagcagaaacggaatggaatgccaagaatctgcattgagaataactaaacattgttactgtacatactatcctgtttcctcctcaatagaattgccacaaactgcatgctaaataaagatgtagttcttctggacagaccacaactctaagaagctagtgctgctatctcatatatgagtattaaatatggtatgcttagtatattccaacctaagatagttaactacctgagaccagctgtgatgtttaaagacataaagg

SEQ ID NO: 155987 - DNA, 2574 bp, Homo sapiens
  Payload ID: 10630
  Gene Symbol: MBNL2
  Gene Name: muscleblind-like splicing regulator 2
  ENST ID: ENST00000469707
  CDS Start-End: 782-1549
tgaaggtaaaattttccagatacggcagacggctttcagagtacaataaacagggaatgagaactatttacatggaagtttctttctcatgatgcggtggagaagcctcggccacttggttctgccagatgttcctggggttactgtaaatgggaaggacaggcagagctaaacaaggtttatcatttaaaagtgcctgtgtgaagtcacttttgctggaaaactgcagcttgggagctttctttgtattcacatcccactcttctgtcaagtacactttaccctgaccttatgagtggatgaagatacctcagttgtctgactttgccaattgcttaatttcagaatttaaaaaggggaaagaaaaacatcctgctaaaatatgaacatctgagtgtcttattttccaacatcgtcaatagctgtgagcgtcagcattaaatattctcccaaggagtgccatgatattgaagtcactttattaataacagctgtatctgcaaaacagtcaagagactcggacgttgaaagccagagatgacactgagcatgcttttattgcggcctaccatctttaagtgggacatattgattgatgagtgattgcctgtccatacactctctcatcatcctgttccttggattggacttcactaagcaatttatcactcaccttcagacttacatgtgggagttttcacaacagtagttttggaatcattagaacttggattgatttcatcatttaacagaaacaaacagcccaaattactttatcaccatggctttgaacgttgccccagtcagagatacaaaatggctgacattagaagtctgcagacagtttcaaagaggaacatgctcacgctctgatgaagaatgcaaatttgctcatccccccaaaagttgtcaggttgaaaatggaagagtaattgcctgctttgattccctaaagggccgttgttcgagagagaactgcaagtatcttcaccctccgacacacttaaaaactcaactagaaattaatggaaggaacaatttgattcagcaaaaaactgcagcagcaatgcttgcccagcagatgcaatttatgtttccaggaacaccacttcatccagtgcccactttccctgtaggtcccgcgatagggacaaatacggctattagctttgctccttacctagcacctgtaacccctggagttgggttggtcccaacggaaattctgcccaccacgcctgttattgttcccggaagtccaccggtcactgtcccgggctcaactgcaactcagaaacttctcaggactgacaaactggaggtatgcagggagttccagcgaggaaactgtgcccggggagagaccgactgccgctttgcacaccccgcagacagcaccatgatcgacacaagtgacaacaccgtaaccgtttgtatggattacataaaggggcgttgcatgagggagaaatgcaaatattttcaccctcctgcacacttgcaggccaaaatcaaagctgcgcagccgcggccgcggccacagtcatgactcagtcgactgccaaagcaatgaagcgacctctcgaagcaactgtagacctggcctttccccctggtgctcttcatcctttaccaaagagacaagcacttgaaaaaagcaatggtaccagcgcggtctttaaccccagcgtcttgcactaccagcaggctctcaccagcgcacagttgcagcaacacgccgcgttcattccaacagggtcagttttgtgcatgacacccgctaccagtattgtacccatgatgcacagcgctacgtccgccactgtctctgcagcaacaactcctgcaacaagtgtccccttcgcagcaacagccacagccaatcagataattctgaaataatcagcagaaacggaatggaatgccaagaatctgcattgagaataactaaacattgttactgtacatactatcctgtttcctcctcaatagaattgccacaaactgcatgctaaataaagatgtagttcttctggacagaccacaactctaagaagctagtgctgctatctcatatatgagtattaaatatggtatgcttagtatattccaacctaagatagttaactacctgagaccagctgtgatgtttaaagacataaaggataaagtttacttttaaagggtttctaaacatagtttctgtcctaggaatattgtcttatctccataactatagctgatgcagaaagtccagccagtttactcatttcgattcagaatatttcaaatttagcaataaacaattagcattagttaaaaaagaaacatattccaagggcaggttcgattctagctctaattactgtcatgtcatttacccactggatcaaagggtatgtttcacttcttgacaatataaatgctgcagcaaagatgagaggtgaagtaaaaccgatacctgtcctgcaggtctaaaatttgaatggaaattcaagcacaagtactggggacacatcaaagtgtggtgtttggtttgcctggagatgccacgttgaatcatgtgattctaga

SEQ ID NO: 155988 - DNA, 1575 bp, Homo sapiens
  Payload ID: 10631
  Gene Symbol: MBNL3
  Gene Name: muscleblind-like splicing regulator 3
  Uniprot ID: Q9NUK0
  ENST ID: ENST00000370839
  CDS Start-End: 80-1084
aattcatttttaatcctttaatagtccacagtaatattgtcctaaagagggtacattggattttaattttgctttcaatatgacggctgtcaatgttgccctgattcgtgataccaagtggctgactttagaagtctgtagagaatttcagagaggaacttgctctcgagctgatgcagattgcaagtttgcccatccaccaagagtttgccatgtggaaaatggtcgtgtggtggcctgttttgattctctaaagggtcggtgtacccgagagaactgcaagtaccttcaccctcctccacacttaaaaacgcagctggagattaatgggcggaacaatctgattcaacagaagactgccgcagccatgttcgcccagcagatgcagcttatgctccaaaacgctcaaatgtcatcacttggttcttttcctatgactccatcaattccagctaatcctcccatggctttcaatccttacataccacatcctgggatgggcctcgttcctgcagaacttgtaccaaatacacctgttctgattcctggaaacccacctcttgcaatgccaggagctgttggcccaaaactgatgcgttcagataaactggaggtttgccgagaatttcagcgtggaaattgtacccgtggggagaatgattgccgctatgctcaccctactgatgcttccatgattgaagcgagtgataatactgtgacaatctgcatggattacatcaaaggtcgatgctcgcgggagaaatgcaagtactttcatcctcctgcacacttgcaagccagactcaaggcagctcatcatcagatgaaccattcagctgcctctgccatggctctgactaacctgcagctcccacagccggcatttatccctgcagggccaatactgtgcatggcacccgcttcaaatattgtgcccatgatgcacggtgctacacctaccactgtgtctgcagcaacaacacctgccaccagcgttccgttcgctgcaccaactacaggcaatcagataccccaattatcaatagatgaactgaatagcagcatgtttgtttcacagatgtagaagttctcagtagaacactgaaattctgaacagcagagttatggagtatcagaatctttccatggaaacctccatatggcctttctatatatattctcgtatgtcttattctaccaacacaacaataagcgtgttgcagtcaatgtattaagcaaagcaaacctgccagccagcaaattcaaataaaaaataaagcattaaaaatcaatggagatgttaaaacaacacaaatagaaaactagtaactaccatccatcctatttgaattatcaagcagaacatgaccataaaatttggtaacttgttacattactctttgtgattttctaataaccatgctaagtgtatttccacagtgagcttttggcttactatatacattcttggtggataaattgttcatctgtttttgaagtgttaccttactattttgtttacaagatagtctattgggttgattcaggatgtaacaaatatattcagtaccattt

SEQ ID NO: 155989 - DNA, 1643 bp, Homo sapiens
  Payload ID: 10631
  Gene Symbol: MBNL3
  Gene Name: muscleblind-like splicing regulator 3
  Uniprot ID: Q9NUK0
  ENST ID: ENST00000370844
  CDS Start-End: 405-1181
tgcccgcactccgagcgtgagccgcagcgcgactttttggcgctctttgggagcagtgagagagaggcggaggccagagagtccggggtgggcgcgggagccggggcggcccttggccgcattcccgcccgtcccgcagcggcgcgcggagccagtggctgactttagaagtctgtagagaatttcagagaggaacttgctctcgagctgatgcagattgcaagtttgcccatccaccaagagtttgccatgtggaaaatggtcgtgtggtggcctgttttgattctctaaagggtcggtgtacccgagagaactgcaagtaccttcaccctcctccacacttaaaaacgcagctggagattaatgggcggaacaatctgattcaacagaagactgccgcagccatgttcgcccagcagatgcagcttatgctccaaaacgctcaaatgtcatcacttggttcttttcctatgactccatcaattccagctaatcctcccatggctttcaatccttacataccacatcctgggatgggcctcgttcctgcagaacttgtaccaaatacacctgttctgattcctggaaacccacctcttgcaatgccaggagctgttggcccaaaactgatgcgttcagataaactggaggtttgccgagaatttcagcgtggaaattgtacccgtggggagaatgattgccgctatgctcaccctactgatgcttccatgattgaagcgagtgataatactgtgacaatctgcatggattacatcaaaggtcgatgctcgcgggagaaatgcaagtactttcatcctcctgcacacttgcaagccagactcaaggcagctcatcatcagatgaaccattcagctgcctctgccatggccctgcagcctggtacactgcaactgataccaaagagatcagcactggaaaagcccaatggtgccaccccggtctttaatcccactgttttccactgccaacaggctctgactaacctgcagctcccacagccggcatttatccctgcagggccaatactgtgcatggcacccgcttcaaatattgtgcccatgatgcacggtgctacacctaccactgtgtctgcagcaacaacacctgccaccagcgttccgttcgctgcaccaactacaggcaatcagctgaaattctgaacagcagagttatggagtatcagaatctttccatggaaacctccatatggcctttctatatatattctcgtatgtcttattctaccaacacaacaataagcgtgttgcagtcaatgtattaagcaaagcaaacctgccagccagcaaattcaaataaaaaataaagcattaaaaatcaatggagatgttaaaacaacacaaatagaaaactagtaactaccatccatcctatttgaattatcaagcagaacatgaccataaaatttggtaacttgttacattactctttgtgattttctaataaccatgctaagtgtatttccacagtgagcttttggcttactatatacattcttggtggataaattgttcatctgtttttgaagtgttaccttactattttgtttacaagatagtctattgggttgattcaggatgtaacaaatatattcagtaccattt

SEQ ID NO: 155990 - DNA, 1444 bp, Homo sapiens
  Payload ID: 10631
  Gene Symbol: MBNL3
  Gene Name: muscleblind-like splicing regulator 3
  Uniprot ID: Q9NUK0
  ENST ID: ENST00000370849
  CDS Start-End: 67-981
ggggctgagagtgtcttctactttactctgggcaaatgaaggcctgggagagcctgggctgattccatggagagggcttctaagaatcttaagggtcggtgtacccgagagaactgcaagtaccttcaccctcctccacacttaaaaacgcagctggagattaatgggcggaacaatctgattcaacagaagactgccgcagccatgttcgcccagcagatgcagcttatgctccaaaacgctcaaatgtcatcacttggttcttttcctatgactccatcaattccagctaatcctcccatggctttcaatccttacataccacatcctgggatgggcctcgttcctgcagaacttgtaccaaatacacctgttctgattcctggaaacccacctcttgcaatgccaggagctgttggcccaaaactgatgcgttcagataaactggaggtttgccgagaatttcagcgtggaaattgtacccgtggggagaatgattgccgctatgctcaccctactgatgcttccatgattgaagcgagtgataatactgtgacaatctgcatggattacatcaaaggtcgatgctcgcgggagaaatgcaagtactttcatcctcctgcacacttgcaagccagactcaaggcagctcatcatcagatgaaccattcagctgcctctgccatggccctgcagcctggtacactgcaactgataccaaagagatcagcactggaaaagcccaatggtgccaccccggtctttaatcccactgttttccactgccaacaggctctgactaacctgcagctcccacagccggcatttatccctgcagggccaatactgtgcatggcacccgcttcaaatattgtgcccatgatgcacggtgctacacctaccactgtgtctgcagcaacaacacctgccaccagcgttccgttcgctgcaccaactacaggcaatcagctgaaattctgaacagcagagttatggagtatcagaatctttccatggaaacctccatatggcctttctatatatattctcgtatgtcttattctaccaacacaacaataagcgtgttgcagtcaatgtattaagcaaagcaaacctgccagccagcaaattcaaataaaaaataaagcattaaaaatcaatggagatgttaaaacaacacaaatagaaaactagtaactaccatccatcctatttgaattatcaagcagaacatgaccataaaatttggtaacttgttacattactctttgtgattttctaataaccatgctaagtgtatttccacagtgagcttttggcttactatatacattcttggtggataaattgttcatctgtttttgaagtgttaccttactattttgtttacaagatagtctattgggttgattcaggatgtaacaaatatattcagtaccatttc

SEQ ID NO: 155991 - DNA, 2661 bp, Homo sapiens
  Payload ID: 10631
  Gene Symbol: MBNL3
  Gene Name: muscleblind-like splicing regulator 3
  Uniprot ID: Q9NUK0
  ENST ID: ENST00000370853
  CDS Start-End: 80-1144
aattcatttttaatcctttaatagtccacagtaatattgtcctaaagagggtacattggattttaattttgctttcaatatgacggctgtcaatgttgccctgattcgtgataccaagtggctgactttagaagtctgtagagaatttcagagaggaacttgctctcgagctgatgcagattgcaagtttgcccatccaccaagagtttgccatgtggaaaatggtcgtgtggtggcctgttttgattctctaaagggtcggtgtacccgagagaactgcaagtaccttcaccctcctccacacttaaaaacgcagctggagattaatgggcggaacaatctgattcaacagaagactgccgcagccatgttcgcccagcagatgcagcttatgctccaaaacgctcaaatgtcatcacttggttcttttcctatgactccatcaattccagctaatcctcccatggctttcaatccttacataccacatcctgggatgggcctcgttcctgcagaacttgtaccaaatacacctgttctgattcctggaaacccacctcttgcaatgccaggagctgttggcccaaaactgatgcgttcagataaactggaggtttgccgagaatttcagcgtggaaattgtacccgtggggagaatgattgccgctatgctcaccctactgatgcttccatgattgaagcgagtgataatactgtgacaatctgcatggattacatcaaaggtcgatgctcgcgggagaaatgcaagtactttcatcctcctgcacacttgcaagccagactcaaggcagctcatcatcagatgaaccattcagctgcctctgccatggccctgcagcctggtacactgcaactgataccaaagagatcagcactggaaaagcccaatggtgccaccccggtctttaatcccactgttttccactgccaacaggctctgactaacctgcagctcccacagccggcatttatccctgcagggccaatactgtgcatggcacccgcttcaaatattgtgcccatgatgcacggtgctacacctaccactgtgtctgcagcaacaacacctgccaccagcgttccgttcgctgcaccaactacaggcaatcagctgaaattctgaacagcagagttatggagtatcagaatctttccatggaaacctccatatggcctttctatatatattctcgtatgtcttattctaccaacacaacaataagcgtgttgcagtcaatgtattaagcaaagcaaacctgccagccagcaaattcaaataaaaaataaagcattaaaaatcaatggagatgttaaaacaacacaaatagaaaactagtaactaccatccatcctatttgaattatcaagcagaacatgaccataaaatttggtaacttgttacattactctttgtgattttctaataaccatgctaagtgtatttccacagtgagcttttggcttactatatacattcttggtggataaattgttcatctgtttttgaagtgttaccttactattttgtttacaagatagtctattgggttgattcaggatgtaacaaatatattcagtaccatttcttgtgttgtattgtgttgtgctgtgttaggtttttacatactgtagtgttttgctgtatatgtgtggtgtttgatttcaactaaagtgttattagtggggaacagaagtatatgtgcttaagaacatgacaggttcatgcaaatatgctctctttctttagaatatttctgtaggtttcttgggactgacatttaaaacgcctcacttttgaatgtgcacaaaacctgctcattaacatgcatgtgtataatttgtacctgcagatctgatgttgcataatacaatcaaattactagattttttaaagagagaaataattacctgcacaaagcagagaacttcataaaacattaacccctaattcactcttcttaaatagcttggcaaataagactttacctttaaatgaatttctcagcatttatactaaaaattatgtaaagtgctcattagattttttgtgtgtgtggcttgagaatcccatctcctaaattgagtgtctaaaactgagccatttgtcatcttcagctgagaaactggtacttgggagcttaaaaatatgctaattacaagttataaatcaaacggagagatgggggcatggagatagtttttacgtactggaggaaagtgtgtaaaaccatggcaatgtcaccttttacacaaatgccattttccaaatgcaaatggctcatgctctttagactactctttgaataacaagtaagatgcaatctagcaaaagtcagtcagggtgaaagagaattggttgcaaatgaggacttccctccccaaatggacagtcttctctgttgatcacagagggagcctgagtacaggcttggagaaatggctaggacagggaacagggaagcacttacaattattccttgatttattcaaaagaactgggaaagatggttgtagttgtctttagcttcggttcaactgagtttcgttttgttaaacagttcagtgaaggagaaagcacctgtgatatatggcaagtgtccccctgcccaaactttaacatcagaccctctcacatcataa

SEQ ID NO: 155992 - DNA, 8760 bp, Homo sapiens
  Payload ID: 10631
  Gene Symbol: MBNL3
  Gene Name: muscleblind-like splicing regulator 3
  ENST ID: ENST00000370857
  CDS Start-End: 67-1095
tcctttaatagtccacagtaatattgtcctaaagagggtacattggattttaattttgctttcaatatgacggctgtcaatgttgccctgattcgtgataccaagtggctgactttagaagtctgtagagaatttcagagaggaacttgctctcgagctgatgcagattgcaagtttgcccatccaccaagagtttgccatgtggaaaatggtcgtgtggtggcctgttttgattctctaaagggtcggtgtacccgagagaactgcaagtaccttcaccctcctccacacttaaaaacgcagctggagattaatgggcggaacaatctgattcaacagaagactgccgcagccatgttcgcccagcagatgcagcttatgctccaaaacgctcaaatgtcatcacttggttcttttcctatgactccatcaattccagctaatcctcccatggctttcaatccttacataccacatcctgggatgggcctcgttcctgcagaacttgtaccaaatacacctgttctgattcctggaaacccacctcttgcaatgccaggagctgttggcccaaaactgatgcgttcagataaactggaggtttgccgagaatttcagcgtggaaattgtacccgtggggagaatgattgccgctatgctcaccctactgatgcttccatgattgaagcgagtgataatactgtgacaatctgcatggattacatcaaaggtcgatgctcgcgggagaaatgcaagtactttcatcctcctgcacacttgcaagccagactcaaggcagctcatcatcagatgaaccattcagctgcctctgccatggccctgcagcctggtacactgcaactgataccaaagagatcagcactggaaaagcccaatggtgccaccccggtctttaatcccactgttttccactgccaacaggctctgactaacctgcagctcccacagccggcatttatccctgcagtgcccatgatgcacggtgctacacctaccactgtgtctgcagcaacaacacctgccaccagcgttccgttcgctgcaccaactacaggcaatcagctgaaattctgaacagcagagttatggagtatcagaatctttccatggaaacctccatatggcctttctatatatattctcgtatgtcttattctaccaacacaacaataagcgtgttgcagtcaatgtattaagcaaagcaaacctgccagccagcaaattcaaataaaaaataaagcattaaaaatcaatggagatgttaaaacaacacaaatagaaaactagtaactaccatccatcctatttgaattatcaagcagaacatgaccataaaatttggtaacttgttacattactctttgtgattttctaataaccatgctaagtgtatttccacagtgagcttttggcttactatatacattcttggtggataaattgttcatctgtttttgaagtgttaccttactattttgtttacaagatagtctattgggttgattcaggatgtaacaaatatattcagtaccatttcttgtgttgtattgtgttgtgctgtgttaggtttttacatactgtagtgttttgctgtatatgtgtggtgtttgatttcaactaaagtgttattagtggggaacagaagtatatgtgcttaagaacatgacaggttcatgcaaatatgctctctttctttagaatatttctgtaggtttcttgggactgacatttaaaacgcctcacttttgaatgtgcacaaaacctgctcattaacatgcatgtgtataatttgtacctgcagatctgatgttgcataatacaatcaaattactagattttttaaagagagaaataattacctgcacaaagcagagaacttcataaaacattaacccctaattcactcttcttaaatagcttggcaaataagactttacctttaaatgaatttctcagcatttatactaaaaattatgtaaagtgctcattagattttttgtgtgtgtggcttgagaatcccatctcctaaattgagtgtctaaaactgagccatttgtcatcttcagctgagaaactggtacttgggagcttaaaaatatgctaattacaagttataaatcaaacggagagatgggggcatggagatagtttttacgtactggaggaaagtgtgtaaaaccatggcaatgtcaccttttacacaaatgccattttccaaatgcaaatggctcatgctctttagactactctttgaataacaagtaagatgcaatctagcaaaagtcagtcagggtgaaagagaattggttgcaaatgaggacttccctccccaaatggacagtcttctctgttgatcacagagggagcctgagtacaggcttggagaaatggctaggacagggaacagggaagcacttacaattattccttgatttattcaaaagaactgggaaagatggttgtagttgtctttagcttcggttcaactgagtttcgttttgttaaacagttcagtgaaggagaaagcacctgtgatatatggcaagtgtccccctgcccaaactttaacatcagaccctctcacatcataaccaagcctcttttatgcttgtttggattcgtttgcctttatatatgtttgaaaatgacaatagaaagggttttatcaccctttgaatgagacagagtggctatactccacagagctcagctgagttcacattactaatatttatgaaagaattttacaaccaaataattcctgtggtgtgtgacatatctcatccactctactcatttattaatgttattatacagtggtggaaacacatgacattttacatcaagtaatagatttaatattttctagtaaataggcgctcttccaccagaaagtataaaaccatcatatacatatatatatatatatataatggtttttctccttcatgaaaatgacaagtaaaaagcaaatctgattgaggataccttaagctggctagaagtgtttgaatcacagaacaatggaattagcaaaatcctttttatagttgatggaactgaatccaggggcatatgacttgcccaaggctaccttagccattgtgggacccagaaatatctcctgcttcccattgttcctccttttcacattgtttttgcttcagaacatttgatgctctcttccaaagcagacccatttggctcagaatataagagagcaaaattagctttctgggaattgatactctgttgatcttaattatccatccaaatcctgatcaacagtgctttctaaacagccttgcttgtattgagtcattgtcagctgttgacaatgttgcgtggaattagagatcaagagttgtcctgacctttacctatggactctttgaaccagttaatttctatttctgaaatcttaacattgctatagaagaaagtagtgtatgcctttttgaaattcatcatgtatggaactgagttttgtatgatccgtgccagtgcctctccagaagggcagatctgattacatgaatccaggagggatgcacctgagctagtctggatatattccttaaaggagacaagaacttttttgtgcaaaatgaacttttgtgtagtttgacatctgcatgcagtgaactgtctcacttaactttttcaactttgggcaaagatatacataaaccatagataatagacctacagtacagctgttttcatgttgcgttaagcactggaagacattaacaatgacttaccttaaagtaaaaggttccgtgaggggtatttagggccactgtatttttggtgccacaattttctacattgttggcattttaaaagttgttttctaaatgaacttaaagaaagaaagctcaaagccctaaagttttgatcaaattcaatagagttttcagaaaaaaatacaattttaagatagcactctttaaactagatgtgcaatgacttattcaaattatctttattcaagaaaagagaaaagaagaaagataagtcattagactataaatttccatttaaaaagacaagtcacaaaactaatcagtgactctaaacaaaaatttactggatgaattgtatatataaaattctaatcacttatgattcttagttaacattttataagctttgtattttacaggggcctctatttatccaaatttattgtttttgtccatttttctcagccttttgcaaaaaatatgcaagagtgctgaaacttggataaaacgggtcatgtatacagagaaaataatctaaaagttatctttaagagggttttagtagtgtcaactttttaaaaaagtactatgtgaccataacatacgtatattttaaagagggattaagattaaattaaaataaatggattcataaaattgctatttaaatacagtatttacttttgtaattgaagcatgattccacaaccagctgtggcattttatttcacttttctagatcagaggctttaatttgtagttaatcatgatgtggaaagtcatcttctctctactccatcaatttttttcatccgtttttgaacatgctgaagcactttgatcttgccataagtgttgtcctataccactaggtggtgttcactaatgggagggcctcagctcaccggctctccaatttgggaaaaagcaagtacctcctccctaccatcagcagaaactgaatgaaattaatctttgcaacttgaatctgttttaagtagcattaccaataagcatagtggtatctgaataaggaatgacatttacattacattttattaaataagagagaaagttaatgtgctacttgaaatgttatttggttctttgtccccctcattgcagagtatagataaggatgctcttaggtaaaatgcagccacaagttttccgagttcctttagtctgtagggtaggctatgaggtacagaatgattagaaactgaaatcctcattatttttctctcaaatacatttcacatacattgaaacagaaataggcaaaatttatgagggaaatctgatttcccaattctgatgaatagatatactaagacagtagccttgtttaaccagtgcctgtagaaggcactagaataaatagcatgtccaagagtataacaactttttttgtaaatttagttactagcctaatcaaactgtaaatataactcactaattggtaccatattttcatttttcttattgttcatctttaaggtttcattttattgcttttttgtagctctaagtaactaatcaatttaatttcaaaggaaagttaaagaaagtttaagcttttactgcatggattctgcccgcctagctaggttctgaactgacactgaagtatgacaagatacagattatagtccaaaactatcctttacagttcacaatttaagaacaaatttaactttatatacaaataataattgttatctaattatatttagttgttgctttggcaacaaaattacaacatggctacctttagacatttgtgtatgtgaacattttacttgtaaactataggtgatttgtgacagtatgagcctgtagaaaatacagctcaaaactatgaaaacagacatggttgagttcttttttaatcccaaaggcccatatataaaagctgaatttgtgtccttgtgtgactttttgtgaaaaagtttataacacatggattctagaatcaggctttatagtttatagaatttgttgtgtggatagggttattccacagtatttagacttcaaaacgcaatcattgcatttttaatacattacctaactttttttataacttaattcaaaattaccccattcaagtggcatagctgtagctgcaaaaattctgttttctggaattacatgagcaaatatagctatatgaggattaatgtatgactaaagcctcttttgaaattaattcatatttttaaaactatacataaagatactgtggaatgaccccttaacagtgtttaagaaacatatgctgcagttaattgactgtctcagttagggtgcggatgtgtgagacacaccttttttgcacttatgtacatagtccatgaaagcaatccttggagctttttttaaatgtaagaagtctgtgataatagtggaaaagttagtaagagagagttatttctaaggctttgaaaaggagggtgtttttgctctaagacttaactaaagcataatgttgctttgctgttacggaggctttctagtttgctacaggtcaccaaaagagaaggctagtaacaggtaacaggtcagcctcagctaacagcactgaacaagagtagaataacttcatcttttaacaagatcattagcaaagattgtttgctttttaaattaatcccccctataaacacacacacacgtgtgcacacacacacacacacacacacaccgggcagtttctagaacaagttttcctttttcagtggttgtaagcagtgaaatacctcatgtattacaagatagatattaccgttatgatagaataagatttcatctttcacagaaagtgatcagctgatatatgtgtcagttaaaatgtttatcaattaataggtatttaagtgacaaattgttaatgttgaccattgttcctcctttaagatccagtaaccaaaaccaaatcggtaaccattgaaagatgatatttaacagttaaggatggccagcatagggccgttcattcccttcaacaaagggaaaaaaaatgctcctggcacaactttataactggcttcatttacattatacctgttcagtggaagctgttttttgacctacctttaccagattacaaagtagttaactgtgccacttcagcctcccactgttttgttttaactaaacagaagagaaccagccaaaatcttacgtaacacaggagctggaagacaatgtttcaatctgaccatctctgccaattttagctcccacgccacctatagatagccagttaactttctttttgcccccaggcaatgaggcctagaagaggtcaaggttagaaaggttaagcatttgatcactacaggtacttgtagtacctagagaaggaacccatcctggggttggtggagttggtattgctactcgttttgatagttctcatttacagagaaagaaaaataagccaaagccagaaagcaatccaagccttacagttgtccaatacctcagggccagttggctagaattttcttttccctcagcccataatcacttagagttagccatacaacaaacagcctgacaatctgaccagcatttccattgatataaaatgtaagcattccttcattctgtagttaggaactccaacttcagccttatctccaacataatttcccaatttaacctatgtactgatatggacatttctttgtgaatatgccagattcaagaatgtatttttctaaggtcaatagagatacgacattttaagtcaggaaaaatcacctataaattagtaggaataactgtagaagcatcacaaaagataccccatgaatagatggcatggtgtgcatgctgacagccacggggtcatactctggagtttcaacatagaggctgtgtttcaataaataagacaaattggggaattaagtaaaacaaatggatgtaactgaggcccccccccaaaaaaagccctctattactaacctcaagaaaatatttagtttgactaatttgtgcagtttccagctcttctacttgttcttgcctgtaagagaatcactaatactcaaaagctggattattgaagagaaattttatctttaaatagaatccatccacaattatggtatatgtaaaaaaaatgtatgactatgaaataagtcgcagctctttgcagatattgcaaaatccttgctaggcatctacatcatattagttttttaaaaaatacctctgtaacaagacctaaaagtaacctaactattaagcagtgcttttttctctgaaaacacacaacctaaagatttatctgtcataaaactgcatggttccagagctttatttctgtgtagagatgctatttgttagtgatggaaacaaattactttgttgctatgtcttttgtgtctagcagttgagagaatgatatgaccatcatatcactggattatgggaatgaatgcccttttcaaaataaacttatttattaatattttaatattattttaatattataatattaataatattttaatattattgttgctgctttaacagaaaatgagccatttgtccccatgctcccaaattacaatgatttaaattaaaaaacttttgaaggattttcctaaatatattcttttttaaaggactaactttgtgcattcatataacaacaatttggaataatgtgaaaaatggaggcacataatttgggtggaaaatggcgattaaaaatatatataagaaaattattagccatgtgtaacatatttaaataatgaccagaatatttcatgagtaccaactcttcccatagtaattttcctccaaaatgcaatagctcattccctcaactgcagacgctttgattttttttcaagttatagtgctgtagtgcttgtttatgtttaaaagtgcacattatgcagctcattttagtatgctacttctatgtttattttttgttcttctaataaaatgcataaacttcttg

SEQ ID NO: 155993 - DNA, 11263 bp, Homo sapiens
  Payload ID: 10631
  Gene Symbol: MBNL3
  Gene Name: muscleblind-like splicing regulator 3
  Uniprot ID: Q9NUK0
  ENST ID: ENST00000394311
  CDS Start-End: 138-914
ccttaaatttccttgcagctgatcagggtcggtgtacccgagagaactgcaagtaccttcaccctcctccacacttaaaaacgcagctggagattaatgggcggaacaatctgattcaacagaagactgccgcagccatgttcgcccagcagatgcagcttatgctccaaaacgctcaaatgtcatcacttggttcttttcctatgactccatcaattccagctaatcctcccatggctttcaatccttacataccacatcctgggatgggcctcgttcctgcagaacttgtaccaaatacacctgttctgattcctggaaacccacctcttgcaatgccaggagctgttggcccaaaactgatgcgttcagataaactggaggtttgccgagaatttcagcgtggaaattgtacccgtggggagaatgattgccgctatgctcaccctactgatgcttccatgattgaagcgagtgataatactgtgacaatctgcatggattacatcaaaggtcgatgctcgcgggagaaatgcaagtactttcatcctcctgcacacttgcaagccagactcaaggcagctcatcatcagatgaaccattcagctgcctctgccatggccctgcagcctggtacactgcaactgataccaaagagatcagcactggaaaagcccaatggtgccaccccggtctttaatcccactgttttccactgccaacaggctctgactaacctgcagctcccacagccggcatttatccctgcagggccaatactgtgcatggcacccgcttcaaatattgtgcccatgatgcacggtgctacacctaccactgtgtctgcagcaacaacacctgccaccagcgttccgttcgctgcaccaactacaggcaatcagctgaaattctgaacagcagagttatggagtatcagaatctttccatggaaacctccatatggcctttctatatatattctcgtatgtcttattctaccaacacaacaataagcgtgttgcagtcaatgtattaagcaaagcaaacctgccagccagcaaattcaaataaaaaataaagcattaaaaatcaatggagatgttaaaacaacacaaatagaaaactagtaactaccatccatcctatttgaattatcaagcagaacatgaccataaaatttggtaacttgttacattactctttgtgattttctaataaccatgctaagtgtatttccacagtgagcttttggcttactatatacattcttggtggataaattgttcatctgtttttgaagtgttaccttactattttgtttacaagatagtctattgggttgattcaggatgtaacaaatatattcagtaccatttcttgtgttgtattgtgttgtgctgtgttaggtttttacatactgtagtgttttgctgtatatgtgtggtgtttgatttcaactaaagtgttattagtggggaacagaagtatatgtgcttaagaacatgacaggttcatgcaaatatgctctctttctttagaatatttctgtaggtttcttgggactgacatttaaaacgcctcacttttgaatgtgcacaaaacctgctcattaacatgcatgtgtataatttgtacctgcagatctgatgttgcataatacaatcaaattactagattttttaaagagagaaataattacctgcacaaagcagagaacttcataaaacattaacccctaattcactcttcttaaatagcttggcaaataagactttacctttaaatgaatttctcagcatttatactaaaaattatgtaaagtgctcattagattttttgtgtgtgtggcttgagaatcccatctcctaaattgagtgtctaaaactgagccatttgtcatcttcagctgagaaactggtacttgggagcttaaaaatatgctaattacaagttataaatcaaacggagagatgggggcatggagatagtttttacgtactggaggaaagtgtgtaaaaccatggcaatgtcaccttttacacaaatgccattttccaaatgcaaatggctcatgctctttagactactctttgaataacaagtaagatgcaatctagcaaaagtcagtcagggtgaaagagaattggttgcaaatgaggacttccctccccaaatggacagtcttctctgttgatcacagagggagcctgagtacaggcttggagaaatggctaggacagggaacagggaagcacttacaattattccttgatttattcaaaagaactgggaaagatggttgtagttgtctttagcttcggttcaactgagtttcgttttgttaaacagttcagtgaaggagaaagcacctgtgatatatggcaagtgtccccctgcccaaactttaacatcagaccctctcacatcataaccaagcctcttttatgcttgtttggattcgtttgcctttatatatgtttgaaaatgacaatagaaagggttttatcaccctttgaatgagacagagtggctatactccacagagctcagctgagttcacattactaatatttatgaaagaattttacaaccaaataattcctgtggtgtgtgacatatctcatccactctactcatttattaatgttattatacagtggtggaaacacatgacattttacatcaagtaatagatttaatattttctagtaaataggcgctcttccaccagaaagtataaaaccatcatatacatatatatatatatatataatggtttttctccttcatgaaaatgacaagtaaaaagcaaatctgattgaggataccttaagctggctagaagtgtttgaatcacagaacaatggaattagcaaaatcctttttatagttgatggaactgaatccaggggcatatgacttgcccaaggctaccttagccattgtgggacccagaaatatctcctgcttcccattgttcctccttttcacattgtttttgcttcagaacatttgatgctctcttccaaagcagacccatttggctcagaatataagagagcaaaattagctttctgggaattgatactctgttgatcttaattatccatccaaatcctgatcaacagtgctttctaaacagccttgcttgtattgagtcattgtcagctgttgacaatgttgcgtggaattagagatcaagagttgtcctgacctttacctatggactctttgaaccagttaatttctatttctgaaatcttaacattgctatagaagaaagtagtgtatgcctttttgaaattcatcatgtatggaactgagttttgtatgatccgtgccagtgcctctccagaagggcagatctgattacatgaatccaggagggatgcacctgagctagtctggatatattccttaaaggagacaagaacttttttgtgcaaaatgaacttttgtgtagtttgacatctgcatgcagtgaactgtctcacttaactttttcaactttgggcaaagatatacataaaccatagataatagacctacagtacagctgttttcatgttgcgttaagcactggaagacattaacaatgacttaccttaaagtaaaaggttccgtgaggggtatttagggccactgtatttttggtgccacaattttctacattgttggcattttaaaagttgttttctaaatgaacttaaagaaagaaagctcaaagccctaaagttttgatcaaattcaatagagttttcagaaaaaaatacaattttaagatagcactctttaaactagatgtgcaatgacttattcaaattatctttattcaagaaaagagaaaagaagaaagataagtcattagactataaatttccatttaaaaagacaagtcacaaaactaatcagtgactctaaacaaaaatttactggatgaattgtatatataaaattctaatcacttatgattcttagttaacattttataagctttgtattttacaggggcctctatttatccaaatttattgtttttgtccatttttctcagccttttgcaaaaaatatgcaagagtgctgaaacttggataaaacgggtcatgtatacagagaaaataatctaaaagttatctttaagagggttttagtagtgtcaactttttaaaaaagtactatgtgaccataacatacgtatattttaaagagggattaagattaaattaaaataaatggattcataaaattgctatttaaatacagtatttacttttgtaattgaagcatgattccacaaccagctgtggcattttatttcacttttctagatcagaggctttaatttgtagttaatcatgatgtggaaagtcatcttctctctactccatcaatttttttcatccgtttttgaacatgctgaagcactttgatcttgccataagtgttgtcctataccactaggtggtgttcactaatgggagggcctcagctcaccggctctccaatttgggaaaaagcaagtacctcctccctaccatcagcagaaactgaatgaaattaatctttgcaacttgaatctgttttaagtagcattaccaataagcatagtggtatctgaataaggaatgacatttacattacattttattaaataagagagaaagttaatgtgctacttgaaatgttatttggttctttgtccccctcattgcagagtatagataaggatgctcttaggtaaaatgcagccacaagttttccgagttcctttagtctgtagggtaggctatgaggtacagaatgattagaaactgaaatcctcattatttttctctcaaatacatttcacatacattgaaacagaaataggcaaaatttatgagggaaatctgatttcccaattctgatgaatagatatactaagacagtagccttgtttaaccagtgcctgtagaaggcactagaataaatagcatgtccaagagtataacaactttttttgtaaatttagttactagcctaatcaaactgtaaatataactcactaattggtaccatattttcatttttcttattgttcatctttaaggtttcattttattgcttttttgtagctctaagtaactaatcaatttaatttcaaaggaaagttaaagaaagtttaagcttttactgcatggattctgcccgcctagctaggttctgaactgacactgaagtatgacaagatacagattatagtccaaaactatcctttacagttcacaatttaagaacaaatttaactttatatacaaataataattgttatctaattatatttagttgttgctttggcaacaaaattacaacatggctacctttagacatttgtgtatgtgaacattttacttgtaaactataggtgatttgtgacagtatgagcctgtagaaaatacagctcaaaactatgaaaacagacatggttgagttcttttttaatcccaaaggcccatatataaaagctgaatttgtgtccttgtgtgactttttgtgaaaaagtttataacacatggattctagaatcaggctttatagtttatagaatttgttgtgtggatagggttattccacagtatttagacttcaaaacgcaatcattgcatttttaatacattacctaactttttttataacttaattcaaaattaccccattcaagtggcatagctgtagctgcaaaaattctgttttctggaattacatgagcaaatatagctatatgaggattaatgtatgactaaagcctcttttgaaattaattcatatttttaaaactatacataaagatactgtggaatgaccccttaacagtgtttaagaaacatatgctgcagttaattgactgtctcagttagggtgcggatgtgtgagacacaccttttttgcacttatgtacatagtccatgaaagcaatccttggagctttttttaaatgtaagaagtctgtgataatagtggaaaagttagtaagagagagttatttctaaggctttgaaaaggagggtgtttttgctctaagacttaactaaagcataatgttgctttgctgttacggaggctttctagtttgctacaggtcaccaaaagagaaggctagtaacaggtaacaggtcagcctcagctaacagcactgaacaagagtagaataacttcatcttttaacaagatcattagcaaagattgtttgctttttaaattaatcccccctataaacacacacacacgtgtgcacacacacacacacacacacacaccgggcagtttctagaacaagttttcctttttcagtggttgtaagcagtgaaatacctcatgtattacaagatagatattaccgttatgatagaataagatttcatctttcacagaaagtgatcagctgatatatgtgtcagttaaaatgtttatcaattaataggtatttaagtgacaaattgttaatgttgaccattgttcctcctttaagatccagtaaccaaaaccaaatcggtaaccattgaaagatgatatttaacagttaaggatggccagcatagggccgttcattcccttcaacaaagggaaaaaaaatgctcctggcacaactttataactggcttcatttacattatacctgttcagtggaagctgttttttgacctacctttaccagattacaaagtagttaactgtgccacttcagcctcccactgttttgttttaactaaacagaagagaaccagccaaaatcttacgtaacacaggagctggaagacaatgtttcaatctgaccatctctgccaattttagctcccacgccacctatagatagccagttaactttctttttgcccccaggcaatgaggcctagaagaggtcaaggttagaaaggttaagcatttgatcactacaggtacttgtagtacctagagaaggaacccatcctggggttggtggagttggtattgctactcgttttgatagttctcatttacagagaaagaaaaataagccaaagccagaaagcaatccaagccttacagttgtccaatacctcagggccagttggctagaattttcttttccctcagcccataatcacttagagttagccatacaacaaacagcctgacaatctgaccagcatttccattgatataaaatgtaagcattccttcattctgtagttaggaactccaacttcagccttatctccaacataatttcccaatttaacctatgtactgatatggacatttctttgtgaatatgccagattcaagaatgtatttttctaaggtcaatagagatacgacattttaagtcaggaaaaatcacctataaattagtaggaataactgtagaagcatcacaaaagataccccatgaatagatggcatggtgtgcatgctgacagccacggggtcatactctggagtttcaacatagaggctgtgtttcaataaataagacaaattggggaattaagtaaaacaaatggatgtaactgaggcccccccccaaaaaaagccctctattactaacctcaagaaaatatttagtttgactaatttgtgcagtttccagctcttctacttgttcttgcctgtaagagaatcactaatactcaaaagctggattattgaagagaaattttatctttaaatagaatccatccacaattatggtatatgtaaaaaaaatgtatgactatgaaataagtcgcagctctttgcagatattgcaaaatccttgctaggcatctacatcatattagttttttaaaaaatacctctgtaacaagacctaaaagtaacctaactattaagcagtgcttttttctctgaaaacacacaacctaaagatttatctgtcataaaactgcatggttccagagctttatttctgtgtagagatgctatttgttagtgatggaaacaaattactttgttgctatgtcttttgtgtctagcagttgagagaatgatatgaccatcatatcactggattatgggaatgaatgcccttttcaaaataaacttatttattaatattttaatattattttaatattataatattaataatattttaatattattgttgctgctttaacagaaaatgagccatttgtccccatgctcccaaattacaatgatttaaattaaaaaacttttgaaggattttcctaaatatattcttttttaaaggactaactttgtgcattcatataacaacaatttggaataatgtgaaaaatggaggcacataatttgggtggaaaatggcgattaaaaatatatataagaaaattattagccatgtgtaacatatttaaataatgaccagaatatttcatgagtaccaactcttcccatagtaattttcctccaaaatgcaatagctcattccctcaactgcagacgctttgattttttttcaagttatagtgctgtagtgcttgtttatgtttaaaagtgcacattatgcagctcattttagtatgctacttctatgtttattttttgttcttctaataaaatgcataaacttcttggttatgtctttttttatgaatccatattcacacattaggagttcacttgaaggctattcatgctctagtatattaatcctaatatttagtaattctaaaatgaaatttaaatttctgatttggctcaatgttatatttcatacatagagtaaatttatttccaaatataccatcagtattttgaattatgtagataatatatccgttgtgttagacctattactcttataagattgaagttactgacacaagaaaaacacttctattttaataaaagaatacttaaaattttgagagaatgcttactagtttctcttgtgcctcagaaatcctgaggcatattctaagatgcattattagaagtttctctttcccagttattcatgtctatcctgcatccctagtgtaacatatgaaaccagtgttgtttatttcatactttccagatgggcatcaatcatttcataacaatgagatgcatgaatttttccattaaaatgttttctctcacttaaaattggttatcttcaacaaatggcacagtaataaaaggatgatcatttttgttctttaagaaagtaaatgtaatttagtaatactttattctgccttatttcaaaatgcttcaaaaatgcgaatctggaacttctctgcattgaccactgttctggagttgggctgatagaaaactgcggtgaagagagtttagatcagaggctatggcagagcaaagtattactgatgtgtctcttaacagtgaagagggtcggggaggaggttgggtccttgtcaagtgtcagctgccctatacatagttctcttgccccttgtgccctgttttactatttctaaggtggttcccatgatggcatttcttgataagcccactttgagccgtttaatgttttgtaggtgtttctgtgagtctgataataccagcactaaaaacagttcagtatatagacatttacaagaggtcttaggcctcttcagaattcagttaatgtctttctctttgaggctgctgaatgttaggtaagaattcagggcaagcattcccgaccatcatcaaattggagacttggagtttctattggctggaagaaagttgacccacaggcaaaaccagatgtaaaccaagtttgtcttgggtacttttcaaattcttttcacagcatccttttctcatccctcatggtggcctctggccctggaaaatcctcatgatagcaacttatcaggcctgtttcctctgatagatctggacttttccccttaagtgctttcctgttgggcttctcagactatggagaactgctcatagttgagatctaagagacaaattaccctatggtgttcaagaatggccgtatttagtatactgcctgtcctggaagtgttcacatttaaaaaggcatgactttccaatgggcaaatatcagacacctacatgcatagataagggaaatatgttttacttaagcaaacttctaggcattgaatctcagtgtttaggtgcagagatggaattcctataagcaatgcagtcattcaccacatcaggaaggccaaaaaatgaacactctcgtaattttgttattatctggaaagttctgatatgataatgaacctaaaatactgaatagatagtgaacatcctaaaattccactgaccagaatccattcccatggtcatcatctgtagagggcatgatacaatgacaggcctgaggtatgattataattctggagtaatttaaagcctatatttgttaaactttaacagatggacacacattctctgattttctacttggctctttcctgtactagaaatgcgcatttaactaaaccttcccagcttttctgttcagtgcctgacttacactactcccttaggcaggaggacagtgggtgtctggggaataaaagccaagagctccaaacagaggattttggatacaaagggcagccaccaggaaatagctttgtgagagggacagactatctgattcccatttgtacaaacatgtccaaagcaaaagcacagcattctaaagtggatgcagaaattagtatacaatggcagttctggccagtgcagcccagcatttttctgttgtgcatggaaagaacacagtgaaaaggcaggcagggcatccggtgcaaagtgcaacagacatagacacacaaatccagttttcctgatgagagagggagctatctcttcataagtgatgcaatgcaatgcaggcatgtacaagtacaaggaaagatttatttttaaaaaatcatagtgtaactggatgaataccagcaacagcacctgctaaagcaaacagcctgttcattaaaaactggacttgagggaatggagaaagaatctgaggagcctgcagtcagcatgcttgcagagaccttatggctacagaagacgatgattaacccatagaggttcaatgtagttttcaagaagagggtgggaaagcataagatggggactaagactttgcctttaaccttcatgacatgaagaattgaatgactctttgttggaaaaaatggcagttatgagataattggatccatgttaattatatatatttctgtatatatagtaagtggttattgatgtgcctttgttaaccatttcactatttaataaatgtgtgtgtagtttattc

SEQ ID NO: 155994 - DNA, 946 bp, Homo sapiens
  Payload ID: 10631
  Gene Symbol: MBNL3
  Gene Name: muscleblind-like splicing regulator 3
  ENST ID: ENST00000421707
  CDS Start-End: 277-946
atgcacccctgctaaaggctctcccggcaccggggccacctcgcgcagcgctgcttttgcttctgccgctaacagatggcatgtgccgctgtcgctgccgctgcccctgctgctgccgctgagagcagggccccttagcctctgggtttgcgctagcagcgtaagggtcggtgtacccgagagaactgcaagtaccttcaccctcctccacacttaaaaacgcagctggagattaatgggcggaacaatctgattcaacagaagactgccgcagccatgttcgcccagcagatgcagcttatgctccaaaacgctcaaatgtcatcacttggttcttttcctatgactccatcaattccagctaatcctcccatggctttcaatccttacataccacatcctgggatgggcctcgttcctgcagaacttgtaccaaatacacctgttctgattcctggaaacccacctcttgcaatgccaggagctgttggcccaaaactgatgcgttcagataaactggaggtttgccgagaatttcagcgtggaaattgtacccgtggggagaatgattgccgctatgctcaccctactgatgcttccatgattgaagcgagtgataatactgtgacaatctgcatggattacatcaaaggtcgatgctcgcgggagaaatgcaagtactttcatcctcctgcacacttgcaagccagactcaaggcagctcatcatcagatgaaccattcagctgcctctgccatggccctgcagcctggtacactgcaactgataccaaagagatcagcactggaaaagcccaatggtgccaccccggtctttaatcccactgttttccactgccaacaggctctgactaacctgcagctcccacagccggcatttatccctgcagggccaatactgtgcatggcacccgcttcaaatattg

SEQ ID NO: 155995 - DNA, 891 bp, Homo sapiens
  Payload ID: 10631
  Gene Symbol: MBNL3
  Gene Name: muscleblind-like splicing regulator 3
  ENST ID: ENST00000436215
  CDS Start-End: 165-891
ggggcggcccttggccgcattcccgcccgtcccgcagcggcgcgcggagccagggtcggtgtacccgagagaactgcaagtaccttcaccctcctccacacttaaaaacgcagctggagattaatgggcggaacaatctgattcaacagaagactgccgcagccatgttcgcccagcagatgcagcttatgctccaaaacgctcaaatgtcatcacttggttcttttcctatgactccatcaattccagctaatcctcccatggctttcaatccttacataccacatcctgggatgggcctcgttcctgcagaacttgtaccaaatacacctgttctgattcctggaaacccacctcttgcaatgccaggagctgttggcccaaaactgatgcgttcagataaactggaggtttgccgagaatttcagcgtggaaattgtacccgtggggagaatgattgccgctatgctcaccctactgatgcttccatgattgaagcgagtgataatactgtgacaatctgcatggattacatcaaaggtcgatgctcgcgggagaaatgcaagtactttcatcctcctgcacacttgcaagccagactcaaggcagctcatcatcagatgaaccattcagctgcctctgccatggccctgcagcctggtacactgcaactgataccaaagagatcagcactggaaaagcccaatggtgccaccccggtctttaatcccactgttttccactgccaacaggctctgactaacctgcagctcccacagccggcatttatccctgcagggccaatactgtgcatggcacccgcttcaaatattgtgcccatgatgcacggtgctacacctaccactgtgtctgcagcaacaacacctgcca

SEQ ID NO: 155996 - DNA, 840 bp, Homo sapiens
  Payload ID: 10631
  Gene Symbol: MBNL3
  Gene Name: muscleblind-like splicing regulator 3
  ENST ID: ENST00000442191
  CDS Start-End: 1-453
atcaaaggtcgatgctcgcgggagaaatgcaagtactttcatcctcctgcacacttgcaagccagactcaaggcagctcatcatcagatgaaccattcagctgcctctgccatggccctgcagcctggtacactgcaactgataccaaagagatcagcactggaaaagcccaatggtgccaccccggtctttaatcccactgttttccactgccaacaggctctgactaacctgcagctcccacagccggcatttatccctgcagggccaatactgtgcatggcacccgcttcaaatattgtgcccatgatgcacggtgctacacctaccactgtgtctgcagcaacaacacctgccaccagcgttccgttcgctgcaccaactacaggcaatcagataccccaattatcaatagatgaactgaatagcagcatgtttgtttcacagatgtagaagttctcagtagaacactgaaattctgaacagcagagttatggagtatcagaatctttccatggaaacctccatatggcctttctatatatattctcgtatgtcttattctaccaacacaacaataagcgtgttgcagtcaatgtattaagcaaagcaaacctgccagccagcaaattcaaataaaaaataaagcattaaaaatcaatggagatgttaaaacaacacaaatagaaaactagtaactaccatccatcctatttgaattatcaagcagaacatgaccataaaatttggtaacttgttacattactctttgtgattttctaataaccatgctaagtgtatttccacagtgagcttttggcttactatatacattcttgg

SEQ ID NO: 155997 - DNA, 11294 bp, Homo sapiens
  Payload ID: 10631
  Gene Symbol: MBNL3
  Gene Name: muscleblind-like splicing regulator 3
  Uniprot ID: Q9NUK0
  ENST ID: ENST00000538204
  CDS Start-End: 67-945
ggggctgagagtgtcttctactttactctgggcaaatgaaggcctgggagagcctgggctgattccatggagagggcttctaagaatcttaagggtcggtgtacccgagagaactgcaagtaccttcaccctcctccacacttaaaaacgcagctggagattaatgggcggaacaatctgattcaacagaagactgccgcagccatgttcgcccagcagatgcagcttatgctccaaaacgctcaaatgtcatcacttggttcttttcctatgactccatcaattccagctaatcctcccatggctttcaatccttacataccacatcctgggatgggcctcgttcctgcagaacttgtaccaaatacacctgttctgattcctggaaacccacctcttgcaatgccaggagctgttggcccaaaactgatgcgttcagataaactggaggtttgccgagaatttcagcgtggaaattgtacccgtggggagaatgattgccgctatgctcaccctactgatgcttccatgattgaagcgagtgataatactgtgacaatctgcatggattacatcaaaggtcgatgctcgcgggagaaatgcaagtactttcatcctcctgcacacttgcaagccagactcaaggcagctcatcatcagatgaaccattcagctgcctctgccatggccctgcagcctggtacactgcaactgataccaaagagatcagcactggaaaagcccaatggtgccaccccggtctttaatcccactgttttccactgccaacaggctctgactaacctgcagctcccacagccggcatttatccctgcagtgcccatgatgcacggtgctacacctaccactgtgtctgcagcaacaacacctgccaccagcgttccgttcgctgcaccaactacaggcaatcagctgaaattctgaacagcagagttatggagtatcagaatctttccatggaaacctccatatggcctttctatatatattctcgtatgtcttattctaccaacacaacaataagcgtgttgcagtcaatgtattaagcaaagcaaacctgccagccagcaaattcaaataaaaaataaagcattaaaaatcaatggagatgttaaaacaacacaaatagaaaactagtaactaccatccatcctatttgaattatcaagcagaacatgaccataaaatttggtaacttgttacattactctttgtgattttctaataaccatgctaagtgtatttccacagtgagcttttggcttactatatacattcttggtggataaattgttcatctgtttttgaagtgttaccttactattttgtttacaagatagtctattgggttgattcaggatgtaacaaatatattcagtaccatttcttgtgttgtattgtgttgtgctgtgttaggtttttacatactgtagtgttttgctgtatatgtgtggtgtttgatttcaactaaagtgttattagtggggaacagaagtatatgtgcttaagaacatgacaggttcatgcaaatatgctctctttctttagaatatttctgtaggtttcttgggactgacatttaaaacgcctcacttttgaatgtgcacaaaacctgctcattaacatgcatgtgtataatttgtacctgcagatctgatgttgcataatacaatcaaattactagattttttaaagagagaaataattacctgcacaaagcagagaacttcataaaacattaacccctaattcactcttcttaaatagcttggcaaataagactttacctttaaatgaatttctcagcatttatactaaaaattatgtaaagtgctcattagattttttgtgtgtgtggcttgagaatcccatctcctaaattgagtgtctaaaactgagccatttgtcatcttcagctgagaaactggtacttgggagcttaaaaatatgctaattacaagttataaatcaaacggagagatgggggcatggagatagtttttacgtactggaggaaagtgtgtaaaaccatggcaatgtcaccttttacacaaatgccattttccaaatgcaaatggctcatgctctttagactactctttgaataacaagtaagatgcaatctagcaaaagtcagtcagggtgaaagagaattggttgcaaatgaggacttccctccccaaatggacagtcttctctgttgatcacagagggagcctgagtacaggcttggagaaatggctaggacagggaacagggaagcacttacaattattccttgatttattcaaaagaactgggaaagatggttgtagttgtctttagcttcggttcaactgagtttcgttttgttaaacagttcagtgaaggagaaagcacctgtgatatatggcaagtgtccccctgcccaaactttaacatcagaccctctcacatcataaccaagcctcttttatgcttgtttggattcgtttgcctttatatatgtttgaaaatgacaatagaaagggttttatcaccctttgaatgagacagagtggctatactccacagagctcagctgagttcacattactaatatttatgaaagaattttacaaccaaataattcctgtggtgtgtgacatatctcatccactctactcatttattaatgttattatacagtggtggaaacacatgacattttacatcaagtaatagatttaatattttctagtaaataggcgctcttccaccagaaagtataaaaccatcatatacatatatatatatatatataatggtttttctccttcatgaaaatgacaagtaaaaagcaaatctgattgaggataccttaagctggctagaagtgtttgaatcacagaacaatggaattagcaaaatcctttttatagttgatggaactgaatccaggggcatatgacttgcccaaggctaccttagccattgtgggacccagaaatatctcctgcttcccattgttcctccttttcacattgtttttgcttcagaacatttgatgctctcttccaaagcagacccatttggctcagaatataagagagcaaaattagctttctgggaattgatactctgttgatcttaattatccatccaaatcctgatcaacagtgctttctaaacagccttgcttgtattgagtcattgtcagctgttgacaatgttgcgtggaattagagatcaagagttgtcctgacctttacctatggactctttgaaccagttaatttctatttctgaaatcttaacattgctatagaagaaagtagtgtatgcctttttgaaattcatcatgtatggaactgagttttgtatgatccgtgccagtgcctctccagaagggcagatctgattacatgaatccaggagggatgcacctgagctagtctggatatattccttaaaggagacaagaacttttttgtgcaaaatgaacttttgtgtagtttgacatctgcatgcagtgaactgtctcacttaactttttcaactttgggcaaagatatacataaaccatagataatagacctacagtacagctgttttcatgttgcgttaagcactggaagacattaacaatgacttaccttaaagtaaaaggttccgtgaggggtatttagggccactgtatttttggtgccacaattttctacattgttggcattttaaaagttgttttctaaatgaacttaaagaaagaaagctcaaagccctaaagttttgatcaaattcaatagagttttcagaaaaaaatacaattttaagatagcactctttaaactagatgtgcaatgacttattcaaattatctttattcaagaaaagagaaaagaagaaagataagtcattagactataaatttccatttaaaaagacaagtcacaaaactaatcagtgactctaaacaaaaatttactggatgaattgtatatataaaattctaatcacttatgattcttagttaacattttataagctttgtattttacaggggcctctatttatccaaatttattgtttttgtccatttttctcagccttttgcaaaaaatatgcaagagtgctgaaacttggataaaacgggtcatgtatacagagaaaataatctaaaagttatctttaagagggttttagtagtgtcaactttttaaaaaagtactatgtgaccataacatacgtatattttaaagagggattaagattaaattaaaataaatggattcataaaattgctatttaaatacagtatttacttttgtaattgaagcatgattccacaaccagctgtggcattttatttcacttttctagatcagaggctttaatttgtagttaatcatgatgtggaaagtcatcttctctctactccatcaatttttttcatccgtttttgaacatgctgaagcactttgatcttgccataagtgttgtcctataccactaggtggtgttcactaatgggagggcctcagctcaccggctctccaatttgggaaaaagcaagtacctcctccctaccatcagcagaaactgaatgaaattaatctttgcaacttgaatctgttttaagtagcattaccaataagcatagtggtatctgaataaggaatgacatttacattacattttattaaataagagagaaagttaatgtgctacttgaaatgttatttggttctttgtccccctcattgcagagtatagataaggatgctcttaggtaaaatgcagccacaagttttccgagttcctttagtctgtagggtaggctatgaggtacagaatgattagaaactgaaatcctcattatttttctctcaaatacatttcacatacattgaaacagaaataggcaaaatttatgagggaaatctgatttcccaattctgatgaatagatatactaagacagtagccttgtttaaccagtgcctgtagaaggcactagaataaatagcatgtccaagagtataacaactttttttgtaaatttagttactagcctaatcaaactgtaaatataactcactaattggtaccatattttcatttttcttattgttcatctttaaggtttcattttattgcttttttgtagctctaagtaactaatcaatttaatttcaaaggaaagttaaagaaagtttaagcttttactgcatggattctgcccgcctagctaggttctgaactgacactgaagtatgacaagatacagattatagtccaaaactatcctttacagttcacaatttaagaacaaatttaactttatatacaaataataattgttatctaattatatttagttgttgctttggcaacaaaattacaacatggctacctttagacatttgtgtatgtgaacattttacttgtaaactataggtgatttgtgacagtatgagcctgtagaaaatacagctcaaaactatgaaaacagacatggttgagttcttttttaatcccaaaggcccatatataaaagctgaatttgtgtccttgtgtgactttttgtgaaaaagtttataacacatggattctagaatcaggctttatagtttatagaatttgttgtgtggatagggttattccacagtatttagacttcaaaacgcaatcattgcatttttaatacattacctaactttttttataacttaattcaaaattaccccattcaagtggcatagctgtagctgcaaaaattctgttttctggaattacatgagcaaatatagctatatgaggattaatgtatgactaaagcctcttttgaaattaattcatatttttaaaactatacataaagatactgtggaatgaccccttaacagtgtttaagaaacatatgctgcagttaattgactgtctcagttagggtgcggatgtgtgagacacaccttttttgcacttatgtacatagtccatgaaagcaatccttggagctttttttaaatgtaagaagtctgtgataatagtggaaaagttagtaagagagagttatttctaaggctttgaaaaggagggtgtttttgctctaagacttaactaaagcataatgttgctttgctgttacggaggctttctagtttgctacaggtcaccaaaagagaaggctagtaacaggtaacaggtcagcctcagctaacagcactgaacaagagtagaataacttcatcttttaacaagatcattagcaaagattgtttgctttttaaattaatcccccctataaacacacacacacgtgtgcacacacacacacacacacacacaccgggcagtttctagaacaagttttcctttttcagtggttgtaagcagtgaaatacctcatgtattacaagatagatattaccgttatgatagaataagatttcatctttcacagaaagtgatcagctgatatatgtgtcagttaaaatgtttatcaattaataggtatttaagtgacaaattgttaatgttgaccattgttcctcctttaagatccagtaaccaaaaccaaatcggtaaccattgaaagatgatatttaacagttaaggatggccagcatagggccgttcattcccttcaacaaagggaaaaaaaatgctcctggcacaactttataactggcttcatttacattatacctgttcagtggaagctgttttttgacctacctttaccagattacaaagtagttaactgtgccacttcagcctcccactgttttgttttaactaaacagaagagaaccagccaaaatcttacgtaacacaggagctggaagacaatgtttcaatctgaccatctctgccaattttagctcccacgccacctatagatagccagttaactttctttttgcccccaggcaatgaggcctagaagaggtcaaggttagaaaggttaagcatttgatcactacaggtacttgtagtacctagagaaggaacccatcctggggttggtggagttggtattgctactcgttttgatagttctcatttacagagaaagaaaaataagccaaagccagaaagcaatccaagccttacagttgtccaatacctcagggccagttggctagaattttcttttccctcagcccataatcacttagagttagccatacaacaaacagcctgacaatctgaccagcatttccattgatataaaatgtaagcattccttcattctgtagttaggaactccaacttcagccttatctccaacataatttcccaatttaacctatgtactgatatggacatttctttgtgaatatgccagattcaagaatgtatttttctaaggtcaatagagatacgacattttaagtcaggaaaaatcacctataaattagtaggaataactgtagaagcatcacaaaagataccccatgaatagatggcatggtgtgcatgctgacagccacggggtcatactctggagtttcaacatagaggctgtgtttcaataaataagacaaattggggaattaagtaaaacaaatggatgtaactgaggcccccccccaaaaaaagccctctattactaacctcaagaaaatatttagtttgactaatttgtgcagtttccagctcttctacttgttcttgcctgtaagagaatcactaatactcaaaagctggattattgaagagaaattttatctttaaatagaatccatccacaattatggtatatgtaaaaaaaatgtatgactatgaaataagtcgcagctctttgcagatattgcaaaatccttgctaggcatctacatcatattagttttttaaaaaatacctctgtaacaagacctaaaagtaacctaactattaagcagtgcttttttctctgaaaacacacaacctaaagatttatctgtcataaaactgcatggttccagagctttatttctgtgtagagatgctatttgttagtgatggaaacaaattactttgttgctatgtcttttgtgtctagcagttgagagaatgatatgaccatcatatcactggattatgggaatgaatgcccttttcaaaataaacttatttattaatattttaatattattttaatattataatattaataatattttaatattattgttgctgctttaacagaaaatgagccatttgtccccatgctcccaaattacaatgatttaaattaaaaaacttttgaaggattttcctaaatatattcttttttaaaggactaactttgtgcattcatataacaacaatttggaataatgtgaaaaatggaggcacataatttgggtggaaaatggcgattaaaaatatatataagaaaattattagccatgtgtaacatatttaaataatgaccagaatatttcatgagtaccaactcttcccatagtaattttcctccaaaatgcaatagctcattccctcaactgcagacgctttgattttttttcaagttatagtgctgtagtgcttgtttatgtttaaaagtgcacattatgcagctcattttagtatgctacttctatgtttattttttgttcttctaataaaatgcataaacttcttggttatgtctttttttatgaatccatattcacacattaggagttcacttgaaggctattcatgctctagtatattaatcctaatatttagtaattctaaaatgaaatttaaatttctgatttggctcaatgttatatttcatacatagagtaaatttatttccaaatataccatcagtattttgaattatgtagataatatatccgttgtgttagacctattactcttataagattgaagttactgacacaagaaaaacacttctattttaataaaagaatacttaaaattttgagagaatgcttactagtttctcttgtgcctcagaaatcctgaggcatattctaagatgcattattagaagtttctctttcccagttattcatgtctatcctgcatccctagtgtaacatatgaaaccagtgttgtttatttcatactttccagatgggcatcaatcatttcataacaatgagatgcatgaatttttccattaaaatgttttctctcacttaaaattggttatcttcaacaaatggcacagtaataaaaggatgatcatttttgttctttaagaaagtaaatgtaatttagtaatactttattctgccttatttcaaaatgcttcaaaaatgcgaatctggaacttctctgcattgaccactgttctggagttgggctgatagaaaactgcggtgaagagagtttagatcagaggctatggcagagcaaagtattactgatgtgtctcttaacagtgaagagggtcggggaggaggttgggtccttgtcaagtgtcagctgccctatacatagttctcttgccccttgtgccctgttttactatttctaaggtggttcccatgatggcatttcttgataagcccactttgagccgtttaatgttttgtaggtgtttctgtgagtctgataataccagcactaaaaacagttcagtatatagacatttacaagaggtcttaggcctcttcagaattcagttaatgtctttctctttgaggctgctgaatgttaggtaagaattcagggcaagcattcccgaccatcatcaaattggagacttggagtttctattggctggaagaaagttgacccacaggcaaaaccagatgtaaaccaagtttgtcttgggtacttttcaaattcttttcacagcatccttttctcatccctcatggtggcctctggccctggaaaatcctcatgatagcaacttatcaggcctgtttcctctgatagatctggacttttccccttaagtgctttcctgttgggcttctcagactatggagaactgctcatagttgagatctaagagacaaattaccctatggtgttcaagaatggccgtatttagtatactgcctgtcctggaagtgttcacatttaaaaaggcatgactttccaatgggcaaatatcagacacctacatgcatagataagggaaatatgttttacttaagcaaacttctaggcattgaatctcagtgtttaggtgcagagatggaattcctataagcaatgcagtcattcaccacatcaggaaggccaaaaaatgaacactctcgtaattttgttattatctggaaagttctgatatgataatgaacctaaaatactgaatagatagtgaacatcctaaaattccactgaccagaatccattcccatggtcatcatctgtagagggcatgatacaatgacaggcctgaggtatgattataattctggagtaatttaaagcctatatttgttaaactttaacagatggacacacattctctgattttctacttggctctttcctgtactagaaatgcgcatttaactaaaccttcccagcttttctgttcagtgcctgacttacactactcccttaggcaggaggacagtgggtgtctggggaataaaagccaagagctccaaacagaggattttggatacaaagggcagccaccaggaaatagctttgtgagagggacagactatctgattcccatttgtacaaacatgtccaaagcaaaagcacagcattctaaagtggatgcagaaattagtatacaatggcagttctggccagtgcagcccagcatttttctgttgtgcatggaaagaacacagtgaaaaggcaggcagggcatccggtgcaaagtgcaacagacatagacacacaaatccagttttcctgatgagagagggagctatctcttcataagtgatgcaatgcaatgcaggcatgtacaagtacaaggaaagatttatttttaaaaaatcatagtgtaactggatgaataccagcaacagcacctgctaaagcaaacagcctgttcattaaaaactggacttgagggaatggagaaagaatctgaggagcctgcagtcagcatgcttgcagagaccttatggctacagaagacgatgattaacccatagaggttcaatgtagttttcaagaagagggtgggaaagcataagatggggactaagactttgcctttaaccttcatgacatgaagaattgaatgactctttgttggaaaaaatggcagttatgagataattggatccatgttaattatatatatttctgtatatatagtaagtggttattgatgtgcctttgttaaccatttcactatttaataaatgtgtgtgtagtttattc

SEQ ID NO: 155998 - DNA, 2615 bp, Homo sapiens
  Payload ID: 10632
  Gene Symbol: MURC
  Gene Name: muscle-related coiled-coil protein
  Uniprot ID: Q5BKX8
  ENST ID: ENST00000307584
  CDS Start-End: 66-1160
gactttttgctccaagtgccagaattgattgtggttaggacatcttacgctgagaaataaataaaatggaacataatgggtctgcttcaaatgctgataaaatccaccagaatcgcctgtcgagtgttacagaagatgaagaccaagacgctgctcttaccattgtgactgtgctggacaaagtagcctccatcgtggacagtgtgcaggcaagccagaagagaatagaagagagacacagggaaatggaaaatgccataaaatccgtccagattgacctgttgaagctttcacagtcgcatagcaatacagggcatatcattaacaaattgtttgagaaaacccgaaaagttagtgctcacattaaagatgtgaaagcccgggtggagaagcaacaaattcatgttaaaaaagttgaagtcaagcaagaggaaataatgaagaaaaacaaattccgcgtggtaatattccaggagaagtttcggtgtccgacatccctgtctgttgttaaagacagaaacctaactgagaaccaagaagaggatgatgatgatatctttgatcccccagtagatctgtcttcggatgaagaatattatgttgaagaaagcagatctgccaggcttaggaagtcaggcaaggagcacattgataatatcaagaaggcattttccaaagaaaacatgcagaagacacggcagaatcttgacaagaaagtgaacagaattagaactagaatagtgaccccggagaggagagagaggctaaggcagtcaggagagaggctgagacagtcaggggagaggctgagacagtcaggggagaggtttaagaaatctatttctaatgcagctccctcaaaggaagcttttaagatgcgcagcctcaggaaaggtaaggaccgaacagtggctgaaggtgaggaatgtgccagggagatgggtgtggacatcattgccaggagcgagtctctgggccccatcagtgagctctactctgatgagctcagtgaaccagaacacgaggcagccaggccggtgtatcctccccatgaaggaagggaaatccccacccccgagcctttaaaagttacttttaaatctcaggtgaaagtagaggatgatgaatctcttttgttagatttaaagcactcatcgtaaagaggaattaagtatatcctaaatatgaatctcctaatcatgcagttttagtttgaatagtgtagtcgtctacatttctgtgccatgtaggaaaacataaatgtattttttttcttatatttaaaatcttgaagataatataaatattattatcactctttctcatggcagctgtggattttttagttcctttctcttgtccaccagaaaaatagtttcctaggttgggccagttacgtgtttggtaagggcaactttgcggccgtcatttgcaggagaactctaaatattggttaggattaatattgtggccagcctcaaaggggaataactcatgtgtgggttatatcgtccagatgttcagatcaacagatttgttagtaaattagcagtcacaccccttttttgatgctttcacattaaaaaattgaagttttggacttgagcatttggctctagtatcatagctttacttataagaaaaccctgggcaagtcatctgcttattctcatcagtaaaaatggagagggttggcctctgctgcctgcctcagaggactgttgtgatgatcaaaggaaatggtacacattctgggggaacaagaagcacacccagagaaaacaagcctcatcagttcctccaaaacagaatggaaagagttacaccttctgaaaaagccctcagcaccaatcaataaggtcctaggttggagagaaactaaagctggtcttcagaagccttttcacagaatcaagagtgaaaaataagtaaatgtttgggtgaccactttttcatcagactaactatatcttgggttttagttgggtctcaaaatgttccccagccagaccctttctaatttccttttgattaagatctttggtggactatagcactaaatttgtttaagcagtatgaggcataaaattgtgactatgtttctaaagtcggccctgatgcattgggtttggaaatgaccacaaatattcctgttttcctgagtgtacccttcagggtccagctgtccaaaacagtgttgataggagttcatcatagctgctttgggaggaagccagattctccttatcttttagctttagatcgtggaatccaggaagtagaacaatgtctattgttgctaaagaaagaaagaaatgggccgggtgtggtggctcacggggagtaatcccagcactttgcgaggccgaggtgggtgaatcacctgaggtcagaagttcacgaccagcctgaccaacatggcgaaaccctgactctactgaaaatacaaaaattagctgggcatggtggcatgcgcctgtcccagctactcaggaggctgagacaggagaattgcctgaacccaggaggcggaggttgcagtgagccgagattgtgccactgcactcaagcctgggcaaaagagccagactctgtttcaaaaaaaaagaaaaaaa

SEQ ID NO: 155999 - DNA, 1815 bp, Homo sapiens
  Payload ID: 10633
  Gene Symbol: MLIP
  Gene Name: muscular LMNA-interacting protein
  Uniprot ID: Q5VWP3
  ENST ID: ENST00000274897
  CDS Start-End: 114-1490
acaacttggaatgtcctgcaatatctaacatgtaagcacgtcgaatcattttctagacagaatctgaacctctgtgtctctcagtctttctctctttctcattctctttcaatatggaacttgaaaagcgtgaaaaaagaagcttattaaacaagaatttagaggagaaactgacggtctctgctggtggttctgaagccaaacctctgatcttcacatttgtccccactgtcagaagactaccaacccatactcagttggctgacacctctaaattccttgttaaaattccagaagaatcaagtgataagagtccagaaactgtaaataggtctaaatccaatgactacttgaccttgaatgctgggagccaacaagagagagaccaagcgaaattgacttgtccttcagaggtcagtggaacgattttacaagaaagggaattcgaagcaaacaaacttcaagggatgcagcaaagtgacctcttcaaagctgaatatgtccttattgtggactccgaaggggaagatgaggctgcaagcagaaaagttgaacaaggccccccaggggggattggcaccgcagctgtccggcccaagtctctagctatctcgtccagtctggtctctgatgtagtgcgtcccaaaacacaggggactgatctcaagacctcatcacatcctgaaatgcttcatgggatggcccctcagcaaaagcatgggcagcaatacaagaccaagtcaagctacaaggcttttgcagcaatccctacaaacacattgcttttggaacagaaggcactagatgaaccagccaagactgaaagtgtctccaaggacaacacattagaaccaccagtggagctctattttcctgcacagctcaggcagcaaactgaagagctctgtgctaccattgataaggtcttacaggattccttgtctatgcattcttctgattctccttcaaggtccccaaagacattgttgggttctgacacagtcaaaactcctacaactcttccaagagcagctggtcgagaaaccaaatatgcaaatctctcctcaccatcttctacagtatctgagagtcagctgactaagcctggagtaattcgcccagtacctgtaaaatccagaatattactgaaaaaagaggaggaagtctatgaacccaaccctttcagtaaatacttggaagataacagcgacctcttttctgaacaggatgtaacagtccctcccaagcctgtctcgctccatcctttatatcagactaaactctatcctcctgctaagtcactgctgcatccacagaccctctcacatgctgactgtcttgccccaggacccttcagtcatctgtccttctccttgagtgatgaacaggagaattctcacaccctcctcagtcacaacgcatgcaacaagctgagtcatccaatggtggctattcctgaacatgaagctcttgattccaaagagcaatgaagttggagcagaggctgaaaacacaggctgctgaagttttttggaatgctggtgctaaccacttgctagatttaacttttttttttttttccagaatgagtgctccctttatgagctgcagtgcagcagaaccaaaaaaaaagtttgctgcaattatatagcatcacagtgctctgctaacagccagcatagaagagatttacctacagctttttgcaccactgttctagcctttaatgccttctacttaatattaagctgaccgcaatactaacgtgcccctatatttggcagccaaataaagaagaatcgtgggtaaatagaa

SEQ ID NO: 156000 - DNA, 1076 bp, Homo sapiens
  Payload ID: 10633
  Gene Symbol: MLIP
  Gene Name: muscular LMNA-interacting protein
  Uniprot ID: Q5VWP3
  ENST ID: ENST00000370876
  CDS Start-End: 47-751
actgctttcttgacatctgctagtttgacacgtggcaccggattccatgtgcagctggtaccttggatttgaatgttcttctaaatccaatgactacttgaccttgaatgctgggagccaacaagagagagaccaagcgaaattgacttgtccttcagaggtcagtggaacgattttacaagaaagggaattcgaagcaaacaaacttcaagggatgcagcaaagtgacctcttcaaagctgaatatgtccttattgtggactccgaaggggaagatgaggctgcaagcagaaaagttgaacaaggccccccaggggggattggcaccgcagctgtccggcccaagtctctagctatctcgtccagtctggtctctgatgtagtgcgtcccaaaacacaggggactgatctcaagacctcatcacatcctgaaatgcttcatgggatggcccctcagcaaaagcatgggcagactcctacaactcttccaagagcagctggtcgagaaaccaaatatgcaaatctctcctcaccatcttctacagtatctgagagtcagctgactaagcctggagtaattcgcccagtacctgtaaaatccagaatattactgaaaaaagaggaggaagtctatgaacccaaccctttcagtaaatacttggaagataacagcgacctcttttctgaacagctgagtcatccaatggtggctattcctgaacatgaagctcttgattccaaagagcaatgaagttggagcagaggctgaaaacacaggctgctgaagttttttggaatgctggtgctaaccacttgctagatttaacttttttttttttttccagaatgagtgctccctttatgagctgcagtgcagcagaaccaaaaaaaaagtttgctgcaattatatagcatcacagtgctctgctaacagccagcatagaagagatttacctacagctttttgcaccactgttctagcctttaatgccttctacttaatattaagctgaccgcaatactaacgtgcccctatatttggcagccaaataaagaagaatcgtgggtaaatagaa

SEQ ID NO: 156001 - DNA, 1234 bp, Homo sapiens
  Payload ID: 10633
  Gene Symbol: MLIP
  Gene Name: muscular LMNA-interacting protein
  ENST ID: ENST00000370877
  CDS Start-End: 103-909
tgtcctgcaatatctaacatgtaagcacgtcgaatcattttctagacagaatctgaacctctgtgtctctcagtctttctctctttctcattctctttcaatatggaacttgaaaagcgtgaaaaaagaagcttattaaacaagaatttagaggagaaactgacgtctaaatccaatgactacttgaccttgaatgctgggagccaacaagagagagaccaagcgaaattgacttgtccttcagaggtcagtggaacgattttacaagaaagggaattcgaagcaaacaaacttcaagggatgcagcaaagtgacctcttcaaagctgaatatgtccttattgtggactccgaaggggaagatgaggctgcaagcagaaaagttgaacaaggccccccaggggggattggcaccgcagctgtccggcccaagtctctagctatctcgtccagtctggtctctgatgtagtgcgtcccaaaacacaggggactgatctcaagacctcatcacatcctgaaatgcttcatgggatggcccctcagcaaaagcatgggcaggcactagatgaaccagccaagactgaaagtgtctccaaggacaacacattagaaccaccagtggagcattcttctgattctccttcaaggtccccaaagacattgttgggttctgacacagtcaaaactcctacaactcttccaagagcagctggtcgagaaaccaaatatgcaaatctctcctcaccatcttctacagtatctgagagtcagctgactaagcctggagtaattcgcccagtacctgtaaaatccagaatattactgaaaaaagaggaggaagtctatgaacccaaccctttcagtaaatacttggaagataacagcgacctcttttctgaacagcaatgaagttggagcagaggctgaaaacacaggctgctgaagttttttggaatgctggtgctaaccacttgctagatttaacttttttttttttttccagaatgagtgctccctttatgagctgcagtgcagcagaaccaaaaaaaaagtttgctgcaattatatagcatcacagtgctctgctaacagccagcatagaagagatttacctacagctttttgcaccactgttctagcctttaatgccttctacttaatattaagctgaccgcaatactaacgtgcccctatatttggcagccaaataaagaagaatcgtgggtaaatagaa

SEQ ID NO: 156002 - DNA, 941 bp, Homo sapiens
  Payload ID: 10633
  Gene Symbol: MLIP
  Gene Name: muscular LMNA-interacting protein
  ENST ID: ENST00000447836
  CDS Start-End: 354-941
agcatattggaatctaaggcttatagattgccagcctgctcagcgtctctaacccttttcaggtctctgctggtggttctgaagccaaacctctgatcttcacatttgtccccactgtcagaagactaccaacccatactcagttggctgacacctctaaattccttgttaaaattccagaagaatcaagtgataagagtccagaaactgtaaataggtctaaatccaatgactacttgaccttgaatgctgggagccaacaagagagagaccaagcgaaattgacttgtccttcagaggtcagtggaacgattttacaagaaagggaattcgaagcaaacaaacttcaagggatgcagcaaagtgacctcttcaaagctgaatatgtccttattgtggactccgaaggggaagatgaggctgcaagcagaaaagttgaacaaggccccccaggggggattggcaccgcagctgtccggcccaagtctctagctatctcgtccagtctggtctctgatgtagtgcgtcccaaaacacaggggactgatctcaagacctcatcacatcctgaaatgcttcatgggatggcccctcagcaaaagcatgggcagcaatacaagaccaagtcaagctacaaggcttttgcagcaatccctacaaacacattgcttttggaacagaaggcactagatgaaccagccaagactgaaagtgtctccaaggacaacacattagaaccaccagtggagactcctacaactcttccaagagcagctggtcgagaaaccaaatatgcaaatctctcctcaccatcttctacagtatctgagagtcagctgactaagcctggagtaattcgcccagtacctgtaaaatccagaatattactgaaaaaagaggaggaagtctatgaacccaaccctttcagtaaatacttggaa

SEQ ID NO: 156003 - DNA, 989 bp, Homo sapiens
  Payload ID: 10633
  Gene Symbol: MLIP
  Gene Name: muscular LMNA-interacting protein
  ENST ID: ENST00000514433
  CDS Start-End: 1-989
tgcgggaacaattacttccaaatgacctcgtgcatcttatcagggagcattcagaccacaccccaggtctctgctggtggttctgaagccaaacctctgatcttcacatttgtccccactgtcagaagactaccaacccatactcagttggctgacacctctaaattccttgttaaaattccagaagaatcaagtgataagagtccagaaactgtaaataggtctaaatccaatgactacttgaccttgaatgctgggagccaacaagagagagaccaagcgaaattgacttgtccttcagaggtcagtggaacgattttacaagaaagggaattcgaagcaaacaaacttcaagggatgcagcaaagtgacctcttcaaagctgaatatgtccttattgtggactccgaaggggaagatgaggctgcaagcagaaaagttgaacaaggccccccaggggggattggcaccgcagctgtccggcccaagtctctagctatctcgtccagtctggtctctgatgtagtgcgtcccaaaacacaggggactgatctcaagacctcatcacatcctgaaatgcttcatgggatggcccctcagcaaaagcatgggcaggcactagatgaaccagccaagactgaaagtgtctccaaggacaacacattagaaccaccagtggagactcctacaactcttccaagagcagctggtcgagaaaccaaatatgcaaatctctcctcaccatcttctacagtatctgagagtcagctgactaagcctggagtaattcgcccagtacctgtaaaatccagaatattactgaaaaaagaggaggaagtctatgaacccaaccctttcagtaaatacttggaagataacagcgacctcttttctgaacaggatgtaacagtccctcccaagcctgtctcgctccatcctttatatcagactaaactctatcctcctgctaagtcactgctgcatccaca

SEQ ID NO: 156004 - DNA, 360 bp, Homo sapiens
  Payload ID: 10633
  Gene Symbol: MLIP
  Gene Name: muscular LMNA-interacting protein
  ENST ID: ENST00000460844
  CDS Start-End: 351-360
cataatttgtacagtgctttgtcatctttgcagctcatcaatatcagcagctgacacaggtctctgctggtggttctgaagccaaacctctgatcttcacatttgtccccactgtcagaagactaccaacccatactcagttggctgacacctctaaattccttgttaaaattccagaagaatcaagtgataagagtccagaaactgtaaataggtctaaatccaatgactacttgaccttgaatgctgggagccaacaagagagagaccaagcgaaattgacttgtccttcagaggtcagtggaacgattttacaagaaagggaattcgaagcaaacaaacttcaagggatgcagcaaa

SEQ ID NO: 156005 - DNA, 571 bp, Homo sapiens
  Payload ID: 10633
  Gene Symbol: MLIP
  Gene Name: muscular LMNA-interacting protein
  ENST ID: ENST00000505762
  CDS Start-End: 240-571
ttgctcttggttttaatccttttggaatgtcttgagggtcaggagcgttgccattgatggctatgggagttgtcaggctgtggctctctttctcacagagaatgccagaggcactcgggaaggcatttgccagggctctgacagatgtaaagtaagccttatccatgttgtgttctcacctggacacctggaaggtgctcagtatagaaaagtcacgagctagatgagataccagcttgatgtcgactccctccccaacaatggctgcctgtcttcgtcttgatgcctgccagcaggaaagcactgtcttagaacctggctcacctgattttgccgatgagtcaactttgaagtgtgcctcattctggaaagtgaatcacgtaatcacatctaaatccaatgactacttgaccttgaatgctgggagccaacaagagagagaccaagcgaaattgacttgtccttcagaggtcagtggaacgattttacaagaaagggaattcgaagcaaacaaacttcaagggatgcagcaaagtgacctcttcaaagctgaatatgtccttattgtgga

SEQ ID NO: 156006 - DNA, 5743 bp, Homo sapiens
  Payload ID: 10633
  Gene Symbol: MLIP
  Gene Name: muscular LMNA-interacting protein
  Uniprot ID: Q5VWP3
  ENST ID: ENST00000514921
  CDS Start-End: 114-2861
acaacttggaatgtcctgcaatatctaacatgtaagcacgtcgaatcattttctagacagaatctgaacctctgtgtctctcagtctttctctctttctcattctctttcaatatggaacttgaaaagcgtgaaaaaagaagcttattaaacaagaatttagaggagaaactgacggtctctgctggtggttctgaagccaaacctctgatcttcacatttgtccccactgtcagaagactaccaacccatactcagttggctgacacctctaaattccttgttaaaattccagaagaatcaagtgataagagtccagaaactgtaaataggtctaaatccaatgactacttgaccttgaatgctgggagccaacaagagagagaccaagcgaaattgacttgtccttcagaggtcagtggaacgattttacaagaaagggaattcgaagcaaacaaacttcaagggatgcagcaaagtgacctcttcaaagctgaatatgtccttattgtggactccgaaggggaagatgaggctgcaagcagaaaagttgaacaaggccccccaggggggattggcaccgcagctgtccggcccaagtctctagctatctcgtccagtctggtctctgatgtagtgcgtcccaaaacacaggggactgatctcaagacctcatcacatcctgaaatgcttcatgggatggcccctcagcaaaagcatgggcagttaacttcttctcccactacctctgagcagcttgcctgtaaaccacctgctttctcctttgtttctccaactaatccgaacacaccacccgacccagttaacctcgagggagcctctgtcctagaggagttccacactaggaggctggatgtcggtggggccgtggtggaagaatcagctacgtattttcaaactaccgctcactctacacccttttctgcatcgaagggcacctcctcgacgttactgtttccccattccactcaactatcaggttctaatttacccagttcaactgcagcagatccaaagcctggactgacctctgaagttctcaagaagacaactttaacctcgcatgtccttagtcacggagaaagtccgagaacctcttcttctccaccgtcctccagtgcttctctgaagtcgaattcggcctcgtacataccagtccgcattgtcacgcattcactctctccgagccccaaaccatttacctcctctttccacggctcttcttccaccatctgcagccaaatgtcatctagtggaaatctttcaaagtcaggggtaaaatccccggtgccttcccggcttgcccttctcactgccattctcaagtcaaacccttcccaccaaagacccttttcccctgcatcctgtcccaccttctctctcaactccccggcctcttccacgctcacacttgaccaaaaagaaaagcagaccccacccacgcctaaaaaatctctctcaagttgttccctgagagccgggtcaccagatcaaggggaactccaggtttctgaattgacccagcaatcttttcacctgcctgttttcaccaagtctactccgctttctcaggcgccctccctctctcctacaaaacaggctagtagcagccttgcttccatgaatgtagagagaacaccatcacctactttgaagagcaataccatgctctccctgctacaaaccagtacatccagttctgtgggtcttcctcctgttccaccaagctcttctctttcctctttgaagagtaaacaggatggtgacctcaggggtccagaaaaccccagaaacattcacacgtacccttctacattagcctcctctgcattatcttctctatctcctcctattaatcaaagagctacgttctcttcttcagagaaatgtttccatccttccccagctctttcaagcctgataaacagatctaaaagagcatcatcccaactatctggccaggagctgaatccttcagctcttccttcactccctgtctccagtgctgactttgcctctcttcccaacttgaggtcctcctctctccctcatgccaatctgcccaccctggtgccccagctcagtccctcagctctgcacccacattgcggcagtggtaccttgccttcaagacttgggaaatctgaaagcaccacccccaaccacaggtcacctgtttcaaccccatcacttcccatatctctaacaaggacagaggagctgatttcaccttgtgcattgtccatgtcaacaggcccagaaaataagaaatcaaagcaatacaagaccaagtcaagctacaaggcttttgcagcaatccctacaaacacattgcttttggaacagaaggcactagatgaaccagccaagactgaaagtgtctccaaggacaacacattagaaccaccagtggagctctattttcctgcacagctcaggcagcaaactgaagagctctgtgctaccattgataaggtcttacaggattccttgtctatgcattcttctgattctccttcaaggtccccaaagacattgttgggttctgacacagtcaaaactcctacaactcttccaagagcagctggtcgagaaaccaaatatgcaaatctctcctcaccatcttctacagtatctgagagtcagctgactaagcctggagtaattcgcccagtacctgtaaaatccagaatattactgaaaaaagaggaggaagtctatgaacccaaccctttcagtaaatacttggaagataacagcgacctcttttctgaacaggctgcacattctgtggactcctactgcaacggaagtgacacgtctggtccttggctcctctgatcattgaggaaccctatccttgtggctagttactgtagcctttgactttcctacttcctgaaaaagagaaaaagacgatgatagaattcaatggcaagaacatgggctcttgtgatttttgaaaaaatcagtccttactgaacttcaattttatcctacaaaaatggggctactaatcaccatttctaatggaacccatactaataagtatttgtgatttttttaaaagtataatttctttaaattttttccaagtgctttcatctttattgcagtataattgacaaaaattatacctatttaaggtgtaaaatgtgatgatttgatgtatgtgtacattgtataatgattaccacagttaaattaatcaatgtaactattaatgtactagttactctgtgtgtgtatatgggagaagagatgaggacacataaaatctattctcagcaaatttcaagtaaaaagtaaaatattattaactgtagtcaccatgctatacattagctctccagaacttattcctttgataactgaatgtttctaccctttaaacaccatttttccttttcacttaaatcccttattaagacaataatagattcaaaacaacaaaacatccatttcaaccaaaagtccattccaacccctggcaaccatcattctactctttgcttctgtaattctgactattttagattccactaaagtgagatcacgcaatatttgtccttttgtgactggctcatttcacttggcataatatatttggaattcattcatgttattggaaatggcaggatttctttcttttttaaggctgaataatatttcattgtttaacacgttttatttattcatttatccatcaacagacacttcggttgttgccatatctaattgttaagaatgatactgcaatggttgaatgaaatactcactatcaaagggctctaaagacttaaatgtttcttgttatcatttcctttagaatcacttcaattttggaagaaagaggttgatttcctgctaaagggtcaactgaatatattgtcttctttctctcttccattatgagcaattgtagaagcctattttctatgttacttttgacttcttcaattttaactgctcctccatcctaaacacctccacatgggaaataaaagaccagaatccaactatatgtatagaaaaacataaaactcagcattgtagtcctctgctgctcactgtgattgattatggagtgtttttctttcttttcccttgagtgtacctccatcagatacttccatgctgatccatgccatctgttctgtgaaacttgctgtcagacaaccatacactttaagcactaagttatccaaattctatcttaaaaattatgttgtgattattaaaaatctttttttatatagaggatttcaaatagctaagcatatgctaaatttttcatacttcacaagttcaaattttcttggttcaaatcaggattcaaaatatatgtgttgctttaaatatgtctgtttgaaaaaatgcatatggattctccaaaatttgggtttctaagcaagaagatatgccatataatcgaaaccaatttatattggctttatcttagtgaaatgtagataatcacaatctcttatttcatagtaacatgaggtttttgtgatgctgtctgtaaagtgttggtgtctttagataaaggggtcgctctttaagaaaatattactactgttcatgattttattagcaaggtgttgatttaaattaaaactgtagcaaaaatgctatggctctgattttaaactgctgtaagttctagacagcaaaggaaagctgaaaataaatgctgcatttaaaaataaatgttgctttaccaaagaggtgggaagatggaagacaggatggagtgaaaggctccagtaattttacctatggtactctgagttcacaaaggtgtcttgtactcagacagaaaaccgcagcgtgaagaggggacagcatgagtgaagaggaagtgaattttcacccttcacttccaaaccacaggaaaggaagtgactttaaaatgccaggatggaacaaaagcatttcagatgtgcaggctttaataagaagagctcaaaatgccgtaaaatgccctttgatgttgcaatggaaacagtttttgaagttaaacagtatgatttgatggttgagtagaaagtaggctttttctagagcaccaaatgcatcagatatggctataacactaattttctgatgtgtctgtcagttaagcagagctaaattaatatattcactgcatatttgtctgctaatttttctttaatgaacaaagatattacttgcttcataagttcctgtcttcttgaagttttgtagaatgatagtatcatctcaaaaataattaattcttttcaaaaatcaagctcctcagtaaagcctttttttgaaacattagttctatgtatactgaaattgaaagaggacaattctcaagtgactaaaaagcggtttaaagcattttatcagaaataactatgttacctatctcattgatagaaacatgtccaagactgttttatgatccctgtacatccctcaaaaactaaaacattaaaagattcatatattgcatgctaaagcaggatagagtgatgttcattttcaagaatcatttagaatagtgatctctaaagtattaggtaccaacctcaagataattcgctggggtggaagtagggcacaagttagacgtgatagagatgccattagtgtgttttgaagcaaatctcaaacaggggtcacaaactatggtctgtgggccaaacctggctcaccagtgtttttataaataaagtattattggaaca

SEQ ID NO: 156007 - DNA, 3102 bp, Homo sapiens
  Payload ID: 10633
  Gene Symbol: MLIP
  Gene Name: muscular LMNA-interacting protein
  Uniprot ID: Q5VWP3
  ENST ID: ENST00000502396
  CDS Start-End: 33-3014
ttggtttgctcgctcccttatgtgatgaatcaatgctttcagaacaggggcttctgagtgactgcgggaacaattacttccaaatgacctcgtgcatcttatcagggagcattcagaccacaccccaggtctctgctggtggttctgaagccaaacctctgatcttcacatttgtccccactgtcagaagactaccaacccatactcagttggctgacacctctaaattccttgttaaaattccagaagaatcaagtgataagagtccagaaactgtaaataggtctaaatccaatgactacttgaccttgaatgctgggagccaacaagagagagaccaagcgaaattgacttgtccttcagaggtcagtggaacgattttacaagaaagggaattcgaagcaaacaaacttcaagggatgcagcaaagtgacctcttcaaagctgaatatgtccttattgtggactccgaaggggaagatgaggctgcaagcagaaaagttgaacaaggccccccaggggggattggcaccgcagctgtccggcccaagtctctagctatctcgtccagtctggtctctgatgtagtgcgtcccaaaacacaggggactgatctcaagacctcatcacatcctgaaatgcttcatgggatggcccctcagcaaaagcatgggcagttaacttcttctcccactacctctgagcagcttgcctgtaaaccacctgctttctcctttgtttctccaactaatccgaacacaccacccgacccagttaacctcgagggagcctctgtcctagaggagttccacactaggaggctggatgtcggtggggccgtggtggaagaatcagctacgtattttcaaactaccgctcactctacacccttttctgcatcgaagggcacctcctcgacgttactgtttccccattccactcaactatcaggttctaatttacccagttcaactgcagcagatccaaagcctggactgacctctgaagttctcaagaagacaactttaacctcgcatgtccttagtcacggagaaagtccgagaacctcttcttctccaccgtcctccagtgcttctctgaagtcgaattcggcctcgtacataccagtccgcattgtcacgcattcactctctccgagccccaaaccatttacctcctctttccacggctcttcttccaccatctgcagccaaatgtcatctagtggaaatctttcaaagtcaggggtaaaatccccggtgccttcccggcttgcccttctcactgccattctcaagtcaaacccttcccaccaaagacccttttcccctgcatcctgtcccaccttctctctcaactccccggcctcttccacgctcacacttgaccaaaaagaaaagcagaccccacccacgcctaaaaaatctctctcaagttgttccctgagagccgggtcaccagatcaaggggaactccaggtttctgaattgacccagcaatcttttcacctgcctgttttcaccaagtctactccgctttctcaggcgccctccctctctcctacaaaacaggctagtagcagccttgcttccatgaatgtagagagaacaccatcacctactttgaagagcaataccatgctctccctgctacaaaccagtacatccagttctgtgggtcttcctcctgttccaccaagctcttctctttcctctttgaagagtaaacaggatggtgacctcaggggtccagaaaaccccagaaacattcacacgtacccttctacattagcctcctctgcattatcttctctatctcctcctattaatcaaagagctacgttctcttcttcagagaaatgtttccatccttccccagctctttcaagcctgataaacagatctaaaagagcatcatcccaactatctggccaggagctgaatccttcagctcttccttcactccctgtctccagtgctgactttgcctctcttcccaacttgaggtcctcctctctccctcatgccaatctgcccaccctggtgccccagctcagtccctcagctctgcacccacattgcggcagtggtaccttgccttcaagacttgggaaatctgaaagcaccacccccaaccacaggtcacctgtttcaaccccatcacttcccatatctctaacaaggacagaggagctgatttcaccttgtgcattgtccatgtcaacaggcccagaaaataagaaatcaaagcaatacaagaccaagtcaagctacaaggcttttgcagcaatccctacaaacacattgcttttggaacagaaggcactagatgaaccagccaagactgaaagtgtctccaaggacaacacattagaaccaccagtggagctctattttcctgcacagctcaggcagcaaactgaagagctctgtgctaccattgataaggtcttacaggattccttgtctatgcattcttctgattctccttcaaggtccccaaagacattgttgggttctgacacagtcaaaactcctacaactcttccaagagcagctggtcgagaaaccaaatatgcaaatctctcctcaccatcttctacagtatctgagagtcagctgactaagcctggagtaattcgcccagtacctgtaaaatccagaatattactgaaaaaagaggaggaagtctatgaacccaaccctttcagtaaatacttggaagataacagcgacctcttttctgaacaggatgtaacagtccctcccaagcctgtctcgctccatcctttatatcagactaaactctatcctcctgctaagtcactgctgcatccacagaccctctcacatgctgactgtcttgccccaggacccttcagtcatctgtccttctccttgagtgatgaacaggagaattctcacaccctcctcagtcacaacgcatgcaacaagctgagtcatccaatggtggctattcctgaacatgaagctcttgattccaaagagcaatgaagttggagcagaggctgaaaacacaggctgctgaagttttttggaatgctggtgctaaccacttgctagatttaactttttttttttt

SEQ ID NO: 156008 - DNA, 1746 bp, Homo sapiens
  Payload ID: 10633
  Gene Symbol: MLIP
  Gene Name: muscular LMNA-interacting protein
  ENST ID: ENST00000503951
  CDS Start-End: 63-1746
tagtatgaggctcccttcccacctcagtcattggtttgctcgctcccttatgtgatgaatcaatgctttcagaacaggggcttctgagtgactgcgggaacaattacttccaaatgacctcgtgcatcttatcagggagcattcagaccacaccccagtctaaatccaatgactacttgaccttgaatgctgggagccaacaagagagagaccaagcgaaattgacttgtccttcagaggtcagtggaacgattttacaagaaagggaattcgaagcaaacaaacttcaagggatgcagcaaagtgacctcttcaaagctgaatatgtccttattgtggactccgaaggggaagatgaggctgcaagcagaaaagttgaacaaggccccccaggggggattggcaccgcagctgtccggcccaagtctctagctatctcgtccagtctggtctctgatgtagtgcgtcccaaaacacaggggactgatctcaagacctcatcacatcctgaaatgcttcatgggatggcccctcagcaaaagcatgggcagttaacttcttctcccactacctctgagcagcttgcctgtaaaccacctgctttctcctttgtttctccaactaatccgaacacaccacccgacccagttaacctcgagggagcctctgtcctagaggagttccacactaggaggctggatgtcggtggggccgtggtggaagaatcagctacgtattttcaaactaccgctcactctacacccttttctgcatcgaagggcacctcctcgacgttactgtttccccattccactcaactatcaggttctaatttacccagttcaactgcagcagatccaaagcctggactgacctctgaagttctcaagaagacaactttaacctcgcatgtccttagtcacggagaaagtccgagaacctcttcttctccaccgtcctccagtgcttctctgaagtcgaattcggcctcgtacataccagtccgcattgtcacgcattcactctctccgagccccaaaccatttacctcctctttccacggctcttcttccaccatctgcagccaaatgtcatctagtggaaatctttcaaagtcaggggtaaaatccccggtgccttcccggcttgcccttctcactgccattctcaagtcaaacccttcccaccaaagacccttttcccctgcatcctgtcccaccttctctctcaactccccggcctcttccacgctcacacttgaccaaaaagaaaagcagaccccacccacgcctaaaaaatctctctcaagttgttccctgagagccgggtcaccagatcaaggggaactccaggtttctgaattgacccagcaatcttttcacctgcctgttttcaccaagtctactccgctttctcaggcgccctccctctctcctacaaaacaggctagtagcagccttgcttccatgaatgtagagagaacaccatcacctactttgaagagcaataccatgctctccctgctacaaaccagtacatccagttctgtgggtcttcctcctgttccaccaagctcttctctttcctctttgaagagtaaacaggatggtgacctcaggggtccagaaaaccccagaaacattcacacgtacccttctacattagcctcctctgcattatcttctctatctcctcctattaatcaaagagctacgttctcttcttcagagaaatgtttccatcctt

SEQ ID NO: 156009 - DNA, 703 bp, Homo sapiens
  Payload ID: 10633
  Gene Symbol: MLIP
  Gene Name: muscular LMNA-interacting protein
  ENST ID: ENST00000511678
  CDS Start-End: 335-703
cttatagattgccagcctgctcagcgtctctaacccttttcaggtctctgctggtggttctgaagccaaacctctgatcttcacatttgtccccactgtcagaagactaccaacccatactcagttggctgacacctctaaattccttgttaaaattccagaagaatcaagtgataagagtccagaaactgtaaataggtctaaatccaatgactacttgaccttgaatgctgggagccaacaagagagagaccaagcgaaattgacttgtccttcagaggtcagtggaacgattttacaagaaagggaattcgaagcaaacaaacttcaagggatgcagcaaagtgacctcttcaaagctgaatatgtccttattgtggactccgaaggggaagatgaggctgcaagcagaaaagttgaacaaggccccccaggggggattggcaccgcagctgtccggcccaagtctctagctatctcgtccagtctggtctctgatgtagtgcgtcccaaaacacaggggactgatctcaagacctcatcacatcctgaaatgcttcatgggatggcccctcagcaaaagcatgggcagttaacttcttctcccactacctctgagcagcttgcctgtaaaccacctgctttctcctttgtttctccaactaatccgaacacaccacccgacccagttaacctcgaggga

SEQ ID NO: 156010 - DNA, 1032 bp, Homo sapiens
  Payload ID: 10633
  Gene Symbol: MLIP
  Gene Name: muscular LMNA-interacting protein
  ENST ID: ENST00000509997
  CDS Start-End: 30-710
tctttctctctttctcattctctttcaatatggaacttgaaaagcgtgaaaaaagaagcttattaaacaagaatttagaggagaaactgacgtctaaatccaatgactacttgaccttgaatgctgggagccaacaagagagagaccaagcgaaattgacttgtccttcagaggtcagtggaacgattttacaagaaagggaattcgaagcaaacaaacttcaagggatgcagcaaagtgacctcttcaaagctgaatatgtccttattgtggactccgaaggggaagatgaggctgcaagcagaaaagttgaacaaggccccccaggggggattggcaccgcagctgtccggcccaagtctctagctatctcgtccagtctggtctctgatgtagtgcgtcccaaaacacaggggactgatctcaagacctcatcacatcctgaaatgcttcatgggatggcccctcagcaaaagcatgggcagactcctacaactcttccaagagcagctggtcgagaaaccaaatatgcaaatctctcctcaccatcttctacagtatctgagagtcagctgactaagcctggagtaattcgcccagtacctgtaaaatccagaatattactgaaaaaagaggaggaagtctatgaacccaaccctttcagtaaatacttggaagataacagcgacctcttttctgaacagcaatgaagttggagcagaggctgaaaacacaggctgctgaagttttttggaatgctggtgctaaccacttgctagatttaacttttttttttttttccagaatgagtgctccctttatgagctgcagtgcagcagaaccaaaaaaaaagtttgctgcaattatatagcatcacagtgctctgctaacagccagcatagaagagatttacctacagctttttgcaccactgttctagcctttaatgccttctacttaatattaagctgaccgcaatactaacgtgcccctatatttggcagccaaataaagaagaatcgtgggtaaata

SEQ ID NO: 156011 - DNA, 2023 bp, Homo sapiens
  Payload ID: 10634
  Gene Symbol: MSC
  Gene Name: musculin
  Uniprot ID: O60682
  ENST ID: ENST00000325509
  CDS Start-End: 291-911
tttgttccaaggagtacagatagccttttcaaaaggcgcagcttaccgcggtgcgcgcggattctggacttgggcgccaactcgtagtccacgctccccggggtcagcagaggggcgctcacgctctcgccacccacctcgctttctcaccccgcgcttcccggcctgggtttttagtcttccttggagcgctctctggcctccgcctccgccagggagcggaaggcggagacagcgagactggccaggggggaggaaagaggacgcgtgtgggcaagggggacaacgggatgtccacgggctcggtgagtgatccggaggagatggagcttcgggggctgcagcgggagtacccggtccccgcctccaagaggccgcccctccgcggcgtagagcgcagctacgcctcgcccagtgacaactcgtcggcagaggaggaggaccccgacggcgaggaggagcgctgcgctctgggcacagccggcagcgcggaaggctgcaagaggaagcggccccgtgtggctgggggcggcggcgcaggtggtagcgcgggcggtggtggcaagaagcccctcccggccaagggctcagccgcagagtgcaagcagtcgcagcggaacgcggccaacgcccgtgagcgtgcccggatgcgcgtgctgagcaaagccttctccaggctcaagaccagcctgccctgggtgccccccgacactaagctctccaagctggacacgctccggctggcttccagttacatcgctcacctgcggcagctgttgcaggaggaccgctatgagaacggctacgtgcacccagtgaacctgacatggccattcgtggtctcgggaagaccggactctgacaccaaagaagtttccgcagccaacagactatgtggaaccaccgcttaaatcggactggaactcacttgatgggattattcgttaaatgcgagtgtttgggggccacggagagaagggagagctcgtgagatgggaagaagtttccgctggattctccttgacccttcccctttccctggaactgtgatcgtgacaggtggcgggtgtggctgtcactgcacagcgcccacggctacagctgcgccggatctgggcgaccacgttttgcctctccaaaaagagcttcctttcgtgacgagacgcggacgcaggtccaccctcgggccctagctctgtagactaactctcggctgctgccccagcccgcgccagacagcccacggatccgttctcagcggagccagattcatcgcacacgtgcgggacggttccacacagccccggcctttcgcggtgacacaatggttagggaacggttagaacgcgctctacatccgctttaaagacagaggtctagacgtgagatccgcgtcgggacagggttttaagtgacaaagaagggcgagtggcttctctgggccgggttcgtactccagcacagcgcccttctaacgggcgggaggaaggccgctgctcgcagggctaggtggagacacacttcccagatcaccgcaggcgggttttacccggagagctctgggccgttcggcctccctgccgggtggcttcttcaatcccgtctccttcccaagctcccggctttttctaatcaggcaggcgtctgtcaaccctctccacttctgggctgaagcctccccaagccccgctgcgccaacctgtgtggggtcttcttcgggcctccctctccgccccgctcctgctcctacctgcagcacccccagctccgactccagactctctgcatcaggtctccccactccacgctccgggcgccccaactccaacaccacgtcctgccgcgcaggttcttccccgcgcggaggagcgcgcagggtgggcggcttaccatagcaagtgatcctgcgatagggaacgcgcccttgccccgaggctgcactaccacaggaaataacatatgtaaataaatttatttttttatgaataataaaacgcgctgtaaaaaccgtgtgccccttgga

SEQ ID NO: 156012 - DNA, 721 bp, Homo sapiens
  Payload ID: 10635
  Gene Symbol: MUSTN1
  Gene Name: musculoskeletal, embryonic nuclear protein 1
  Uniprot ID: Q8IVN3
  ENST ID: ENST00000446157
  CDS Start-End: 272-520
gggtctctgcagccatctgctttcatcagggctgcagcccccaggcagcagtactgggagcccctctcatctccgagaataaactctgaagccagcgaccctgcggacctgaatcatcagggagcctgtcagaggaggggcagtgactctgcgggacaagcaagcaggctatataagtttcagaaggctgggctccactcagatcttttccagcagctgctgcctgccagagaggcgccttcagagacccagcgcttacacaatacccaccatgtcccaggctggtgctcaggaagcccctatcaagaagaagcgcccccctgtgaaggacgaggacctgaagggggcccgaggaaacctgaccaagaaccaggaaatcaagtccaagacctaccaggtcatgcgagagtgtgagcaagctggctcggccgccccgtcggtgttcagccgcacccgcacaggtaccgagactgtctttgagaagcccaaagccggacccaccaagagtgtcttcggctgagaagtgtgcgccactccccttgctgcccgaatgctcggaaacaggagcctttcccaggaactcttttttatgccagaacgcttcctctcccctgctgtctctggggctgccaccctcccccacagtccaggcccttcagccaagggctctgcaccagcaccttggaagcaccaataaagaggatgcccacgtggccccagc

SEQ ID NO: 156013 - DNA, 622 bp, Homo sapiens
  Payload ID: 10635
  Gene Symbol: MUSTN1
  Gene Name: musculoskeletal, embryonic nuclear protein 1
  ENST ID: ENST00000486659
  CDS Start-End: 149-412
gttgatgccagagggagtggaggtggagtcctggacactttcggctctggcagctgtgtcttgatctgagccccaagcatgaactggaggctctgcagcccttgggagatgggggctcagggaggaccccctgaagaacccctcttctatgtggctttggtggtattccacggctggtgctcaggaagcccctatcaagaagaagcgcccccctgtgaaggacgaggacctgaagggggcccgaggaaacctgaccaagaaccaggaaatcaagtccaagacctaccaggtcatgcgagagtgtgagcaagctggctcggccgccccgtcggtgttcagccgcacccgcacaggtaccgagactgtctttgagaagcccaaagccggacccaccaagagtgtcttcggctgagaagtgtgcgccactccccttgctgcccgaatgctcggaaacaggagcctttcccaggaactcttttttatgccagaacgcttcctctcccctgctgtctctggggctgccaccctcccccacagtccaggcccttcagccaagggctctgcaccagcaccttggaagcaccaataaagaggatgcccacgtggccccagcaatcagaag

SEQ ID NO: 156014 - DNA, 11156 bp, Homo sapiens
  Payload ID: 10636
  Gene Symbol: MKLN1
  Gene Name: muskelin 1, intracellular mediator containing kelch motifs
  Uniprot ID: Q9UL63
  ENST ID: ENST00000352689
  CDS Start-End: 41-2248
gctgccagcggtcggtggcggccgctacggtgctgacaagatggcggctggcggagctgtcgctgcggcgcccgagtgccggcttctcccctacgcgctacacaagtggagctccttttcctccacctaccttcccgagaacattttagtggacaaaccaaatgaccaatcttcaagatggtcttcagagagcaactatcctccccagtacttgattctaaagctcgaaaggcctgctatagttcagaatatcacatttggaaaatatgagaaaactcatgtttgcaatttgaagaaatttaaagtctttggtggaatgaatgaagaaaatatgacagagctgttgtccagtggcttaaagaatgattataacaaagaaacattcaccttgaagcataaaattgatgaacagatgttcccttgtcgattcattaaaatagttccactcttgtcctggggacccagctttaactttagcatctggtatgttgaacttagtggcattgatgatcctgatatagtacaaccttgtctcaactggtatagcaagtaccgtgaacaggaagctattcgcctttgcctaaaacacttcagacaacacaactatacagaagcttttgagtcactgcaaaagaaaaccaagattgcactggaacatcccatgttaacagatattcatgacaagctggtgttgaagggtgattttgatgcttgcgaagagttgattgaaaaggctgtaaatgatggcttgttcaatcagtatatcagtcaacaggaatataagccacgatggagtcaaatcattcccaaaagtaccaaaggtgatggggaagataaccgtccaggaatgagaggaggccatcagatggttattgatgttcaaacagagactgtttatttgtttggtggctgggatggaacacaagatcttgctgacttctgggcgtacagtgtgaaggagaaccagtggacatgtatctctagagacactgaaaaagagaatggtcctagtgccagatcgtgtcataaaatgtgcattgatattcaacggaggcaaatctacacattggggcgttacttggattcctctgtgaggaacagcaaatctctgaaaagtgacttctatcgttatgacattgatacaaacacatggatgttactaagtgaggatactgctgctgatggagggccgaaattggtgtttgatcatcagatgtgtatggactcagaaaaacatatgatctacacttttggtggtagaattttgacttgtaatggcagcgtagatgacagcagagccagtgaaccacaattcagtggcttgtttgctttcaactgtcaatgtcaaacctggaaacttcttcgagaggactcctgtaatgctgggcctgaggacatccagtctcgaataggacactgcatgttattccactcaaaaaatcgttgcttatatgtatttggtggccagcgatcaaagacctatttgaatgatttctttagttatgatgtggactctgatcatgtagacataatatcagatggcaccaagaaagactctgggatggttccaatgacaggatttacacagagagcaactattgatccagaactgaatgaaatacacgtcttatctggactcagcaaagataaggaaaagagggaagaaaatgttagaaattcattctggatttatgacattgtgaggaatagttggtcttgtgtctataagaatgatcaagctgcaaaggataatccaactaaaagtcttcaggaagaagaaccatgtccaaggtttgcccatcagcttgtatacgatgagctacacaaggttcattacttatttggtgggaatccaggaaaatcttgctctccaaagatgagattagatgacttctggtcactgaagttgtgtagaccttcaaaagattatttactgaggcattgcaagtacctcataagaaaacacaggtttgaagaaaaggcccaagtggatccccttagtgctctgaaatatttacaaaatgatctttatataactgtggatcattcagacccagaagagacaaaagagtttcagctcctggcatcagctctattcaaatctggttcagattttacagctctgggcttttctgatgtggatcacacctatgctcaaagaactcagctctttgacaccttagtaaatttctttcctgacagcatgactcctcctaaaggcaacctggtagacctcatcacactgtaactgaagagtcactggacacagaaatggaaaacaggagtcgattttccgtcttttggattgcagctccactgactgacagtaaagctgcagtgattgaggactgcaccagagttctgaagggatcttaaccatcacaagtttttaccctcttccttcatgcctgacctcaaccccgctctcctcatcctattcctaaattaggctaataaagtgaaattggtatactttccagttaaatatatatatatatatattttttcttactttatcttttaagaattaatgagtataaaagaaaaattaggcagtttacccttttcagatttttatttcttttttttttaattgggggaaataagcactattaacagattcagcactacaagtattttgaatgttgttgctgttggtcatttggcctgccttttcccttcctatttcactttgcctcccatcacacaactgcgtgtaaatggtgtcacttgttcacctctttacttcattcttaacaagtgtatagttctctaggacagttgatgtatgttaaggtgatatctgtgtctgtattgacttgtcttgtgttacattaaacagtaggcagaactgaggtctcaagtttgcactcttggccatagaactaaaaatgaaacctgagattgacccaagcacctatctgagattggtatataatatttctataatgatatattttatagtagatattacaatagcatctgactttgagtcacagaaaccttaaactgaggagacaatagttcagaacctttttaagagccattctaaaagtgaccagcaggagggatctagtagtgaataatatcttaatagcaattttaggagaaaatgactctttcgtccagaagagctctgcagaaccagggctcccgtttatcttgtgctatctctgtagtattttcatttgagagaggaggctgagtttccagagctttgctttcatttatttttatacacattgtctctctatatctgcttgtggatattgttattttgaagagaaatggtttgtggttgtccagtggtatacaactgacaggcatttcattaagcacatagaccagactttgtgaatggttcagatattttttcattaaaaaacaaggtatggcagatggacttttccatgggtcaaattttttgtgtgagagatagaggtacatgtcttctgatgatgtgctgtggaatgcaatgtgggaaacctacatctggctagtgcttacatttgctcaaaaagcatgttgtatgaagctgactgccaccatgctaaagcagattcatattaagaagtgtcggtcgatccagtggctcttaagagtgaatagctttatggaatcaagtatgtccctgagtagcaagattaggcctcaccaaagaagaaattaacctgcactttcaaaaagtaccatgtataggaatgaaacattgaggtcccactttattctgtctttagtacatggttttacttattttggggatggatagaaatatatttttgctagttctaggcttgaatcatgggctccttggctttcctagcatcccaaagcagtcaacagtgatttcttaagcaatttgatctgtacctttacttgtgaaaggtatgctatataattcagcaagtaccaacttgtgtagctgcagaataaccaagtggctatccagtcaagtaaatacagtttgcttacatacttcaacagtttcataaaacgattcccctgagtgacacaagaacataaaatgttaatatcactaatatagcctgttaaatcttttgtggagacaggtgcaaatcagaagattgacaaggaagaacttgagcttgctaaataagacttcctaaatttaaaagctctagttttgcttagtgtgaattctggcactttaaaaagattaagcaagtgaaattctgctgccctccaccatttatttttacagtgctttgtaatttttttcatcagttccttaaatgttatttggaggaaactaagttcttgacctcagtaattttatttttgtttttccctaaatgtttccctactagtctttttggaaaacatgtttgttttaatttcatcttccctcactttatttaggtagaatttttcccccttcatttctgaaattttttgctcaccgccatgtttaaatggggttgaatcatagcgagccatttgctcttgccaaagtgagatagatgtactgaggagataattgaaaagtcagactctgtactgtggggctttaatcggagcactgctggaaatgattgcagagaatgtagtgcttcatatatccatgaccaagattgacatgttgctcacaacatgtcacaatttagtgaggagctacatgtatttccaagaattccagcatagattataatttaaataatcgaatttggtatttaggtacattgtttatatagccaagtgtatatgctttactacctaacaattattctagcctaggtgaatccctaattgaaacacctggctaacactttagacacataaattaagtgggatacagttttctcatttgtattatctccagcttcaacctcatttatcctttttcctagtataatacattgttttcaaccagaaattaaagtagatatccaacattattttcagtgcttgtacttcatgagaaataatctgattttcaagacacctcttaagtgcatttgcattttattttggtaatggcagagacctcatgtggccagtttgattgattgaagaatgtatcactcttattcaagcaaaggaattcagacttaaatgcctacctctgtgctgaagctgacagacagtattaactcttatcaaggccatcttttagacctgattttcatttatatgaaaacagacctgtccatgtctaataagtaaaaactgatagaatacattaaaaagtcactggtttatcatagaaaagtttgatgggtttagagctcagtgatttaagcttgtaaaactgcattcttgggcaaaatatttatattgtatataaatggttggcagcttattccagttgatctcttcacatctgccttaaaagtgctatgtagagatacattaacagagttataataaaacagtgttttaaaatctagcctataaacaaaaactagtttgaggcacccaagcatttagtgagagattgagaatgatgcttaatggatcaaaaaagcaattaggagtatgttcctgattttattctctaaattatactcaatttcatggtaattacatgaagaagttacctgcaattattcttaacactacatggaattcactgggtaattgtgggtcatttatttcctgaaagtcacgtgaaatccttagctggttgaatgttgcacagtatttgagaattacggtttgaagtgatttctgtgggagggaatcattgcaatgtatattctaaataaagtcatctaactattaaaaaaaaaacacccttcctaacccttcttttcttaaaattccacattcatccacaatctcatccctttgtagaaattcttgcctgaattctcaccaagttttgaattcctaaggtagccccgatctaggatgtgaaggctgcccagaaaaagtttatggctggaggagtatcatacagtgtctacatatgatagtacttacagattaggtctttggatgctttaacacaaaagatttttgttatccttattagtcaaataacgctattcttttgtggttctagaccctggcttctatctccctgtgatttgttttaatgctgaaatgacttggctatccaaagcttctagtctagaggtctgttggttgaaggcagacatttccaagtttgttgaaataatacgaagctgactagcttacgtgaatgatgttgccctcatttgttttgggtgaggactcattactgcagtatattgatctcttcaccaaatgctttttctttttctgaataaatgctgtattagaggttctatttatatatgatttttaaaactttggtttccttctatccaccaaatactgtgaattgtttttccatttatttttcttagctaatgtaactttattcttcacttttttttagccctagacttcctagattttctgtggcattctgtaggacattgtattgcttggaaaaaaaaagatcaaaatcattctggggcaaatgctctattatccttatttatgacaagagaataatgaaattcataagaaattaataacattcagatattgctataaatgtacttgagtcattttcatttggggatagtaataatggctgtggcagctttaatggagaaacctgtgttggcctctttttctggcattaggatctcttgtcatagaactattggtaaagtacaggtttgatagcagagttcctgaattcagcatatcatcagaatttccatttaccttttgtcttttctttttattgtattttttaacctttttgtttctattcctacctcccatgagtaacattgatttctgctgaagttagaatttgtgttaagaattgactttaaacttctgaaatagttgaatattagaagtggcttcagttgccatgaaatgattgcttttctttttctttttttttccttaaataaaaataatgcagccttatatatgtctcttcccctcaagaatgtgaatttaggctgggcatagtgactcacgcctgtaatcccagacctttgggaggctgacacgggaagattgcttgagcccaggaatttcagaccagcctgggcaacacaggaagactccatctctacttaaaatatttttgttttttagccaggtgtggtggtatgtgcctgtagtcccagctacttgggaggctgaggtgggaggatcacttgaacccaggagtttggggtgcagtgagctatgattgcgacactgcactccagcctgggcaacagagcaagaccctgtctcaaaaaaaaaaaaaaaaaaagaatgtgaatttagctccaattccaaatgactaactcttaggccagtcatagccaatgaaatcatctgacggtagcttctgtagcccttaacctaaggagtcattagaggttatagtaaattagtttctctagtggtgcagagagaaatgccatcggggaaattatcactgtctttttggctaaagttttatattgtgaactggatcccacttaacagcttaaaaacacaaaaatgaaagggtagtcctagtttatcttcttaattagaatcattatttggaaataagatttgcaatgtgctgtctatccccaaacactgctgagcttgctggaaaacagaatttaacatgaatgttgtctgaaagctgtaggatcaatggcaaaaaaggggaaatgtttggtagggaattggaccagttctaaggtatcacttttaattataaaataatgtcttcctttttatctgcttttcagacagcctcagtgaactattaaacatttgtgtgcaaagtcctattttgcttatctaaggcattttgacttggaagtattaaacttcaggaacgagctagagaagacaatgagggtatgttagagaaggaaaaataggagctttttgcttatggattttagaggtccacaaatcgaaaggaaaaataaatttcttcatttctaaccctaaaataattttgttaatgagatgctgggaagaagactaccaaaaggcctcaaagctcatgcttctagaatattcagtaattctgaatagtctttgggaagtagcatttcttgggaagtagcatttcccttcttccaaataactgtttgagatcttaaaacagaaaatccagtgttaatgggctctagatcttaaactaggtgagcagcttcttacatacaaccagttccttgttaaggatccagcaggaaaaccagccataaaacatttcaacatgcagtttgggggctcccttgcttattcactgagtttaagctcttgctgcaacatagctctgtaccatctgggatgctagcagtcacagcagttagctcagatatctgagctgtctgccacacaaagcctgaggagatcatcattcttcagtttcattcattacttaatgaatgccaaattaattggcaggaagaagaaacactgtgtgatatactgaacaagcctgtgtgcatgaataaggagccactcaaaaagccaattttgagctttatttctccgttgttaacaaatctcaagaaagcctttgttacagtttagctcatgtcatttggttggttttattttctagccctttaacataggaggaaaattgtcatttcatgtataacttgtaacacagaattgaactgatactagtttccttgccttaaattaattatatgtcatcccaagggtctctgttaattctgctttgccaagcaataatgagatctgggtttggcattagaagtatttcataattttggttttttatttaggtttcctccacatctgtaaagtgattgattaaattagaggaggcgtgtagaataaatcccaatcccattgcaactggcagagctttataaatctttataaattcagttacaacaaaggagaggatcctacaccattagagccatgccatcaggtgtttgcaagtgacagctgtagtgtgttgcctcaaataataccaagttataaataataccaagtaattatcaactcactcccaaatttaataagatatcaaagtccaaaaggttacttaggagtagtcttccgtgggggaagataaatttattaaagagtcatgtactgatctttttcttgggattttttttcctttcccagaaaaaaaaattattttggtgactgatcaattgtaaacaattttcttccttacttacaaatcatccgttcagaaaaataaaagtggacttcctttcctaagcattacaattagcctgggcaagaggtgttatgattgtcttattctttaagccggcttactttttggatttgtgtgaaatgtcttttgaaaagaaagtagatagtatagtattaattaactactttgtatagtcttctgcataatttagagttgaaaataatgtaacattttcctgtgaacagattcctttatgcgtacatactttataaatatacatacatacacatacacatacatttttaaaatgctctttttaaagagattcttatcttgctcccactccaaaagctatgtacagttgagttattagcctcagaggaagagtacaggaaagcgaagatgaggacctccttttcttgtgttggtcttgggaacaaacagtattccgtctttcaaatatggcatatttctaaacagtttgggaaagatgttagaattttttaaaagtcagctcttttataaattggaagtactcagtagtcagaaattaagatcccctctgatagagatagattctcaaaaccaaaattggactgaaaattagattgagaagaaagatacaacttcctccatagccaataaaatctgtctttccaagtctgcttattaatgctgtgaatcgctccttctgtttgtgaaaacatctcctggactggaaatgtggtgctgtaaccagctgagccgaaagttggagaatgttaaatatcttatatgggacttacgataaaatgtattgatgttagtgattgtcaaaataggtttatcatttaaaaaactaggaaattactaagtataaagaagaaaaaccagtattaattaagtgatgagacctgttcattttgttttccctgacttatttccattaccaaacatagtaaaggccagaaaagattaaaaaaaaaattaacacagccattccattgttttttaccacatggagaaaggaccaggctggaagcatatgtccccccacccttatttatattcctttgagcattgccgttttctagacagacaatccgaaaataattgtgttgataggtctgtttaagcctgaactctgggtgtaaaatgttatccagaagctatagggagctgccttgctcaggtcattggaaatttcaaccctaagactcattggaatttctaagtccgttatgcaccattatgggcatatggagcatattcataccatgaggaggagtctttgtttatgatggactttttaatatggccataattaaactcacactcaaaaaggatgagctattgtcaaaagccaaaagaaaaacagacaaaatgaacatgaagcaaggagtccataaaacaagagttctttaccacgtttaagcaaatgtctctcaaaaaaaattgtatttctgtgcacattagctgagattcacacattttgcacctcagtagtatttcagatgagactcaatgtgtggagaaaaccgctaacttgtttggttctactcttaccccctcttctgtggcaatgtggggtcagggccgtatcctaaagtatccacatggtcttaaatggaaatcatgggactctggaaagctggcatgagctggttggagcttttaaacagaagtgctttatgggtatcagatctcttctgacatcaattgtttcaaatcattgttgggctctgtcgtgttctgcaatcttccccattcccctcatgatctctggcttatcttttatccaatctgtatggactttttaggattttttttttcttatagtacaaataattttcagatcccagctttggtaaatgtgttaattctactttgtgaataaataaatgagtgatctgctaaaaatggcaattgtagaattatgttgtatgtaatgtacatatggagaaagaatgtattttgttcattttcttaataaaatgttatatatggatgctacaag

SEQ ID NO: 156015 - DNA, 864 bp, Homo sapiens
  Payload ID: 10636
  Gene Symbol: MKLN1
  Gene Name: muskelin 1, intracellular mediator containing kelch motifs
  ENST ID: ENST00000416992
  CDS Start-End: 487-864
tcctccagagccgcccgggagcagggagggctccgctagcccggggggccctccccgcggggcagatgagttccatatccagactctcaaaccatgttttgggatcatccaaacattccatcctcctgactccataaactattggattcataacctgctccatgcttgaaaacatggggattggaattcgtttctggcgcagaaatgtttcttgatgaatgttctgaaaagaataaagtatctcctggagtcctccactgtcgtcagccctgtacaaggcaccttggtaaacccacaggatgaacaaggaacattttagtggacaaaccaaatgaccaatcttcaagatggtcttcagagagcaactatcctccccagtacttgattctaaagctcgaaaggcctgctatagttcagaatatcacatttggaaaatatgagaaaactcatgtttgcaatttgaagaaatttaaagtctttggtggaatgaatgaagaaaatatgacagagctgttgtccagtggcttaaagaatgattataacaaagaaacattcaccttgaagcataaaattgatgaacagatgttcccttgtcgattcattaaaatagttccactcttgtcctggggacccagctttaactttagcatctggtatgttgaacttagtggcattgatgatcctgatatagtacaaccttgtctcaactggtatagcaagtaccgtgaacaggaagctattcgcctttgcctaaaacacttcagacaacacaactatacagaagcttttgagtcactgcaaaagaaaaccaagattgcactggaacatcccatgttaacagatattcatgacaagctggtgttg

SEQ ID NO: 156016 - DNA, 2460 bp, Homo sapiens
  Payload ID: 10636
  Gene Symbol: MKLN1
  Gene Name: muskelin 1, intracellular mediator containing kelch motifs
  ENST ID: ENST00000421797
  CDS Start-End: 413-2344
aacctgatcctccggtagcgaagggctagaggcaaacaccgagctcctccagagccgcccgggagcagggagggctccgctagcccggggggccctccccgcggggcagatgagttccatatccagactctcaaaccatgttttgggatcatccaaacattccatcctcctgactccataaactattggattcataacctgctccatgcttgaaaacatggggattggaattcggaacattttagtggacaaaccaaatgaccaatcttcaagatggtcttcagagagcaactatcctccccagtacttgattctaaagctcgaaaggcctgctatagttcagaatatcacatttggaaaatatgagaaaactcatgtttgcaatttgaagaaatttaaagtctttggtggaatgaatgaagaaaatatgacagagctgttgtccagtggcttaaagaatgattataacaaagaaacattcaccttgaagcataaaattgatgaacagatgttcccttgtcgattcattaaaatagttccactcttgtcctggggacccagctttaactttagcatctggtatgttgaacttagtggcattgatgatcctgatatagtacaaccttgtctcaactggtatagcaagtaccgtgaacaggaagctattcgcctttgcctaaaacacttcagacaacacaactatacagaagcttttgagtcactgcaaaagaaaaccaagattgcactggaacatcccatgttaacagatattcatgacaagctggtgttgaagggtgattttgatgcttgcgaagagttgattgaaaaggctgtaaatgatggcttgttcaatcagtatatcagtcaacaggaatataagccacgatggagtcaaatcattcccaaaagtaccaaaggtgatggggaagataaccgtccaggaatgagaggaggccatcagatggttattgatgttcaaacagagactgtttatttgtttggtggctgggatggaacacaagatcttgctgacttctgggcgtacagtgtgaaggagaaccagtggacatgtatctctagagacactgaaaaagagaatggtcctagtgccagatcgtgtcataaaatgtgcattgatattcaacggaggcaaatctacacattggggcgttacttggattcctctgtgaggaacagcaaatctctgaaaagtgacttctatcgttatgacattgatacaaacacatggatgttactaagtgaggatactgctgctgatggagggccgaaattggtgtttgatcatcagatgtgtatggactcagaaaaacatatgatctacacttttggtggtagaattttgacttgtaatggcagcgtagatgacagcagagccagtgaaccacaattcagtggcttgtttgctttcaactgtcaatgtcaaacctggaaacttcttcgagaggactcctgtaatgctgggcctgaggacatccagtctcgaataggacactgcatgttattccactcaaaaaatcgttgcttatatgtatttggtggccagcgatcaaagacctatttgaatgatttctttagttatgatgtggactctgatcatgtagacataatatcagatggcaccaagaaagactctgggatggttccaatgacaggatttacacagagagcaactattgatccagaactgaatgaaatacacgtcttatctggactcagcaaagataaggaaaagagggaagaaaatgttagaaattcattctggatttatgacattgtgaggaatagttggtcttgtgtctataagaatgatcaagctgcaaaggataatccaactaaaagtcttcaggaagaagaaccatgtccaaggtttgcccatcagcttgtatacgatgagctacacaaggttcattacttatttggtgggaatccaggaaaatcttgctctccaaagatgagattagatgacttctggtcactgaagttgtgtagaccttcaaaagattatttactgaggcattgcaagtacctcataagaaaacacaggtttgaagaaaaggcccaagtggatccccttagtgctctgaaatatttacaaaatgatctttatataactgtggatcattcagacccagaagagacaaaagagtttcagctcctggcatcagctctattcaaatctggttcagattttacagctctgggcttttctgatgtggatcacacctatgctcaaagaactcagctctttgacaccttagtaaatttctttcctgacagcatgactcctcctaaaggcaacctggtagacctcatcacactgtaactgaagagtcactggacacagaaatggaaaacaggagtcgattttccgtcttttggattgcagctccactgactgacagtaaagctgcagtgattgaggactgcaccagagttctg

SEQ ID NO: 156017 - DNA, 572 bp, Homo sapiens
  Payload ID: 10636
  Gene Symbol: MKLN1
  Gene Name: muskelin 1, intracellular mediator containing kelch motifs
  ENST ID: ENST00000429546
  CDS Start-End: 219-455
agaagctgcagggtgaggatggggaaccgtttgctccttggaacattttagtggacaaaccaaatgaccaatcttcaagatggtcttcagagagcaactatcctccccagtacttgattctaaagctcgaaaggcctgctatagttcagaatatcacatttggaaaatatgagaaaactcatgtttgcaatttgaagaaatttaaagtctttggtggaatgaatgaagaaaatatgacagagctgttgtccagtggcttaaagaatgattataacaaagaaacattcaccttgaagcataaaattgatgaacagatgttcccttgtcgattcattaaaatagttccactcttgtcctggggacccagctttaactttagcatctggtatgttgaacttagtggcattgatgatcctgatatagtacaaccttgtctcaactggtatagcaagtagtaccgtgaacaggaagctattcgcctttgcctaaaacacttcagacaacacaactatacagaagcttttgagtcactgcaaaagaaaaccaagattgcactggaacatcccatgtta

SEQ ID NO: 156018 - DNA, 2448 bp, Homo sapiens
  Payload ID: 10636
  Gene Symbol: MKLN1
  Gene Name: muskelin 1, intracellular mediator containing kelch motifs
  ENST ID: ENST00000458153
  CDS Start-End: 4-516
aagatggcggctggcggagctgtcgctgcggcgcccgagtgccggcttctcccctacgcgctacacaagtggagctccttttcctccacctaccttcccgagaacattttagtggacaaaccaaatgaccaatcttcaagatggtcttcagagagcaactatcctccccagtacttgattctaaagctcgaaaggcctgctatagttcagaatatcacatttggaaaatatgagaaaactcatgtttgcaatttgaagaaatttaaagtctttggtggaatgaatgaagaaaatatgacagagctgttgtccagtggcttaaagaatgattataacaaagaaacattcaccttgaagcataaaattgatgaacagatgttcccttgtcgattcattaaaatagttccactcttgtcctggggacccagctttaactttagcatctggtatgttgaacttagtggcattgatgatcctgatatagtacaaccttgtctcaactggtatagcaagtagtaccgtgaacaggaagctattcgcctttgcctaaaacacttcagacaacacaactatacagaagcttttgagtcactgcaaaagaaaaccaagattgcactggaacatcccatgttaacagatattcatgacaagctggtgttgaagggtgattttgatgcttgcgaagagttgattgaaaaggctgtaaatgatggcttgttcaatcagtatatcagtcaacaggaatataagccacgatggagtcaaatcattcccaaaagtaccaaaggtgatggggaagataaccgtccaggaatgagaggaggccatcagatggttattgatgttcaaacagagactgtttatttgtttggtggctgggatggaacacaagatcttgctgacttctgggcgtacagtgtgaaggagaaccagtggacatgtatctctagagacactgaaaaagagaatggtcctagtgccagatcgtgtcataaaatgtgcattgatattcaacggaggcaaatctacacattggggcgttacttggattcctctgtgaggaacagcaaatctctgaaaagtgacttctatcgttatgacattgatacaaacacatggatgttactaagtgaggatactgctgctgatggagggccgaaattggtgtttgatcatcagatgtgtatggactcagaaaaacatatgatctacacttttggtggtagaattttgacttgtaatggcagcgtagatgacagcagagccagtgaaccacaattcagtggcttgtttgctttcaactgtcaatgtcaaacctggaaacttcttcgagaggactcctgtaatgctgggcctgaggacatccagtctcgaataggacactgcatgttattccactcaaaaaatcgttgcttatatgtatttggtggccagcgatcaaagacctatttgaatgatttctttagttatgatgtggactctgatcatgtagacataatatcagatggcaccaagaaagactctgggatggttccaatgacaggatttacacagagagcaactattgatccagaactgaatgaaatacacgtcttatctggactcagcaaagataaggaaaagagggaagaaaatgttagaaattcattctggatttatgacattgtgaggaatagttggtcttgtgtctataagaatgatcaagctgcaaaggataatccaactaaaagtcttcaggaagaagaaccatgtccaaggtttgcccatcagcttgtatacgatgagctacacaaggttcattacttatttggtgggaatccaggaaaatcttgctctccaaagatgagattagatgacttctggtcactgaagttgtgtagaccttcaaaagattatttactgaggcattgcaagtacctcataagaaaacacaggtttgaagaaaaggcccaagtggatccccttagtgctctgaaatatttacaaaatgatctttatataactgtggatcattcagacccagaagagacaaaagagtttcagctcctggcatcagctctattcaaatctggttcagattttacagctctgggcttttctgatgtggatcacacctatgctcaaagaactcagctctttgacaccttagtaaatttctttcctgacagcatgactcctcctaaaggcaacctggtagacctcatcacactgtaactgaagagtcactggacacagaaatggaaaacaggagtcgattttccgtcttttggattgcagctccactgactgacagtaaagctgcagtgattgaggactgcaccagagttctgaagggatcttaaccatcacaagtttttaccctcttccttcatgcctgacctcaaccccgctctcctcatcctattcctaaattaggctaataaagtgaaattggtatactttccagtt

SEQ ID NO: 156019 - DNA, 551 bp, Homo sapiens
  Payload ID: 10636
  Gene Symbol: MKLN1
  Gene Name: muskelin 1, intracellular mediator containing kelch motifs
  ENST ID: ENST00000446815
  CDS Start-End: 261-551
ccctcctcccgttcgctgccagcggtcggtggcggccgctacggtgctgacaagatggcggctggcggagctgtcgctgcggcgcccgagtgccggcttctcccctacgcgctacacaagtggagctccttttcctccacctaccttcccgatacttgattctaaagctcgaaaggcctgctatagttcagaatatcacatttggaaaatatgagaaaactcatgtttgcaatttgaagaaatttaaagtctttggtggaatgaatgaagaaaatatgacagagctgttgtccagtggcttaaagaatgattataacaaagaaacattcaccttgaagcataaaattgatgaacagatgttcccttgtcgattcattaaaatagttccactcttgtcctggggacccagctttaactttagcatctggtatgttgaacttagtggcattgatgatcctgatatagtacaaccttgtctcaactggtatagcaagtaccgtgaacaggaagctattcgcctttgcctaaaacacttcagacaacacaactat

SEQ ID NO: 156020 - DNA, 8257 bp, Homo sapiens
  Payload ID: 10637
  Gene Symbol: MCC
  Gene Name: mutated in colorectal cancers
  Uniprot ID: P23508
  ENST ID: ENST00000302475
  CDS Start-End: 565-3054
agaaaccacttacaactccagacgattcgaaggggaaacttcggcgtgaagtgcagctccgctccggctccctctagctttctttccttctctggaatccgaggcgcggatcttcctcgccccaccgccctagttttttcgggagctcgccggtgccctctagggtgtcggctcgtgctgggaagtgccctccatcctggtaatggggggcggcgaggcaccgtaggagtggcgaggcggcgcccagggtggcactgccccggaacggggcgctgggtgcgcgcgggagggtccccgcgcgggctccgccgctgccgcagctgcgagcgcgccgcgccaccgagcctcctgcagcaatggctcgtccgtgaaacgcgagccacggctgctctttttaagagtgcctgcatcctccgtttgcgcttcgcaactgtcctgggtgaaaatggctgtctagactaaaatgtggcagaagggaccaagcagtggatattgagcctgtgaagtccaactcttaagctccgagacctgggggactgagagcccagctctgaaaagtgcatcatgaattccggagttgccatgaaatatggaaacgactcctcggccgagctgagtgagctccattcagcagccctggcatcactaaagggagatatagtggaacttaataaacgtctccagcaaacagagagggaacgggaccttctggaaaagaaattggccaaggcacagtgcgagcagtcccacctcatgagagagcatgaggatgtccaggagcgaacgacacttcgctatgaggaacgcatcacagagctccacagcgtcattgcggagctcaacaagaagatagaccgtctgcaaggcaccaccatcagggaggaagatgagtactcagaactgcgatcagaactcagccagagccaacacgaggtcaacgaggactctcgaagcatggaccaagaccagacctctgtctctatccccgaaaaccagtctaccatggttactgctgacatggacaactgcagtgacctgaactcagaactgcagagggtgctgacagggctggagaatgttgtctgcggcaggaagaagagcagctgcagcctctccgtggccgaggtggacaagcacattgagcagctcaccacagccagcgagcactgtgacctggctattaagacagtcgaggagattgagggggtgcttggccgggacctgtatcccaacctggctgaagagaggtctcggtgggagaaggagctggctgggctgagggaagagaatgagagcctgactgccatgctgtgcagcaaagaggaagaactgaaccggactaaggccaccatgaatgccatccgggaagagcgggaccggctccggaggagggtcagagagcttcaaactcgactacagagcgtgcaggccacaggtccctccagccctggccgcctcacttccaccaaccgcccgattaaccccagcactggggagctgagcacaagcagcagcagcaatgacattcccatcgccaagattgctgagagggtgaagctatcaaagacaaggtccgaatcgtcatcatctgatcggccagtcctgggctcagaaatcagtagcataggggtatccagcagtgtggctgaacacctggcccactcacttcaggactgctccaatatccaagagattttccaaacactctactcacacggatctgccatctcagaaagcaagattagagagtttgaggtggaaacagaacggctgaatagccggattgagcacctcaaatcccaaaatgacctcctgaccataaccttggaggaatgtaaaagcaatgccgagaggatgagcatgctggtgggaaaatacgaatccaatgccacagcgctgaggctggccttgcagtacagcgagcagtgcatcgaagcctacgaactcctcctggcgctggcagagagtgagcagagcctcatcctggggcagttccgagcggcgggcgtggggtcctcccctggagaccagtcgggggatgaaaacatcactcagatgctcaagcgagctcatgactgccggaagacagctgagaacgctgccaaggccctgctcatgaagctggacggcagctgtgggggagcctttgccgtggccggctgcagcgtgcagccctgggagagcctttcctccaacagccacaccagcacaaccagctccacagccagtagttgcgacaccgagttcactaaagaagacgagcagaggctgaaggattatatccagcagctcaagaatgacagggctgcggtcaagctgaccatgctggagctggaaagcatccacatcgatcctctcagctatgacgtcaagcctcggggagacagccagaggctggatctggaaaacgcagtgcttatgcaggagctcatggccatgaaggaggagatggccgagttgaaggcccagctctacctactggagaaagagaagaaggccctggagctgaagctgagcacgcgggaggcccaggagcaggcctacctggtgcacattgagcacctgaagtccgaggtggaggagcagaaggagcagcggatgcgatccctcagctccaccagcagcggcagcaaagacaaacctggcaaggagtgtgctgatgctgcctccccagctctgtccctagccgaactcaggacaacgtgcagcgagaatgagctggctgcggagttcaccaacgccattcgtcgagaaaagaagttgaaggccagagttcaagagctggtgagtgccttggagagactcaccaagagcagtgaaatccgacatcagcaatctgcagagttcgtgaatgatctaaagcgggccaacagcaacctggtggctgcctatgagaaagcaaagaaaaagcatcaaaacaaactgaagaagttagagtcgcagatgatggccatggtggagagacatgagacccaagtgaggatgctcaagcaaagaatagctctgctagaggaggagaactccaggccacacaccaatgaaacttcgctttaatcagcactcacgcaccggagttctgcccatgggaagtaaactgcagcaggccactggggacagaagggcccatgtacttgttgggaggaggaggaaagggaaggctggcaggtaggtcggcacttggacaatggagtgccccaactcaacccttggggcgactggccatggtgacattgtggactgtatccagaggtgcccgctcttccctcctgggcccacaacagcgtgtaaacacatgttctgtgcctgctcagcagagcctcgtttctgctttcagcactcactctccccctcctcttctggtctggcggctgtgcatcagtgggatcccagacatttgtttctgtaagattttccattgtatcctctttttggtagatgctgggctcatcttctagaatctcgtttctcctctttcctcctgcttcatgggaaaacagacctgtgtgtgcctccagcatttaaaaggactgctgatttgtttactacagcaaggctttggtttccaagtcccgggtctcaactttaagatagaggcggccataagaggtgatctctgggagttataggtcatgggaagagcgtagacaggtgttacttacagtcccagatacactaaagttacaaacagaccaccaccaggactgtgcctgaacaattttgtattgagagaataaaaacttccttcaatcttcattttggaggcagggctgggaagggagcgctctcttgattctgggatttctccctctcagtggagccttattaatatccaagacttagagctgggaatctttttgatacctgtagtggaactaaaattctgtcaggggtttcttcaagagctgagaaacattattagcacttcccgccccagggcactacataattgctgttctgctgaatcaaatctcttccacatgggtgcatttgtagctctggacctgtctctacctaaggacaagacactgaggagatactgaacattttgcaaaacttatcacgcctacttaagagtgctgtgtaacccccagttcaagacttagctcctgttgtcatgacggggacagagtgagggaatggtagttaaggcttcttttttgcccccagatacatggtgatggttagcatatggtgcttaaaaggttaaatttcaagcaaaatgcttacagggctaggcagtaccaaagtaactgaattatttcaggaaggtcttcaatcttaaaacaaattcattattctttttcagttttacctcttctctctcagttctacactgatacacttgaaggaccatttactgtttttttctgtagcaccagagaatccatccaaagttccctatgaaaaatgtgttccattgccatagctgactacaaattaaagttgaggaggtttctgcatagagtctttatgtccataagctacgggtaggtctattttcagagcatgatacaaattccacagccttctgttcgctggaggatactccagccaccagttcggagggcagacagctgtatcctaaaagcaaccactgagaggccagcagtgaggctgcccatctccaaaacgaaacaacagatcaactggtatcagtctagaaggaccagctttggggtgctttgatcactatgaaaatgttcactggtttctgtcaatcatttggtcaaagttagttcctgtgattttttttttttttttttgagatggagttttgctcgtcaccaggctgaagtgcagtggcgtgatcttggctcactgcaacctctgcctcctgagtagctggaattacaggtgcccgccaccatacccagctagtttttttgtatttttagtagagacagggtttcaccatgttggccaggctggtctcgaactcctgaccactgatccacccacctcggcctcccaaagtgctgggattacaggcatgagccaatgtgcctggccattcctgtgattttttagaatttttcacttttcatataaagttgcattttatcatgaggaaaatgttttggctgaaaaacatatgccccaaaaaaaaaaaaatcagttttcactatttttccagcttgcctagggaaacgtcctcccctgagcaaagtgggatgtgcatggctcttttttgtgattaagcaggcatcaaatgggcagttttcattttcactgacacagaaacatgtggctgaagcaggaataaaatcctgcctactgacttctgtctccattcttgctccaggtaaaatcagagaacctccccttctctgagaattcccccaggcagaggcggctccagctcctgttaagggccccagttttactcatgctacctgaccttagttttagtactttcaaatgtgatttgggtaaaaactattttgcaggcaaaagtgttaattttttataaatatgtataataaaaaagctataaaagtttttccttttcttgtatttttcaaatactccccaagacacaatccttgaaggtgaactaggtggcacttgattatgctaattgtgggagctactgaactaaactatactgattaaattaaatgcttgcaggttcctgggtaattttcctttgtgaataacctggcgctacctgaatttttctctaacaaacatctccaatgagggtaaacaatgatcttgattctaatttatatgaggttaaaaaccttcagatttcgtattttgaattgttctccctagtttcctcagtggttacccccttttagtcagtaaccatctctgttcagaattcagtctttggcttttgaagaaatgggcacagagccaaaggacccatttcacagttcccttggaatatatttcccattgttggactgaggcaaacaaaaccaactgtgcaaatcacaagcaaaagagacttctgtccgtagttgcgagtgccatcagtgtgagcttaccagctacaaaaatctgtcatggactggggaacagtatgattccttattgaaactttcatcctcatcggctggcttgtcagcgttctgaagttaatatccatgctgcctgaaacaaatgttatgtttaactagcacttaacttttaaaattgcttaattctcctttcagatgcatgcactaagtcttctctgagcctgcagcaatattttagagggacctcttctaagtcagagccttgacattctactccaaaaggaagtccaaattagagcccataggctttttcttaaaagctgttaaggagtagtaaagaaagttaccactctaaggaaaacatgaaactatctgaaagtcttctggttcctaactggatacagattagattattttaaatgagaaaaaagtgcaccgtagttacccgatcaagattggactgcctgtgtccctggcatgaattaaagaacctccatagttgcttgttcccttctgaaggtgtttcctatggcccacgagaattataaagcaatcactttttaagtctatcagtcaaccttaatagctctcaagagtttcgattatcaagctttaaagtgataacatatcaagatgactattaaaaaataaacatctctgaaagtgtcctttcctccataaggctttaaacaatttgcaaattcttaattgggagtatgtcccaatcattctattaaactatttacagctctacctacttctagattcagcaaacagagctactagttagagtattttgagagccaaaatagtaagagacttctgtaatggttgagatttctgcactgaccttaattagggtaccgccatagggctaccaaagtttttagtgagggctggggaggtggagcataagtaacattttttttctgcagaaggtgatggctttgtagaacactataaaatttttcaggaaaacatacagcaaattttcttatccagtgggaacagcctatttgacaaggaatgatatacaagtttgattcacctttgagcactcttatagagtttacagaagaggcgtaactggttacaaaacaaaagttacgccttcactatccagttcttaaagtttatccacatcctacaaatcttatgttcatgtaggtcaggttaaagtaagctccaaacttgtggccttcagaagcatctcctgtttaacacacctgaaattactctaacttaatacatttgtattctctaagaaataatgctgactgctgtcaccacagcatcactgatctctcagtggctgttaaaatataaacaagtggaaaaaaagtatacaagttgatagcagctgttcatgtattcttgttttgctaatacctgtgtagagaaagacagtttcacatgcagatcaccatacatttttgcttaaaggttacactgggtaaactgtttgtttatcacattacatctgggtgagattttgcatgtgaccaagaggaagaaatcattcagtcccggaaatagcaactgctatgtaaaaccacatccttgactagtacttcatctttccacagtcatccatctgctaatcaggtgaaatatcagctcagcagaacaaagcaagttatacacaaatttcccccacattcacactgatgccgtacttagtaattctggttctaccattcccttttgcactttttgcaagtcaaattcatgtggaaaaatgttctgtttgtagaactcatagtattcacttatagtgctcatgtcaggaatggcaagtgagtaagagcccctgataatctgcttttgttagaacgtaatgcaaagataataaaacatgtccacttcttttctagttctaatcagtttttagacatcaagatttatttactttgcatgagatttgtttcctattatttgaatatgtgctatacacttgaattagaaaaacctgcttgaatgtattgtcagttattaaagcacatgtgactaagtttgcatttgtcagtattgttctactgtttgtactgaaagtctcattttaaaattgctacttaacactgtactataccttgtaattttttagattctccacttgtattctttaaatgtttccagatgcctttagttttagctgctgtaaaatagctactttgcgttatttgatatagaattgttttttaaaaactccatttatttatacagagacatttataatattttacaaacattcttatattctgaataaatatttctaattccacagtgta

SEQ ID NO: 156021 - DNA, 3476 bp, Homo sapiens
  Payload ID: 10637
  Gene Symbol: MCC
  Gene Name: mutated in colorectal cancers
  Uniprot ID: P23508
  ENST ID: ENST00000408903
  CDS Start-End: 417-3476
atgactccgggcggtcggagaaggtctgccgggagtacacctgccctctgcctgaagcgtccccaagtgtcccgggcccgcgtcgttgccggatgcacaatgctgacacccttcccgggggcttccagtgtattctgcctcctcttgtgttcccgttgccacccttagctccctgactcttccagccaccttcccctcctccctcttccctgaggtgcctcctcgggcgattccagagcgcccatcttcccagtccgggcaaaacccggagaggtggaatccctcgcccggagcgccccggcggccactgggcatgctccgttgtcaggcaagttcggggctgcaggcagcttgcgcgccgcgcggattccagctgcggtcgcgcgtactcctcctcccaagtagggagcgggcgcatgatggcggccgcggcggcagcggctgcggggagctccagcagcggcggcggcggcggcggcagcggcagcagcagcagcagcagcgacacgtccagcaccggcgaggaggagaggatgcggcgcctcttccagacgtgcgacggcgacggggacggatacatcagcagaaatgacttgctaatggtctgtcgccagctgaatatggaagagtctgtggctgagatcatgaaccagttgggagcagatgaaaatgggaagatttcctttcaggatttcacaagatgccgcatgcagcttgttcgagaaattaggaaggaggaagtagatctttctgcaaagtcagacaactcctgtacaaagaagctgagggatagaattgcttcctggcccacgagcagtgacaacagtttgggtgccttatcagcagccagggagagctgggaatacgactctggtgccagggacctccagagcccggatgtgcagagccagtcagccctccagaagctgctcgagtatggcggaagctctttgcatcagcaggctgctctccacaaactgctcacacagtccccgcacattggcaactctgtaggaggaagctatctagagctggccaacacactccattcagcagccctggcatcactaaagggagatatagtggaacttaataaacgtctccagcaaacagagagggaacgggaccttctggaaaagaaattggccaaggcacagtgcgagcagtcccacctcatgagagagcatgaggatgtccaggagcgaacgacacttcgctatgaggaacgcatcacagagctccacagcgtcattgcggagctcaacaagaagatagaccgtctgcaaggcaccaccatcagggaggaagatgagtactcagaactgcgatcagaactcagccagagccaacacgaggtcaacgaggactctcgaagcatggaccaagaccagacctctgtctctatccccgaaaaccagtctaccatggttactgctgacatggacaactgcagtgacctgaactcagaactgcagagggtgctgacagggctggagaatgttgtctgcggcaggaagaagagcagctgcagcctctccgtggccgaggtggacaagcacattgagcagctcaccacagccagcgagcactgtgacctggctattaagacagtcgaggagattgagggggtgcttggccgggacctgtatcccaacctggctgaagagaggtctcggtgggagaaggagctggctgggctgagggaagagaatgagagcctgactgccatgctgtgcagcaaagaggaagaactgaaccggactaaggccaccatgaatgccatccgggaagagcgggaccggctccggaggagggtcagagagcttcaaactcgactacagagcgtgcaggccacaggtccctccagccctggccgcctcacttccaccaaccgcccgattaaccccagcactggggagctgagcacaagcagcagcagcaatgacattcccatcgccaagattgctgagagggtgaagctatcaaagacaaggtccgaatcgtcatcatctgatcggccagtcctgggctcagaaatcagtagcataggggtatccagcagtgtggctgaacacctggcccactcacttcaggactgctccaatatccaagagattttccaaacactctactcacacggatctgccatctcagaaagcaagattagagagtttgaggtggaaacagaacggctgaatagccggattgagcacctcaaatcccaaaatgacctcctgaccataaccttggaggaatgtaaaagcaatgccgagaggatgagcatgctggtgggaaaatacgaatccaatgccacagcgctgaggctggccttgcagtacagcgagcagtgcatcgaagcctacgaactcctcctggcgctggcagagagtgagcagagcctcatcctggggcagttccgagcggcgggcgtggggtcctcccctggagaccagtcgggggatgaaaacatcactcagatgctcaagcgagctcatgactgccggaagacagctgagaacgctgccaaggccctgctcatgaagctggacggcagctgtgggggagcctttgccgtggccggctgcagcgtgcagccctgggagagcctttcctccaacagccacaccagcacaaccagctccacagccagtagttgcgacaccgagttcactaaagaagacgagcagaggctgaaggattatatccagcagctcaagaatgacagggctgcggtcaagctgaccatgctggagctggaaagcatccacatcgatcctctcagctatgacgtcaagcctcggggagacagccagaggctggatctggaaaacgcagtgcttatgcaggagctcatggccatgaaggaggagatggccgagttgaaggcccagctctacctactggagaaagagaagaaggccctggagctgaagctgagcacgcgggaggcccaggagcaggcctacctggtgcacattgagcacctgaagtccgaggtggaggagcagaaggagcagcggatgcgatccctcagctccaccagcagcggcagcaaagacaaacctggcaaggagtgtgctgatgctgcctccccagctctgtccctagccgaactcaggacaacgtgcagcgagaatgagctggctgcggagttcaccaacgccattcgtcgagaaaagaagttgaaggccagagttcaagagctggtgagtgccttggagagactcaccaagagcagtgaaatccgacatcagcaatctgcagagttcgtgaatgatctaaagcgggccaacagcaacctggtggctgcctatgagaaagcaaagaaaaagcatcaaaacaaactgaagaagttagagtcgcagatgatggccatggtggagagacatgagacccaagtgaggatgctcaagcaaagaatagctctgctagaggaggagaactccaggccacacaccaatgaaacttcgctttaa

SEQ ID NO: 156022 - DNA, 3844 bp, Homo sapiens
  Payload ID: 10637
  Gene Symbol: MCC
  Gene Name: mutated in colorectal cancers
  ENST ID: ENST00000515367
  CDS Start-End: 374-2674
ttttctatatataatatctgcactcaacagatattctctgtttttctgtatttttaaagggaaattggaaactatgggtagagatagagacctcttttgagggatttgggtttagtaaaaagcccgtctaggggggcttccctggcatgctgaagcataggaagatgctgcagtgtgctcctctactgtgatctgatgcagagttgccacttctagtcacactccacaaaggaagaatgtgctccattcagcagccctggcatcactaaagggagatatagtggaacttaataaacgtctccagcaaacagagagggaacgggaccttctggaaaagaaattggccaaggcacagtgcgagcagtcccacctcatgagagagcatgaggatgtccaggagcgaacgacacttcgctatgaggaacgcatcacagagctccacagcgtcattgcggagctcaacaagaagatagaccgtctgcaaggcaccaccatcagggaggaagatgagtactcagaactgcgatcagaactcagccagagccaacacgaggtcaacgaggactctcgaagcatggaccaagaccagacctctgtctctatccccgaaaaccagtctaccatggttactgctgacatggacaactgcagtgacctgaactcagaactgcagagggtgctgacagggctggagaatgttgtctgcggcaggaagaagagcagctgcagcctctccgtggccgaggtggacaagcacattgagcagctcaccacagccagcgagcactgtgacctggctattaagacagtcgaggagattgagggggtgcttggccgggacctgtatcccaacctggctgaagagaggtctcggtgggagaaggagctggctgggctgagggaagagaatgagagcctgactgccatgctgtgcagcaaagaggaagaactgaaccggactaaggccaccatgaatgccatccgggaagagcgggaccggctccggaggagggtcagagagcttcaaactcgactacagagcgtgcaggccacaggtccctccagccctggccgcctcacttccaccaaccgcccgattaaccccagcactggggagctgagcacaagcagcagcagcaatgacattcccatcgccaagattgctgagagggtgaagctatcaaagacaaggtccgaatcgtcatcatctgatcggccagtcctgggctcagaaatcagtagcataggggtatccagcagtgtggctgaacacctggcccactcacttcaggactgctccaatatccaagagattttccaaacactctactcacacggatctgccatctcagaaagcaagattagagagtttgaggtggaaacagaacggctgaatagccggattgagcacctcaaatcccaaaatgacctcctgaccataaccttggaggaatgtaaaagcaatgccgagaggatgagcatgctggtgggaaaatacgaatccaatgccacagcgctgaggctggccttgcagtacagcgagcagtgcatcgaagcctacgaactcctcctggcgctggcagagagtgagcagagcctcatcctggggcagttccgagcggcgggcgtggggtcctcccctggagaccagtcgggggatgaaaacatcactcagatgctcaagcgagctcatgactgccggaagacagctgagaacgctgccaaggccctgctcatgaagctggacggcagctgtgggggagcctttgccgtggccggctgcagcgtgcagccctgggagagcctttcctccaacagccacaccagcacaaccagctccacagccagtagttgcgacaccgagttcactaaagaagacgagcagaggctgaaggattatatccagcagctcaagaatgacagggctgcggtcaagctgaccatgctggagctggaaagcatccacatcgatcctctcagctatgacgtcaagcctcggggagacagccagaggctggatctggaaaacgcagtgcttatgcaggagctcatggccatgaaggaggagatggccgagttgaaggcccagctctacctactggagaaagagaagaaggccctggagctgaagctgagcacgcgggaggcccaggagcaggcctacctggtgcacattgagcacctgaagtccgaggtggaggagcagaaggagcagcggatgcgatccctcagctccaccagcagcggcagcaaagacaaacctggcaaggagtgtgctgatgctgcctccccagctctgtccctagccgaactcaggacaacgtgcagcgagaatgagctggctgcggagttcaccaacgccattcgtcgagaaaagaagttgaaggccagagttcaagagctggtgagtgccttggagagactcaccaagagcagtgaaatccgacatcagcaatctgcagagttcgtgaatgatctaaagcgggccaacagcaacctggtggctgcctatgagaaagcaaagaaaaagcatcaaaacaaactgaagaagttagagtcgcagatgatggccatggtggagagacatgagacccaagtgaggatgctcaagcaaagaatagctctgctagaggaggagaactccaggccacacaccaatgaaacttcgctttaatcagcactcacgcaccggagttctgcccatgggaagtaaactgcagcaggccactggggacagaagggcccatgtacttgttgggaggaggaggaaagggaaggctggcaggtaggtcggcacttggacaatggagtgccccaactcaacccttggggcgactggccatggtgacattgtggactgtatccagaggtgcccgctcttccctcctgggcccacaacagcgtgtaaacacatgttctgtgcctgctcagcagagcctcgtttctgctttcagcactcactctccccctcctcttctggtctggcggctgtgcatcagtgggatcccagacatttgtttctgtaagattttccattgtatcctctttttggtagatgctgggctcatcttctagaatctcgtttctcctctttcctcctgcttcatgggaaaacagacctgtgtgtgcctccagcatttaaaaggactgctgatttgtttactacagcaaggctttggtttccaagtcccgggtctcaactttaagatagaggcggccataagaggtgatctctgggagttataggtcatgggaagagcgtagacaggtgttacttacagtcccagatacactaaagttacaaacagaccaccaccaggactgtgcctgaacaattttgtattgagagaataaaaacttccttcaatcttcattttggaggcagggctgggaagggagcgctctcttgattctgggatttctccctctcagtggagccttattaatatccaagacttagagctgggaatctttttgatacctgtagtggaactaaaattctgtcaggggtttcttcaagagctgagaaacattattagcacttcccgccccagggcactacataattgctgttctgctgaatcaaatctcttccacatgggtgcatttgtagctctggacctgtctctacctaaggacaagacactgaggagatactgaacattttgcaaaacttatcacgcctacttaagagtgctgtgtaacccccagttcaagacttagctcctgttgtcatgacggggacagagtgagggaatggtagttaaggcttcttttttgcccccagatacatggtgatggttagcatatggtgcttaaaaggttaaatttcaagcaaaatgct

SEQ ID NO: 156023 - DNA, 2855 bp, Homo sapiens
  Payload ID: 10637
  Gene Symbol: MCC
  Gene Name: mutated in colorectal cancers
  ENST ID: ENST00000514701
  CDS Start-End: 554-2701
acaactccagacgattcgaaggggaaacttcggcgtgaagtgcagctccgctccggctccctctagctttctttccttctctggaatccgaggcgcggatcttcctcgccccaccgccctagttttttcgggagctcgccggtgccctctagggtgtcggctcgtgctgggaagtgccctccatcctggtaatggggggcggcgaggcaccgtaggagtggcgaggcggcgcccagggtggcactgccccggaacggggcgctgggtgcgcgcgggagggtccccgcgcgggctccgccgctgccgcagctgcgagcgcgccgcgccaccgagcctcctgcagcaatggctcgtccgtgaaacgcgagccacggctgctctttttaagagtgcctgcatcctccgtttgcgcttcgcaactgtcctgggtgaaaatggctgtctagactaaaatgtggcagaagggaccaagcagtggatattgagcctgtgaagtccaactcttaagctccgagacctgggggactgagagcccagctctgaaaagtgcatcatgaattccggagttgccatgaaatatggaaacgactcctcggccgagctgagtgagctccattcagcagccctggcatcactaaagggagatatagtggaacttaataaacgtctccagcaaacagagagggaacgggaccttctggaaaagaaattggccaaggcacagtgcgagcagtcccacctcatgagagagcatgaggatgtccaggagcgaacgacacttcgctatgaggaacgcatcacagagctccacagcgtcattgcggagctcaacaagaagatagaccgtctgcaaggcaccaccatcagggaggaagatgagtactcagaactgcgatcagaactcagccagagccaacacgaggtcaacgaggactctcgaagcatggaccaagaccagacctctgtctctatccccgaaaaccagtctaccatggttactgctgacatggacaactgcagtgacctgaactcagaactgcagagggtgctgacagggctggagaatgttgtctgcggcaggaagaagagcagctgcagcctctccgtggccgaggtggacaagcacattgagcagctcaccacagccagcgagcactgtgacctggctattaagacagtcgaggagattgagggggtgcttggccgggacctgtatcccaacctggctgaagagaggtctcggtgggagaaggagctggctgggctgagggaagagaatgagagcctgactgccatgctgtgcagcaaagaggaagaactgaaccggactaaggccaccatgaatgccatccgggaagagcgggaccggctccggaggagggtcagagagcttcaaactcgactacagagcgtgcaggccacaggtccctccagccctggccgcctcacttccaccaaccgcccgattaaccccagcactggggagctgagcacaagcagcagcagcaatgacattcccatcgccaagattgctgagagggtgaagctatcaaagacaaggtccgaatcgtcatcatctgatcggccagtcctgggctcagaaatcagtagcataggggtatccagcagtgtggctgaacacctggcccactcacttcaggactgctccaatatccaagagattttccaaacactctactcacacggatctgccatctcagaaagcaagattagagagtttgaggtggaaacagaacggctgaatagccggattgagcacctcaaatcccaaaatgacctcctgaccataaccttggaggaatgtaaaagcaatgccgagaggatgagcatgctggtgggaaaatacgaatccaatgccacagcgctgaggctggccttgcagtacagcgagcagtgcatcgaagcctacgaactcctcctggcgctggcagagagtgagcagagcctcatcctggggcagttccgagcggcgggcgtggggtcctcccctggagaccagtcgggggatgaaaacatcactcagatgctcaagcgagctcatgactgccggaagacagctgagaacgctgccaaggccctgctcatgaagctggacggcagctgtgggggagcctttgccgtggccggctgcagcgtgcagccctgggagagcctttcctccaacagccacaccagcacaaccagctccacagccagtagttgcgacaccgagttcactaaagaagacgagcagaggctgaaggattatatccagcagctcaagaatgacagggctgcggtcaagctgaccatgctggagctggaaagcatccacatcgatcctctcagctatgacgtcaagcctcggggagacagccagaggctggatctggaaaacgcagtgcttatgcaggagctcatggccatgaaggaggagatggccgagttgaaggcccagctctacctactggagaaagagaagaaggccctggagctgaagctgagcacgcgggaggcccaggagcaggcctacctggtgcacattgagcacctgaagtccgaggtggaggagcagaaggagcagcggatgcgatccctcagctccaccagcagcggcagcaaagacaaacctggcaaggtagggccggagtggcttggggacacccttaggctcagtgactgcccagtgactgcccagtgaccactggccacacctcaccgccctgctgcctcagttcttgtatttgcataggaaatgcaggccattcgtaggtatctaagaaggtgacattttgagtgtaatgaaaccaggtctacattttagaaataccaaatctcactttatgtaatagttg

SEQ ID NO: 156024 - DNA, 664 bp, Homo sapiens
  Payload ID: 10637
  Gene Symbol: MCC
  Gene Name: mutated in colorectal cancers
  ENST ID: ENST00000624689
  CDS Start-End: 1-508
cgtggccggctgcagcgtgcagccctgggagagcctttcctccaacagccacaccagcacaaccagctccacagccagtagttgcgacaccgagttcactaaagaagacgagcagaggctgaaggattatatccagcagctcaagaatgacagggctgcggtcaagctgaccatgctggagctggaaagcatccacatcgatcctctcagctatgacgtcaagcctcggggagacagccagaggctggatctggaaaacgcagtgcttatgcaggagctcatggccatgaaggaggagatggccgagttgaaggcccagctctacctactggagaaagagaagaaggccctggagctgaagctgagcacgcgggaggcccaggagcaggcctacctggtgcacattgagcacctgaagtccgaggtggaggagcagaaggagcagcggatgcgatccctcagctccaccagcagcggcagcaaagacaaacctggcaaggtgatatgatccaaaatcccccatagatgcctgaaaccacaggtaatactgaacccttatatattctacgttttcccctatacatacatacctgtgttgaagtttaatttataaattaggcacagtaaaagattaacaactaataaaatattaatagaacaatta

SEQ ID NO: 156025 - DNA, 2752 bp, Homo sapiens
  Payload ID: 10638
  Gene Symbol: MLH1
  Gene Name: mutL homolog 1
  Uniprot ID: P40692
  ENST ID: ENST00000231790
  CDS Start-End: 217-2487
gccgcttcagggagggacgaagagacccagcaacccacagagttgagaaatttgactggcattcaagctgtccaatcaatagctgccgctgaagggtggggctggatggcgtaagctacagctgaaggaagaacgtgagcacgaggcactgaggtgattggctgaaggcacttccgttgagcatctagacgtttccttggctcttctggcgccaaaatgtcgttcgtggcaggggttattcggcggctggacgagacagtggtgaaccgcatcgcggcgggggaagttatccagcggccagctaatgctatcaaagagatgattgagaactgtttagatgcaaaatccacaagtattcaagtgattgttaaagagggaggcctgaagttgattcagatccaagacaatggcaccgggatcaggaaagaagatctggatattgtatgtgaaaggttcactactagtaaactgcagtcctttgaggatttagccagtatttctacctatggctttcgaggtgaggctttggccagcataagccatgtggctcatgttactattacaacgaaaacagctgatggaaagtgtgcatacagagcaagttactcagatggaaaactgaaagcccctcctaaaccatgtgctggcaatcaagggacccagatcacggtggaggaccttttttacaacatagccacgaggagaaaagctttaaaaaatccaagtgaagaatatgggaaaattttggaagttgttggcaggtattcagtacacaatgcaggcattagtttctcagttaaaaaacaaggagagacagtagctgatgttaggacactacccaatgcctcaaccgtggacaatattcgctccatctttggaaatgctgttagtcgagaactgatagaaattggatgtgaggataaaaccctagccttcaaaatgaatggttacatatccaatgcaaactactcagtgaagaagtgcatcttcttactcttcatcaaccatcgtctggtagaatcaacttccttgagaaaagccatagaaacagtgtatgcagcctatttgcccaaaaacacacacccattcctgtacctcagtttagaaatcagtccccagaatgtggatgttaatgtgcaccccacaaagcatgaagttcacttcctgcacgaggagagcatcctggagcgggtgcagcagcacatcgagagcaagctcctgggctccaattcctccaggatgtacttcacccagactttgctaccaggacttgctggcccctctggggagatggttaaatccacaacaagtctgacctcgtcttctacttctggaagtagtgataaggtctatgcccaccagatggttcgtacagattcccgggaacagaagcttgatgcatttctgcagcctctgagcaaacccctgtccagtcagccccaggccattgtcacagaggataagacagatatttctagtggcagggctaggcagcaagatgaggagatgcttgaactcccagcccctgctgaagtggctgccaaaaatcagagcttggagggggatacaacaaaggggacttcagaaatgtcagagaagagaggacctacttccagcaaccccagaaagagacatcgggaagattctgatgtggaaatggtggaagatgattcccgaaaggaaatgactgcagcttgtaccccccggagaaggatcattaacctcactagtgttttgagtctccaggaagaaattaatgagcagggacatgaggttctccgggagatgttgcataaccactccttcgtgggctgtgtgaatcctcagtgggccttggcacagcatcaaaccaagttataccttctcaacaccaccaagcttagtgaagaactgttctaccagatactcatttatgattttgccaattttggtgttctcaggttatcggagccagcaccgctctttgaccttgccatgcttgccttagatagtccagagagtggctggacagaggaagatggtcccaaagaaggacttgctgaatacattgttgagtttctgaagaagaaggctgagatgcttgcagactatttctctttggaaattgatgaggaagggaacctgattggattaccccttctgattgacaactatgtgccccctttggagggactgcctatcttcattcttcgactagccactgaggtgaattgggacgaagaaaaggaatgttttgaaagcctcagtaaagaatgcgctatgttctattccatccggaagcagtacatatctgaggagtcgaccctctcaggccagcagagtgaagtgcctggctccattccaaactcctggaagtggactgtggaacacattgtctataaagccttgcgctcacacattctgcctcctaaacatttcacagaagatggaaatatcctgcagcttgctaacctgcctgatctatacaaagtctttgagaggtgttaaatatggttatttatgcactgtgggatgtgttcttctttctctgtattccgatacaaagtgttgtatcaaagtgtgatatacaaagtgtaccaacataagtgttggtagcacttaagacttatacttgccttctgatagtattcctttatacacagtggattgattataaataaatagatgtgtcttaacataatttcttatttaattttattatgtatatattgtgtcagttcagatgccaaaaagaggtcttgaacatgtcaca

SEQ ID NO: 156026 - DNA, 558 bp, Homo sapiens
  Payload ID: 10638
  Gene Symbol: MLH1
  Gene Name: mutL homolog 1
  ENST ID: ENST00000442249
  CDS Start-End: 16-132
tcttctggcgccaaaatgtcgttcgtggcaggggttattcggcggctggacgagacagtggtgaaccgcatcgcggcgggggaagttatccagcggccagctaatgctatcaaagagatgattgagaactgaaagaagatctggatattgtatgtgaaaggttcactactagtaaactgcagtcctttgaggatttagccagtatttctacctatggctttcgaggtgaggctttggccagcataagccatgtggctcatgttactattacaacgaaaacagctgatggaaagtgtgcatacagagcaagttactcagatggaaaactgaaagcccctcctaaaccatgtgctggcaatcaagggacccagatcacggtggaggaccttttttacaacatagccacgaggagaaaagctttaaaaaatccaagtgaagaatatgggaaaattttggaagttgttggcaggtattcagtacacaatgcaggcattagtttctcagttaaaaaacaaggagagacagtagctgatgttaggacactacccaatgcctcaa

SEQ ID NO: 156027 - DNA, 570 bp, Homo sapiens
  Payload ID: 10638
  Gene Symbol: MLH1
  Gene Name: mutL homolog 1
  ENST ID: ENST00000454028
  CDS Start-End: 15-131
cttctggcgccaaaatgtcgttcgtggcaggggttattcggcggctggacgagacagtggtgaaccgcatcgcggcgggggaagttatccagcggccagctaatgctatcaaagagatgattgagaactgatgcaaaatccacaagtattcaagtgattgttaaagagggaggcctgaagttgattcagatccaagacaatggcaccgggatcaggaaagaagatctggatattgtatgtgaaaggttcactactagtaaactgcagtcctttgaggatttagccagtatttctacctatggctttcgaggctttggccagcataagccatgtggctcatgttactattacaacgaaaacagctgatggaaagtgtgcatacagagcaagttactcagatggaaaactgaaagcccctcctaaaccatgtgctggcaatcaagggacccagatcacggtggaggaccttttttacaacatagccacgaggagaaaagctttaaaaaatccaagtgaagaatatgggaaaattttggaagttgttggcaggtattcagtacacaatgcagg

SEQ ID NO: 156028 - DNA, 233 bp, Homo sapiens
  Payload ID: 10638
  Gene Symbol: MLH1
  Gene Name: mutL homolog 1
  ENST ID: ENST00000450420
  CDS Start-End: 1-186
gagaagagaggacctacttccagcaaccccagaaagagacatcgggaagattctgatgtggaaatggtggaagatgattcccgaaaggaaatgactgcagcttgtaccccccggagaaggatcattaacctcactagtgttttgagtctccaggaagaaattaatgagcagggacatgaggagtgaagtgcctggctccattccaaactcctggaagtggactgtggaacaca

SEQ ID NO: 156029 - DNA, 2296 bp, Homo sapiens
  Payload ID: 10638
  Gene Symbol: MLH1
  Gene Name: mutL homolog 1
  Uniprot ID: P40692
  ENST ID: ENST00000455445
  CDS Start-End: 696-2243
ttccctgacgtgccagtcaggccttctccttttccgcagaccgtgtgtttctttaccgctctcccccgagaccttttaagggttgtttggagtatgcaaaatccacaagtattcaagtgattgttaaagagggaggcctgaagttgattcagatccaagacaatggcaccgggatcaggaaagaagatctggatattgtatgtgaaaggttcactactagtaaactgcagtcctttgaggatttagccagtatttctacctatggctttcgaggtgaggctttggccagcataagccatgtggctcatgttactattacaacgaaaacagctgatggaaagtgtgcatacagagcaagttactcagatggaaaactgaaagcccctcctaaaccatgtgctggcaatcaagggacccagatcacggtggaggaccttttttacaacatagccacgaggagaaaagctttaaaaaatccaagtgaagaatatgggaaaattttggaagttgttggcaggtattcagtacacaatgcaggcattagtttctcagttaaaaaacaaggagagacagtagctgatgttaggacactacccaatgcctcaaccgtggacaatattcgctccatctttggaaatgctgttagtcgagaactgatagaaattggatgtgaggataaaaccctagccttcaaaatgaatggttacatatccaatgcaaactactcagtgaagaagtgcatcttcttactcttcatcaaccatcgtctggtagaatcaacttccttgagaaaagccatagaaacagtgtatgcagcctatttgcccaaaaacacacacccattcctgtacctcagtttagaaatcagtccccagaatgtggatgttaatgtgcaccccacaaagcatgaagttcacttcctgcacgaggagagcatcctggagcgggtgcagcagcacatcgagagcaagctcctgggctccaattcctccaggatgtacttcacccagactttgctaccaggacttgctggcccctctggggagatggttaaatccacaacaagtctgacctcgtcttctacttctggaagtagtgataaggtctatgcccaccagatggttcgtacagattcccgggaacagaagcttgatgcatttctgcagcctctgagcaaacccctgtccagtcagccccaggccattgtcacagaggataagacagatatttctagtggcagggctaggcagcaagatgaggagatgcttgaactcccagcccctgctgaagtggctgccaaaaatcagagcttggagggggatacaacaaaggggacttcagaaatgtcagagaagagaggacctacttccagcaaccccagaaagagacatcgggaagattctgatgtggaaatggtggaagatgattcccgaaaggaaatgactgcagcttgtaccccccggagaaggatcattaacctcactagtgttttgagtctccaggaagaaattaatgagcagggacatgaggttctccgggagatgttgcataaccactccttcgtgggctgtgtgaatcctcagtgggccttggcacagcatcaaaccaagttataccttctcaacaccaccaagcttagtgaagaactgttctaccagatactcatttatgattttgccaattttggtgttctcaggttatcggagccagcaccgctctttgaccttgccatgcttgccttagatagtccagagagtggctggacagaggaagatggtcccaaagaaggacttgctgaatacattgttgagtttctgaagaagaaggctgagatgcttgcagactatttctctttggaaattgatgaggaagggaacctgattggattaccccttctgattgacaactatgtgccccctttggagggactgcctatcttcattcttcgactagccactgaggtgaattgggacgaagaaaaggaatgttttgaaagcctcagtaaagaatgcgctatgttctattccatccggaagcagtacatatctgaggagtcgaccctctcaggccagcagagtgaagtgcctggctccattccaaactcctggaagtggactgtggaacacattgtctataaagccttgcgctcacacattctgcctcctaaacatttcacagaagatggaaatatcctgcagcttgctaacctgcctgatctatacaaagtctttgagaggtgttaaatatggttatttatgcactgtgggatgtgttcttctttctctgtattccgata

SEQ ID NO: 156030 - DNA, 917 bp, Homo sapiens
  Payload ID: 10638
  Gene Symbol: MLH1
  Gene Name: mutL homolog 1
  ENST ID: ENST00000441265
  CDS Start-End: 603-917
gacgtgccagtcaggccttctccttttccgcagaccgtgtgtttctttaccgctctcccccgagaccttttaagggttgtttggagttttagatgcaaaatccacaagtattcaagtgattgttaaagagggaggcctgaagttgattcagatccaagacaatggcaccgggatcaggaaagaagatctggatattgtatgtgaaaggttcactactagtaaactgcagtcctttgaggatttagccagtatttctacctatggctttcgaggtgaggctttggccagcataagccatgtggctcatgttactattacaacgaaaacagctgatggaaagtgtgcatacagagcaagttactcagatggaaaactgaaagcccctcctaaaccatgtgctggcaatcaagggacccagatcacggtattcagtacacaatgcaggcattagtttctcagttaaaaaacaaggagagacagtagctgatgttaggacactacccaatgcctcaaccgtggacaatattcgctccatctttggaaatgctgttagtcgagaactgatagaaattggatgtgaggataaaaccctagccttcaaaatgaatggttacatatccaatgcaaactactcagtgaagaagtgcatcttcttactcttcatcaaccatcgtctggtagaatcaacttccttgagaaaagccatagaaacagtgtatgcagcctatttgcccaaaaacacacacccattcctgtacctcagtttagaaatcagtccccagaatgtggatgttaatgtgcaccccacaaagcatgaagttcacttcctgcacgaggagagcatcctggagcgggtgcagcagcacatcgagagcaagctcctgggctccaattcctccaggatgtacttcacccag

SEQ ID NO: 156031 - DNA, 608 bp, Homo sapiens
  Payload ID: 10638
  Gene Symbol: MLH1
  Gene Name: mutL homolog 1
  ENST ID: ENST00000447829
  CDS Start-End: 1-176
tacccaatgcctcaaccgtggacaatattcgctccatctttggaaatgctgttagtcgagaactgatagaaattggatgtgaggataaaaccctagccttcaaaatgaatggttacatatccaatgcaaactactcagtgaagaagtgcatcttcttactcttcatcaacctttagaaatcagtccccagaatgtggatgttaatgtgcaccccacaaagcatgaagttcacttcctgcacgaggagagcatcctggagcgggtgcagcagcacatcgagagcaagctcctgggctccaattcctccaggatgtacttcacccagactttgctaccaggacttgctggcccctctggggagatggttaaatccacaacaagtctgacctcgtcttctacttctggaagtagtgataaggtctatgcccaccagatggttcgtacagattcccgggaacagaagcttgatgcatttctgcagcctctgagcaaacccctgtccagtcagccccaggccattgtcacagaggataagacagatatttctagtggcagggctaggcagcaagatgaggagatgcttgaactcccagcccctgctgaagtgg

SEQ ID NO: 156032 - DNA, 684 bp, Homo sapiens
  Payload ID: 10638
  Gene Symbol: MLH1
  Gene Name: mutL homolog 1
  ENST ID: ENST00000413212
  CDS Start-End: 1-157
agaactgatagaaattggatgtgaggataaaaccctagccttcaaaatgaatggttacatatccaatgcaaactactcagtgaagaagtgcatcttcttactcttcatcaaccactttgctaccaggacttgctggcccctctggggagatggttaaatccacaacaagtctgacctcgtcttctacttctggaagtagtgataaggtctatgcccaccagatggttcgtacagattcccgggaacagaagcttgatgcatttctgcagcctctgagcaaacccctgtccagtcagccccaggccattgtcacagaggataagacagatatttctagtggcagggctaggcagcaagatgaggagatgcttgaactcccagcccctgctgaagtggctgccaaaaatcagagcttggagggggatacaacaaaggggacttcagaaatgtcagagaagagaggacctacttccagcaaccccagaaagagacatcgggaagattctgatgtggaaatggtggaagatgattcccgaaaggaaatgactgcagcttgtaccccccggagaaggatcattaacctcactagtgttttgagtctccaggaagaaattaatgagcagggacatgaggttctccgggagatgttgcataaccactccttcgtgggctgtgtgaatcctc

SEQ ID NO: 156033 - DNA, 2428 bp, Homo sapiens
  Payload ID: 10638
  Gene Symbol: MLH1
  Gene Name: mutL homolog 1
  Uniprot ID: P40692
  ENST ID: ENST00000435176
  CDS Start-End: 261-2237
gacgtgccagtcaggccttctccttttccgcagaccgtgtgtttctttaccgctctcccccgagaccttttaagggttgtttggagttttagatgcaaaatccacaagtattcaagtgattgttaaagagggaggcctgaagttgattcagatccaagacaatggcaccgggatcaggaaagaagatctggatattgtatgtgaaaggttcactactagtaaactgcagtcctttgaggatttagccagtatttctacctatggctttcgaggctttggccagcataagccatgtggctcatgttactattacaacgaaaacagctgatggaaagtgtgcatacagagcaagttactcagatggaaaactgaaagcccctcctaaaccatgtgctggcaatcaagggacccagatcacggtggaggaccttttttacaacatagccacgaggagaaaagctttaaaaaatccaagtgaagaatatgggaaaattttggaagttgttggcaggtattcagtacacaatgcaggcattagtttctcagttaaaaaacaaggagagacagtagctgatgttaggacactacccaatgcctcaaccgtggacaatattcgctccatctttggaaatgctgttagtcgagaactgatagaaattggatgtgaggataaaaccctagccttcaaaatgaatggttacatatccaatgcaaactactcagtgaagaagtgcatcttcttactcttcatcaaccatcgtctggtagaatcaacttccttgagaaaagccatagaaacagtgtatgcagcctatttgcccaaaaacacacacccattcctgtacctcagtttagaaatcagtccccagaatgtggatgttaatgtgcaccccacaaagcatgaagttcacttcctgcacgaggagagcatcctggagcgggtgcagcagcacatcgagagcaagctcctgggctccaattcctccaggatgtacttcacccagactttgctaccaggacttgctggcccctctggggagatggttaaatccacaacaagtctgacctcgtcttctacttctggaagtagtgataaggtctatgcccaccagatggttcgtacagattcccgggaacagaagcttgatgcatttctgcagcctctgagcaaacccctgtccagtcagccccaggccattgtcacagaggataagacagatatttctagtggcagggctaggcagcaagatgaggagatgcttgaactcccagcccctgctgaagtggctgccaaaaatcagagcttggagggggatacaacaaaggggacttcagaaatgtcagagaagagaggacctacttccagcaaccccagaaagagacatcgggaagattctgatgtggaaatggtggaagatgattcccgaaaggaaatgactgcagcttgtaccccccggagaaggatcattaacctcactagtgttttgagtctccaggaagaaattaatgagcagggacatgaggttctccgggagatgttgcataaccactccttcgtgggctgtgtgaatcctcagtgggccttggcacagcatcaaaccaagttataccttctcaacaccaccaagcttagtgaagaactgttctaccagatactcatttatgattttgccaattttggtgttctcaggttatcggagccagcaccgctctttgaccttgccatgcttgccttagatagtccagagagtggctggacagaggaagatggtcccaaagaaggacttgctgaatacattgttgagtttctgaagaagaaggctgagatgcttgcagactatttctctttggaaattgatgaggaagggaacctgattggattaccccttctgattgacaactatgtgccccctttggagggactgcctatcttcattcttcgactagccactgaggtgaattgggacgaagaaaaggaatgttttgaaagcctcagtaaagaatgcgctatgttctattccatccggaagcagtacatatctgaggagtcgaccctctcaggccagcagagtgaagtgcctggctccattccaaactcctggaagtggactgtggaacacattgtctataaagccttgcgctcacacattctgcctcctaaacatttcacagaagatggaaatatcctgcagcttgctaacctgcctgatctatacaaagtctttgagaggtgttaaatatggttatttatgcactgtgggatgtgttcttctttctctgtattccgatacaaagtgttgtatcaaagtgtgatatacaaagtgtaccaacataagtgttggtagcacttaagacttatacttgccttctgatagtattcctttatacacagtggattgattataaataaatagatgtgtcttaacat

SEQ ID NO: 156034 - DNA, 2608 bp, Homo sapiens
  Payload ID: 10638
  Gene Symbol: MLH1
  Gene Name: mutL homolog 1
  Uniprot ID: P40692
  ENST ID: ENST00000458205
  CDS Start-End: 868-2415
cacaacggcggaggccgccgggttccctgacgtgccagtcaggccttctccttttccgcagaccgtgtgtttctttaccgctctcccccgagaccttttaagggttgtttggagttttagatgcaaaatccacaagtattcaagtgattgttaaagagggaggcctgaagttgattcagatccaagacaatggcaccgggatcaggaacaatatacgcaaagactattaaatggaagcatacctgacatgttaaaggactatcaaggaggccagtttgtctagaggctgaaaaggaaagagtaataggagatgaggtctgagtgaaaacacgtaaatccttgtgggccaagaaagaagatctggatattgtatgtgaaaggttcactactagtaaactgcagtcctttgaggatttagccagtatttctacctatggctttcgaggtgaggctttggccagcataagccatgtggctcatgttactattacaacgaaaacagctgatggaaagtgtgcatacagagcaagttactcagatggaaaactgaaagcccctcctaaaccatgtgctggcaatcaagggacccagatcacggtggaggaccttttttacaacatagccacgaggagaaaagctttaaaaaatccaagtgaagaatatgggaaaattttggaagttgttggcaggtattcagtacacaatgcaggcattagtttctcagttaaaaaacaaggagagacagtagctgatgttaggacactacccaatgcctcaaccgtggacaatattcgctccatctttggaaatgctgttagtcgagaactgatagaaattggatgtgaggataaaaccctagccttcaaaatgaatggttacatatccaatgcaaactactcagtgaagaagtgcatcttcttactcttcatcaaccatcgtctggtagaatcaacttccttgagaaaagccatagaaacagtgtatgcagcctatttgcccaaaaacacacacccattcctgtacctcagtttagaaatcagtccccagaatgtggatgttaatgtgcaccccacaaagcatgaagttcacttcctgcacgaggagagcatcctggagcgggtgcagcagcacatcgagagcaagctcctgggctccaattcctccaggatgtacttcacccagactttgctaccaggacttgctggcccctctggggagatggttaaatccacaacaagtctgacctcgtcttctacttctggaagtagtgataaggtctatgcccaccagatggttcgtacagattcccgggaacagaagcttgatgcatttctgcagcctctgagcaaacccctgtccagtcagccccaggccattgtcacagaggataagacagatatttctagtggcagggctaggcagcaagatgaggagatgcttgaactcccagcccctgctgaagtggctgccaaaaatcagagcttggagggggatacaacaaaggggacttcagaaatgtcagagaagagaggacctacttccagcaaccccagaaagagacatcgggaagattctgatgtggaaatggtggaagatgattcccgaaaggaaatgactgcagcttgtaccccccggagaaggatcattaacctcactagtgttttgagtctccaggaagaaattaatgagcagggacatgaggttctccgggagatgttgcataaccactccttcgtgggctgtgtgaatcctcagtgggccttggcacagcatcaaaccaagttataccttctcaacaccaccaagcttagtgaagaactgttctaccagatactcatttatgattttgccaattttggtgttctcaggttatcggagccagcaccgctctttgaccttgccatgcttgccttagatagtccagagagtggctggacagaggaagatggtcccaaagaaggacttgctgaatacattgttgagtttctgaagaagaaggctgagatgcttgcagactatttctctttggaaattgatgaggaagggaacctgattggattaccccttctgattgacaactatgtgccccctttggagggactgcctatcttcattcttcgactagccactgaggtgaattgggacgaagaaaaggaatgttttgaaagcctcagtaaagaatgcgctatgttctattccatccggaagcagtacatatctgaggagtcgaccctctcaggccagcagagtgaagtgcctggctccattccaaactcctggaagtggactgtggaacacattgtctataaagccttgcgctcacacattctgcctcctaaacatttcacagaagatggaaatatcctgcagcttgctaacctgcctgatctatacaaagtctttgagaggtgttaaatatggttatttatgcactgtgggatgtgttcttctttctctgtattccgatacaaagtgttgtatcaaagtgtgatatacaaagtgtaccaacataagtgttggtagcacttaagacttatacttgccttctgatagtattcctttatacacagtggattgattataaataaatagatgtgtcttaacataa

SEQ ID NO: 156035 - DNA, 562 bp, Homo sapiens
  Payload ID: 10638
  Gene Symbol: MLH1
  Gene Name: mutL homolog 1
  ENST ID: ENST00000429117
  CDS Start-End: 313-562
cttttccgcagaccgtgtgtttctttaccgctctcccccgagaccttttaagggttgtttggagtacggagtctcactttgtcacccaggctggagtgcagtggcgcgatctcagctgactgcaacctcctcctcacagtttagatgcaaaatccacaagtattcaagtgattgttaaagagggaggcctgaagttgattcagatccaagacaatggcaccgggatcaggaaagaagatctggatattgtatgtgaaaggttcactactagtaaactgcagtcctttgaggatttagccagtatttctacctatggctttcgaggctttggccagcataagccatgtggctcatgttactattacaacgaaaacagctgatggaaagtgtgcatacagagcaagttactcagatggaaaactgaaagcccctcctaaaccatgtgctggcaatcaagggacccagatcacggtggaggaccttttttacaacatagccacgaggagaaaagctttaaaaaatccaagtgaagaatatgggaaaattttggaagttgttggca

SEQ ID NO: 156036 - DNA, 668 bp, Homo sapiens
  Payload ID: 10638
  Gene Symbol: MLH1
  Gene Name: mutL homolog 1
  ENST ID: ENST00000457004
  CDS Start-End: 33-149
ctagacgtttccttggctcttctggcgccaaaatgtcgttcgtggcaggggttattcggcggctggacgagacagtggtgaaccgcatcgcggcgggggaagttatccagcggccagctaatgctatcaaagagatgattgagaactgatgcaaaatccacaagtattcaagtgattgttaaagagggaggcctgaagttgattcagatccaagacaatggcaccgggatcagggctttggccagcataagccatgtggctcatgttactattacaacgaaaacagctgatggaaagtgtgcatacagagcaagttactcagatggaaaactgaaagcccctcctaaaccatgtgctggcaatcaagggacccagatcacggtggaggaccttttttacaacatagccacgaggagaaaagctttaaaaaatccaagtgaagaatatgggaaaattttggaagttgttggcaggtattcagtacacaatgcaggcattagtttctcagttaaaaaacaaggagagacagtagctgatgttaggacactacccaatgcctcaaccgtggacaatattcgctccatctttggaaatgctgttagtcgagaactgatagaaattggatgtgaggataaaaccctagccttcaaaatgaatggttacatatc

SEQ ID NO: 156037 - DNA, 660 bp, Homo sapiens
  Payload ID: 10638
  Gene Symbol: MLH1
  Gene Name: mutL homolog 1
  ENST ID: ENST00000458009
  CDS Start-End: 1-286
tggaaatgctgttagtcgagaactgatagaaattggatgtgaggataaaaccctagccttcaaaatgaatggttacatatccaatgcaaactactcagtgaagaagtgcatcttcttactcttcatcaaccatcgtctggtagaatcaacttccttgagaaaagccatagaaacagtgtatgcagcctatttgcccaaaaacacacacccattcctgtacctcagactttgctaccaggacttgctggcccctctggggagatggttaaatccacaacaagtctgacctcgtcttctacttctggaagtagtgataaggtctatgcccaccagatggttcgtacagattcccgggaacagaagcttgatgcatttctgcagcctctgagcaaacccctgtccagtcagccccaggccattgtcacagaggataagacagatatttctagtggcagggctaggcagcaagatgaggagatgcttgaactcccagcccctgctgaagtggctgccaaaaatcagagcttggagggggatacaacaaaggggacttcagaaatgtcagagaagagaggacctacttccagcaaccccagaaagagacatcgggaagattctgatgtggaaatggtggaagatgattcccgaaaggaaatgact

SEQ ID NO: 156038 - DNA, 342 bp, Homo sapiens
  Payload ID: 10638
  Gene Symbol: MLH1
  Gene Name: mutL homolog 1
  ENST ID: ENST00000413740
  CDS Start-End: 1-342
gagaagagaggacctacttccagcaaccccagaaagagacatcgggaagattctgatgtggaaatggtggaagatgattcccgaaaggaaatgactgcagcttgtaccccccggagaaggatcattaacctcactagtgttttgagtctccaggaagaaattaatgagcagggacatgaggttctccgggagatgttgcataaccactccttcgtgggctgtgtgaatcctcagtgggccttggcacagcatcaaaccaagttataccttctcaacaccaccaagcttagagtgaagtgcctggctccattccaaactcctggaagtggactgtggaacaca

SEQ ID NO: 156039 - DNA, 2230 bp, Homo sapiens
  Payload ID: 10638
  Gene Symbol: MLH1
  Gene Name: mutL homolog 1
  ENST ID: ENST00000456676
  CDS Start-End: 1-2039
ggcggctggacgagacagtggtgaaccgcatcgcggcgggggaagttatccagcggccagctaatgctatcaaagagatgattgagaactgtttagatgcaaaatccacaagtattcaagtgattgttaaagagggaggcctgaagttgattcagatccaagacaatggcaccgggatcaggaaagaagatctggatattgtatgtgaaaggttcactactagtaaactgcagtcctttgaggatttagccagtatttctacctatggctttcgaggtgaggctttggccagcataagccatgtggctcatgttactattacaacgaaaacagctgatggaaagtgtgcatacagagcaagttactcagatggaaaactgaaagcccctcctaaaccatgtgctggcaatcaagggacccagatcacggtggaggaccttttttacaacatagccacgaggagaaaagctttaaaaaatccaagtgaagaatatgggaaaattttggaagttgttggcaggtattcagtacacaatgcaggcattagtttctcagttaaaaaacaaggagagacagtagctgatgttaggacactacccaatgcctcaaccgtggacaatattcgctccatctttggaaatgctgttagtcgagaactgatagaaattggatgtgaggataaaaccctagccttcaaaatgaatggttacatatccaatgcaaactactcagtgaagaagtgcatcttcttactcttcatcaaccatcgtctggtagaatcaacttccttgagaaaagccatagaaacagtgtatgcagcctatttgcccaaaaacacacacccattcctgtacctcagtttagaaatcagtccccagaatgtggatgttaatgtgcaccccacaaagcatgaagttcacttcctgcacgaggagagcatcctggagcgggtgcagcagcacatcgagagcaagctcctgggctccaattcctccaggatgtacttcacccagactttgctaccaggacttgctggcccctctggggagatggttaaatccacaacaagtctgacctcgtcttctacttctggaagtagtgataaggtctatgcccaccagatggttcgtacagattcccgggaacagaagcttgatgcatttctgcagcctctgagcaaacccctgtccagtcagccccaggccattgtcacagaggataagacagatatttctagtggcagggctaggcagcaagatgaggagatgcttgaactcccagcccctgctgaagtggctgccaaaaatcagagcttggagggggatacaacaaaggggacttcagaaatgtcagagaagagaggacctacttccagcaaccccagaaagagacatcgggaagattctgatgtggaaatggtggaagatgattcccgaaaggaaatgactgcagcttgtaccccccggagaaggatcattaacctcactagtgttttgagtctccaggaagaaattaatgagcagggacatgaggttctccgggagatgttgcataaccactccttcgtgggctgtgtgaatcctcagtgggccttggcacagcatcaaaccaagttataccttctcaacaccaccaagcttagtgaagaactgttctaccagatactcatttatgattttgccaattttggtgttctcaggttatcggagccagcaccgctctttgaccttgccatgcttgccttagatagtccagagagtggctggacagaggaagatggtcccaaagaaggacttgctgaatacattgttgagtttctgaagaagaaggctgagatgcttgcagactatttctctttggaaattgatgagagtgaagtgcctggctccattccaaactcctggaagtggactgtggaacacattgtctataaagccttgcgctcacacattctgcctcctaaacatttcacagaagatggaaatatcctgcagcttgctaacctgcctgatctatacaaagtctttgagaggtgttaaatatggttatttatgcactgtgggatgtgttcttctttctctgtattccgatacaaagtgttgtatcaaagtgtgatatacaaagtgtaccaacataagtgttggtagcacttaagacttatacttgccttctgatagtattcctttatacacagtggattgattataaataaatagatgtgtcttaacat

SEQ ID NO: 156040 - DNA, 928 bp, Homo sapiens
  Payload ID: 10638
  Gene Symbol: MLH1
  Gene Name: mutL homolog 1
  ENST ID: ENST00000432299
  CDS Start-End: 25-171
ttccttggctcttctggcgccaaaatgtcgttcgtggcaggggttattcggcggctggacgagacagtggtgaaccgcatcgcggcgggggaagttatccagcggccagctaatgctatcaaagagatgattgagaactggtacggagggagtcgagccgggctcacttaagggctacgacttaacgggccgcgtcactcaatggcgcggacacgcctctttgcccgggcagaggcatgtacagcgcatgcccacaacggcggaggccgccgggttccctgacgtgccagtcaggccttctccttttccgcagaccgtgtgtttctttaccgctctcccccgagaccttttaagggttgtttggagttttagatgcaaaatccacaagtattcaagtgattgttaaagagggaggcctgaagttgattcagatccaagacaatggcaccgggatcaggaaagaagatctggatattgtatgtgaaaggttcactactagtaaactgcagtcctttgaggatttagccagtatttctacctatggctttcgaggtgaggctttggccagcataagccatgtggctcatgttactattacaacgaaaacagctgatggaaagtgtgcatacagagcaagttactcagatggaaaactgaaagcccctcctaaaccatgtgctggcaatcaagggacccagatcacggtggaggaccttttttacaacatagccacgaggagaaaagctttaaaaaatccaagtgaagaatatgggaaaattttggaagttgttggcaggtattcagtacacaatgcaggcattagtttctcagttaaaaaacaaggagagacagtagctgatgttaggacactacccaatgcctcaaccgtggacaatattcgctccatctttggaaatgctgttagtcg

SEQ ID NO: 156041 - DNA, 2366 bp, Homo sapiens
  Payload ID: 10638
  Gene Symbol: MLH1
  Gene Name: mutL homolog 1
  Uniprot ID: P40692
  ENST ID: ENST00000539477
  CDS Start-End: 630-2177
acaacggcggaggccgccgggttccctgacgtgccagtcaggccttctccttttccgcagaccgtgtgtttctttaccgctctcccccgagaccttttaagggttgtttggagttttagatgcaaaatccacaagtattcaagtgattgttaaagagggaggcctgaagttgattcagatccaagacaatggcaccgggatcaggaaagaagatctggatattgtatgtgaaaggttcactactagtaaactgcagtcctttgaggatttagccagtatttctacctatggctttcgaggtgaggctttggccagcataagccatgtggctcatgttactattacaacgaaaacagctgatggaaagtgtgcatacagagcaagttactcagatggaaaactgaaagcccctcctaaaccatgtgctggcaatcaagggacccagatcacggtattcagtacacaatgcaggcattagtttctcagttaaaaaacaaggagagacagtagctgatgttaggacactacccaatgcctcaaccgtggacaatattcgctccatctttggaaatgctgttagtcgagaactgatagaaattggatgtgaggataaaaccctagccttcaaaatgaatggttacatatccaatgcaaactactcagtgaagaagtgcatcttcttactcttcatcaaccatcgtctggtagaatcaacttccttgagaaaagccatagaaacagtgtatgcagcctatttgcccaaaaacacacacccattcctgtacctcagtttagaaatcagtccccagaatgtggatgttaatgtgcaccccacaaagcatgaagttcacttcctgcacgaggagagcatcctggagcgggtgcagcagcacatcgagagcaagctcctgggctccaattcctccaggatgtacttcacccagactttgctaccaggacttgctggcccctctggggagatggttaaatccacaacaagtctgacctcgtcttctacttctggaagtagtgataaggtctatgcccaccagatggttcgtacagattcccgggaacagaagcttgatgcatttctgcagcctctgagcaaacccctgtccagtcagccccaggccattgtcacagaggataagacagatatttctagtggcagggctaggcagcaagatgaggagatgcttgaactcccagcccctgctgaagtggctgccaaaaatcagagcttggagggggatacaacaaaggggacttcagaaatgtcagagaagagaggacctacttccagcaaccccagaaagagacatcgggaagattctgatgtggaaatggtggaagatgattcccgaaaggaaatgactgcagcttgtaccccccggagaaggatcattaacctcactagtgttttgagtctccaggaagaaattaatgagcagggacatgaggttctccgggagatgttgcataaccactccttcgtgggctgtgtgaatcctcagtgggccttggcacagcatcaaaccaagttataccttctcaacaccaccaagcttagtgaagaactgttctaccagatactcatttatgattttgccaattttggtgttctcaggttatcggagccagcaccgctctttgaccttgccatgcttgccttagatagtccagagagtggctggacagaggaagatggtcccaaagaaggacttgctgaatacattgttgagtttctgaagaagaaggctgagatgcttgcagactatttctctttggaaattgatgaggaagggaacctgattggattaccccttctgattgacaactatgtgccccctttggagggactgcctatcttcattcttcgactagccactgaggtgaattgggacgaagaaaaggaatgttttgaaagcctcagtaaagaatgcgctatgttctattccatccggaagcagtacatatctgaggagtcgaccctctcaggccagcagagtgaagtgcctggctccattccaaactcctggaagtggactgtggaacacattgtctataaagccttgcgctcacacattctgcctcctaaacatttcacagaagatggaaatatcctgcagcttgctaacctgcctgatctatacaaagtctttgagaggtgttaaatatggttatttatgcactgtgggatgtgttcttctttctctgtattccgatacaaagtgttgtatcaaagtgtgatatacaaagtgtaccaacataagtgttggtagcacttaagacttatacttgccttctgatagtattcctttatacacagtggattgattataaataaatagatgtgtcttaac

SEQ ID NO: 156042 - DNA, 2567 bp, Homo sapiens
  Payload ID: 10638
  Gene Symbol: MLH1
  Gene Name: mutL homolog 1
  Uniprot ID: P40692
  ENST ID: ENST00000536378
  CDS Start-End: 831-2378
gaagagacccagcaacccacagagttgagaaatttgactggcattcaagctgtccaatcaatagctgccgctgaagggtggggctggatggcgtaagctacagctgaaggaagaacgtgagcacgaggcactgaggtgattggctgaaggcacttccgttgagcatctagacgtttccttggctcttctggcgccaaaatgtcgttcgtggcaggggttattcggcggctggacgagacagtggtgaaccgcatcgcggcgggggaagttatccagcggccagctaatgctatcaaagagatgattgagaactgaaagaagatctggatattgtatgtgaaaggttcactactagtaaactgcagtcctttgaggatttagccagtatttctacctatggctttcgaggtgaggctttggccagcataagccatgtggctcatgttactattacaacgaaaacagctgatggaaagtgtgcatacagagcaagttactcagatggaaaactgaaagcccctcctaaaccatgtgctggcaatcaagggacccagatcacggtggaggaccttttttacaacatagccacgaggagaaaagctttaaaaaatccaagtgaagaatatgggaaaattttggaagttgttggcaggtattcagtacacaatgcaggcattagtttctcagttaaaaaacaaggagagacagtagctgatgttaggacactacccaatgcctcaaccgtggacaatattcgctccatctttggaaatgctgttagtcgagaactgatagaaattggatgtgaggataaaaccctagccttcaaaatgaatggttacatatccaatgcaaactactcagtgaagaagtgcatcttcttactcttcatcaaccatcgtctggtagaatcaacttccttgagaaaagccatagaaacagtgtatgcagcctatttgcccaaaaacacacacccattcctgtacctcagtttagaaatcagtccccagaatgtggatgttaatgtgcaccccacaaagcatgaagttcacttcctgcacgaggagagcatcctggagcgggtgcagcagcacatcgagagcaagctcctgggctccaattcctccaggatgtacttcacccagactttgctaccaggacttgctggcccctctggggagatggttaaatccacaacaagtctgacctcgtcttctacttctggaagtagtgataaggtctatgcccaccagatggttcgtacagattcccgggaacagaagcttgatgcatttctgcagcctctgagcaaacccctgtccagtcagccccaggccattgtcacagaggataagacagatatttctagtggcagggctaggcagcaagatgaggagatgcttgaactcccagcccctgctgaagtggctgccaaaaatcagagcttggagggggatacaacaaaggggacttcagaaatgtcagagaagagaggacctacttccagcaaccccagaaagagacatcgggaagattctgatgtggaaatggtggaagatgattcccgaaaggaaatgactgcagcttgtaccccccggagaaggatcattaacctcactagtgttttgagtctccaggaagaaattaatgagcagggacatgaggttctccgggagatgttgcataaccactccttcgtgggctgtgtgaatcctcagtgggccttggcacagcatcaaaccaagttataccttctcaacaccaccaagcttagtgaagaactgttctaccagatactcatttatgattttgccaattttggtgttctcaggttatcggagccagcaccgctctttgaccttgccatgcttgccttagatagtccagagagtggctggacagaggaagatggtcccaaagaaggacttgctgaatacattgttgagtttctgaagaagaaggctgagatgcttgcagactatttctctttggaaattgatgaggaagggaacctgattggattaccccttctgattgacaactatgtgccccctttggagggactgcctatcttcattcttcgactagccactgaggtgaattgggacgaagaaaaggaatgttttgaaagcctcagtaaagaatgcgctatgttctattccatccggaagcagtacatatctgaggagtcgaccctctcaggccagcagagtgaagtgcctggctccattccaaactcctggaagtggactgtggaacacattgtctataaagccttgcgctcacacattctgcctcctaaacatttcacagaagatggaaatatcctgcagcttgctaacctgcctgatctatacaaagtctttgagaggtgttaaatatggttatttatgcactgtgggatgtgttcttctttctctgtattccgatacaaagtgttgtatcaaagtgtgatatacaaagtgtaccaacataagtgttggtagcacttaagacttatacttgccttctgatagtattcctttatacacagtggattgattataaataaatagatgtgtcttaac

SEQ ID NO: 156043 - DNA, 721 bp, Homo sapiens
  Payload ID: 10638
  Gene Symbol: MLH1
  Gene Name: mutL homolog 1
  ENST ID: ENST00000616768
  CDS Start-End: 1-670
tgtcacagaggataagacagatatttctagtggcagggctaggcagcaagatgaggagatgcttgaactcccagcccctgctgaagtggctgccaaaaatcagagcttggagggggatacaacaaaggggacttcagaaatgtcagagaagagaggacctacttccagcaaccccagaaagagacatcgggaagattctgatgtggaaatggtggaagatgattcccgaaaggaaatgactgcagcttgtaccccccggagaaggatcattaacctcactagtgttttgagtctccaggaagaaattaatgagcagggacatgaggttctccgggagatgttgcataaccactccttcgtgggctgtgtgaatcctcagtgggccttggcacagcatcaaaccaagttataccttctcaacaccaccaagcttagtgaagaactgttctaccagatactcatttatgattttgccaattttggtgttctcaggttatcggagccagcaccgctctttgaccttgccatgcttgccttagatagtccagagagtggctggacagaggaagatggtcccaaagaaggacttgctgaatacattgttgagtttctgaagaagaaggctgagatgcttgcagactatttctctttggaaattgatgaggtgtgacagccattcttatacttctgttgtattcttcaaataaaatttccagccggg

SEQ ID NO: 156044 - DNA, 7896 bp, Homo sapiens
  Payload ID: 10639
  Gene Symbol: MLH3
  Gene Name: mutL homolog 3
  Uniprot ID: Q9UHC1
  ENST ID: ENST00000355774
  CDS Start-End: 217-4578
aacaactggtgcgcatgcgcactggtgtctcgcggcctggcgcgccccctccgaagcgcatgctcgtgggcacgcacgagcctcaagatccaaggtgcgcgcgtcggcgtccgaggcggttggtgtcggagaatttgttaagcgggactccaggcaattatttccagtcagagaaggaaaccagtgcctggcattctcaccatctttctacctaccatgatcaagtgcttgtcagttgaagtacaagccaaattgcgttctggtttggccataagctccttgggccaatgtgttgaggaacttgccctcaacagtattgatgctgaagcaaaatgtgtggctgtcagggtgaatatggaaaccttccaagttcaagtgatagacaatggatttgggatggggagtgatgatgtagagaaagtgggaaatcgttatttcaccagtaaatgccactcggtacaggacttggagaatccaaggttttatggtttccgaggagaggccttggcaaatattgctgacatggccagtgctgtggaaatttcgtccaagaaaaacaggacaatgaaaacttttgtgaaactgtttcagagtggaaaagccctgaaagcttgtgaagctgatgtgactagagcaagcgctgggactactgtaacagtgtataacctattttaccagcttcctgtaaggaggaaatgcatggaccctagactggagtttgagaaggttaggcagagaatagaagctctctcactcatgcacccttccatttctttctctttgagaaatgatgtttctggttccatggttcttcagctccctaaaaccaaagacgtatgttcccgattttgtcaaatttatggattgggaaagtcccaaaagctaagagaaataagttttaaatataaagagtttgagcttagtggctatatcagctctgaagcacattacaacaagaatatgcagtttttgtttgtgaacaaaagactagttttaaggacaaagctacataaactcattgactttttattaaggaaagaaagtattatatgcaagccaaagaatggtcccaccagtaggcaaatgaattcaagtcttcggcaccggtctaccccagaactctatggcatatatgtaattaatgtgcagtgccaattctgtgagtatgatgtgtgcatggagccagccaaaactctgattgaatttcagaactgggacactctcttgttttgcattcaggaaggagtgaaaatgtttttaaagcaagaaaaattatttgtggaattatcaggtgaggatattaaggaatttagtgaagataatggttttagtttatttgatgctactcttcagaagcgtgtgacttccgatgagaggagcaatttccaggaagcatgtaataatattttagattcctatgagatgtttaatttgcagtcaaaagctgtgaaaagaaaaactactgcagaaaacgtaaacacacagagttctagggattcagaagctaccagaaaaaatacaaatgatgcatttttgtacatttatgaatcaggtggtccaggccatagcaaaatgacagagccatctttacaaaacaaagacagctcttgctcagaatcaaagatgttagaacaagagacaattgtagcatcagaagctggagaaaatgagaaacataaaaaatctttcctggaacatagctctttagaaaatccgtgtggaaccagtttagaaatgtttttaagcccttttcagacaccatgtcactttgaggagagtgggcaggatctagaaatatggaaagaaagtactactgttaatggcatggctgccaacatcttgaaaaataatagaattcagaatcaaccaaagagatttaaagatgctactgaagtgggatgccagcctctgccttttgcaacaacattatggggagtacatagtgctcagacagagaaagagaaaaaaaaagaatctagcaattgtggaagaagaaatgtttttagttatgggcgagttaaattatgttccactggctttataactcatgtagtacaaaatgaaaaaactaaatcaactgaaacagaacattcatttaaaaattatgttagacctggtcccacacgtgcccaagaaacatttggaaatagaacacgtcattcagttgaaactccagacatcaaagatttagccagcactttaagtaaagaatctggtcaattgcccaacaaaaaaaattgcagaacgaatataagttatgggctagagaatgaacctacagcaacttatacaatgttttctgcttttcaggaaggtagcaaaaaatcacaaacagattgcatattatctgatacatccccctctttcccctggtatagacacgtttccaatgatagtaggaaaacagataaattaattggtttctccaaaccaatcgtccgtaagaagctaagcttgagttcacagctaggatctttagagaagtttaagaggcaatatgggaaggttgaaaatcctctggatacagaagtagaggaaagtaatggagtcactaccaatctcagtcttcaagttgaacctgacattctgctgaaggacaagaaccgcttagagaactctgatgtttgtaaaatcactactatggagcatagtgattcagatagtagttgtcaaccagcaagccacatccttaactcagagaagtttccattctccaaggatgaagattgtttagaacaacagatgcctagtttgagagaaagtcctatgaccctgaaggagttatctctctttaatagaaaacctttggaccttgagaagtcatctgaatcactagcctctaaattatccagactgaagggttccgaaagagaaactcaaacaatggggatgatgagtcgttttaatgaacttccaaattcagattccagtaggaaagacagcaagttgtgcagtgtgttaacacaagatttttgtatgttatttaacaacaagcatgaaaaaacagagaatggtgtcatcccaacatcagattctgccacacaggataattcctttaataaaaatagtaaaacacattctaacagcaatacaacagagaactgtgtgatatcagaaactcctttggtattgccctataataattctaaagttaccggtaaagattcagatgttcttatcagagcctcagaacaacagataggaagtcttgactctcccagtggaatgttaatgaatccggtagaagatgccacaggtgaccaaaatggaatttgttttcagagtgaggaatctaaagcaagagcttgttctgaaactgaagagtcaaacacgtgttgttcagattggcagcggcatttcgatgtagccctgggaagaatggtttatgtcaacaaaatgactggactcagcacattcattgccccaactgaggacattcaggctgcttgtactaaagacctgacaactgtggctgtggatgttgtacttgagaatgggtctcagtacaggtgtcaaccttttagaagcgaccttgttcttcctttccttccgagagctcgagcagagaggactgtgatgagacaggataacagagatactgtggatgatactgttagtagcgaatcgcttcagtctttgttctcagaatgggacaatccagtatttgcccgttatccagaggttgctgttgatgtaagcagtggccaggctgagagcttagcagttaaaattcacaacatcttgtatccctatcgtttcaccaaaggaatgattcattcaatgcaggttctccagcaagtagataacaagtttattgcctgtttgatgagcactaagactgaagagaatggcgaggcaggtgggaacctgctcgtgctggtggatcagcacgctgcccatgagcgtatacgtctggagcagcttatcattgattcctacgagaagcaacaggcacaaggctctggtcggaaaaaattactgtcttctactctaattcctccgctagagataacagtgacagaggaacaaaggagactcttatggtgttaccacaaaaatctggaagatctgggccttgaatttgtatttccagacactagtgattctctggtccttgtgggaaaagtaccactatgttttgtggaaagagaagccaatgaacttcggagaggaagatctactgtgaccaagagtattgtggaggaatttatccgagaacaactggagctactccagaccaccggaggcatccaagggacattgccactgactgtccagaaggtgttggcatcccaagcctgccatggggccattaagtttaatgatggcctgagcttacaggaaagttgccgccttattgaagctctgtcctcatgccagctgccattccagtgtgctcacgggagaccttctatgctgccgttagctgacatagaccacttggaacaggaaaaacagattaaacccaacctcactaaacttcgcaaaatggcccaggcctggcgtctctttggaaaagcagagtgtgatacaaggcagagcctgcagcaatccatgcctccctgtgagccaccatgagaacagaatcactggtctaaaaggaacaaagggatgttcactgtatgcctctgagcagagagcagcagcagcaggtaccagcacggccctgactgaatcagcccagtgtccctgagcagcttagacagcagggctctctgtatcagtctttcttgagcagatgattcccctagttgagtagccagatgaaattcaagcctaaagacaattcattcatttgcatccatgggcacagaaggttgctatatagtatctaccttttgctacttatttaatgataaaatttaatgacagtttgattggttgcttggtttgttatttgaagggtgtgatttttgtttttgtacagttttttttcaagcttcacatttgcgtgtatctaattcagctgatgctcaagtccaaggggtagtctgccttcccaggctgcccccagggtttctgcactggtcccctcttttcccttcagtcttcttcacttccctatgctgctgcttcatgtgctacatctcagacttaaagagtttctctactacagtgaaaacattctctagggtctttcatcaggcctttagttattttagggataaaaactattgataaaaaggacaaggatagaacagagaaaatttaaagtcctgttccgggttttttgttatgttttctttaaaaactcagagactgatgttcaatatcccaaaccagtaaaatggtgaaaatactatgagcttgttttttaaaatatgattttttttggtactttataaagtatctctttatgtgaaagcaattgtcatatcaaaacacagcatacatacgttcaacctaaccaaatatctttacactttttctttcaggagacaagggttctttgggtccctttcaaacggtatcttggtgttattacattatgcctatctattgcccttataatatcacttgggaccaggactgatcgttctgcaaatgcttgttatgccattctcaatctatttttcccgcaccttttcacatgatttgtggttaataggactcaacagactaaaattgcatagtagaaaaaaaatgcaaaaagccagctggtaatgtttattgcaactggggtgctatacaattagtaagatgatgcaatgagaatttctacttttgtatttcctgaccagcctgctcaaagtggcttttatatcaattgaatgattttcctcattttttaatacaggaaaccaattcgtgctcatggaagaaaagttcctttgccagcagccttgaagtgaatcttacaggagcaatgaaagtattgcattcattagcgtctgccccagagaaggttcagagaaaaccttcacttgttttcaaggggatccttgtagatttacgtaattggaatcctgaagaacaggccctactgtctaaaaaatggcttttattcttctaaatacatataaacggatgttttatagatgggaagacatgaccttagaaaggagagagttttcagaggatttgccaggctgtcaggggctctgcctccaggcccagtgtggcagtgtggcctcagggcctccgcctccctgcttgagggctgcatggaggccaactgtcctgggagttgtaaaaatcttttaaggccagaccaatttgagggattttaaaaagtgtctcagtgcctcttatgatttcagaaggttttgctatatgtaatcccaactactgttttcttgagagtagcagaggattagaaaaagtcctccataaattatgtaaccggccttcctgactagcctgactcaagcaatgtaagagataattattctgttttcataatttataagtgtgggggcatgcctcagcataaaaacaacctattagggaaaaatatctaatagattacctttatcgcctgttagggttttatgttgtttttaactcagatgccataagaacaaagatacatgtaatttataatagtaatcattaatacctatattgtgctttaaggtttacaaaataatttttctcatactttatcttagtttagtttcttgacagtccatgaggtaaggtggtagctttatcaccattttacaaagtgggaaacgaaggttcctcttaggaacctagttgtcacctttgtataataaaacttcgaagctcggagctgttaactggtttgctgaaggcttagctgtaagagccagaattcagacccaggtctgagtgacttcaaactgcacagtccttcccattattacccatatgctatcccttatatttttaatttattaggaattcattcatttataaacttggtgattcacctttattagattctggtcgctgaaggctttagtaacttcagagtaaaacttgagagatgagatgtaaaatgcagccattcttgagagttcctttttctgtaacattcatcaacacttcattgagaagtgaaggttcctatggctgtctctaccttcaagaggcttagctttagtcactgagaaagacaaggaaactaatgatagaatatagtagcttcttctggcgttaggtatcacagagtcacagctagttacagctagccctttattattgaaagaagaggagctagcagtcccactatcagaattaagactagagatggtaataggagctagtatcagaaaagcttaaggcaaagcataaagtgtaggctagaatgaagctggagaatggggagggggcttgggtaacatccagaacctggctggggacctggaactacatgagatgtaagaatggagaggttctagcagtcagaggtcaggtacaaatgaacagctgggatctgcgcatggcagacagtgaaaaaacccaggcaagcaaaatggtcagagcagaaaggggcccaaggccacgttcttgagatgtggagggggctgaggaagccacgccaagtaaggacagatgcagctcagcagttcctagcgagccctgacaagccagctcagctgaagcttcgggtgggagccagtcatggcacagtggagtgaaggaagagcagtttcaggcacccaaaacctgacccccacgacctgttttccacctgaagagccacccattccatccaaacccttggcaaaagtctgctaacagagagaaccggccagtatgctggccagtcgcgatcatgcctgtctttaccctctaagctgaagctgctcatcaacggtgagatggcaaaaaggtgggtccagaagaggggaaaagaagggagtctgtgaaaacaaaatgctgaagaatctgcatcaaataaacccttccttccttcctttttccttc

SEQ ID NO: 156045 - DNA, 7819 bp, Homo sapiens
  Payload ID: 10639
  Gene Symbol: MLH3
  Gene Name: mutL homolog 3
  Uniprot ID: Q9UHC1
  ENST ID: ENST00000380968
  CDS Start-End: 217-4506
aacaactggtgcgcatgcgcactggtgtctcgcggcctggcgcgccccctccgaagcgcatgctcgtgggcacgcacgagcctcaagatccaaggtgcgcgcgtcggcgtccgaggcggttggtgtcggagaatttgttaagcgggactccaggcaattatttccagtcagagaaggaaaccagtgcctggcattctcaccatctttctacctaccatgatcaagtgcttgtcagttgaagtacaagccaaattgcgttctggtttggccataagctccttgggccaatgtgttgaggaacttgccctcaacagtattgatgctgaagcaaaatgtgtggctgtcagggtgaatatggaaaccttccaagttcaagtgatagacaatggatttgggatggggagtgatgatgtagagaaagtgggaaatcgttatttcaccagtaaatgccactcggtacaggacttggagaatccaaggttttatggtttccgaggagaggccttggcaaatattgctgacatggccagtgctgtggaaatttcgtccaagaaaaacaggacaatgaaaacttttgtgaaactgtttcagagtggaaaagccctgaaagcttgtgaagctgatgtgactagagcaagcgctgggactactgtaacagtgtataacctattttaccagcttcctgtaaggaggaaatgcatggaccctagactggagtttgagaaggttaggcagagaatagaagctctctcactcatgcacccttccatttctttctctttgagaaatgatgtttctggttccatggttcttcagctccctaaaaccaaagacgtatgttcccgattttgtcaaatttatggattgggaaagtcccaaaagctaagagaaataagttttaaatataaagagtttgagcttagtggctatatcagctctgaagcacattacaacaagaatatgcagtttttgtttgtgaacaaaagactagttttaaggacaaagctacataaactcattgactttttattaaggaaagaaagtattatatgcaagccaaagaatggtcccaccagtaggcaaatgaattcaagtcttcggcaccggtctaccccagaactctatggcatatatgtaattaatgtgcagtgccaattctgtgagtatgatgtgtgcatggagccagccaaaactctgattgaatttcagaactgggacactctcttgttttgcattcaggaaggagtgaaaatgtttttaaagcaagaaaaattatttgtggaattatcaggtgaggatattaaggaatttagtgaagataatggttttagtttatttgatgctactcttcagaagcgtgtgacttccgatgagaggagcaatttccaggaagcatgtaataatattttagattcctatgagatgtttaatttgcagtcaaaagctgtgaaaagaaaaactactgcagaaaacgtaaacacacagagttctagggattcagaagctaccagaaaaaatacaaatgatgcatttttgtacatttatgaatcaggtggtccaggccatagcaaaatgacagagccatctttacaaaacaaagacagctcttgctcagaatcaaagatgttagaacaagagacaattgtagcatcagaagctggagaaaatgagaaacataaaaaatctttcctggaacatagctctttagaaaatccgtgtggaaccagtttagaaatgtttttaagcccttttcagacaccatgtcactttgaggagagtgggcaggatctagaaatatggaaagaaagtactactgttaatggcatggctgccaacatcttgaaaaataatagaattcagaatcaaccaaagagatttaaagatgctactgaagtgggatgccagcctctgccttttgcaacaacattatggggagtacatagtgctcagacagagaaagagaaaaaaaaagaatctagcaattgtggaagaagaaatgtttttagttatgggcgagttaaattatgttccactggctttataactcatgtagtacaaaatgaaaaaactaaatcaactgaaacagaacattcatttaaaaattatgttagacctggtcccacacgtgcccaagaaacatttggaaatagaacacgtcattcagttgaaactccagacatcaaagatttagccagcactttaagtaaagaatctggtcaattgcccaacaaaaaaaattgcagaacgaatataagttatgggctagagaatgaacctacagcaacttatacaatgttttctgcttttcaggaaggtagcaaaaaatcacaaacagattgcatattatctgatacatccccctctttcccctggtatagacacgtttccaatgatagtaggaaaacagataaattaattggtttctccaaaccaatcgtccgtaagaagctaagcttgagttcacagctaggatctttagagaagtttaagaggcaatatgggaaggttgaaaatcctctggatacagaagtagaggaaagtaatggagtcactaccaatctcagtcttcaagttgaacctgacattctgctgaaggacaagaaccgcttagagaactctgatgtttgtaaaatcactactatggagcatagtgattcagatagtagttgtcaaccagcaagccacatccttaactcagagaagtttccattctccaaggatgaagattgtttagaacaacagatgcctagtttgagagaaagtcctatgaccctgaaggagttatctctctttaatagaaaacctttggaccttgagaagtcatctgaatcactagcctctaaattatccagactgaagggttccgaaagagaaactcaaacaatggggatgatgagtcgttttaatgaacttccaaattcagattccagtaggaaagacagcaagttgtgcagtgtgttaacacaagatttttgtatgttatttaacaacaagcatgaaaaaacagagaatggtgtcatcccaacatcagattctgccacacaggataattcctttaataaaaatagtaaaacacattctaacagcaatacaacagagaactgtgtgatatcagaaactcctttggtattgccctataataattctaaagttaccggtaaagattcagatgttcttatcagagcctcagaacaacagataggaagtcttgactctcccagtggaatgttaatgaatccggtagaagatgccacaggtgaccaaaatggaatttgttttcagagtgaggaatctaaagcaagagcttgttctgaaactgaagagtcaaacacgtgttgttcagattggcagcggcatttcgatgtagccctgggaagaatggtttatgtcaacaaaatgactggactcagcacattcattgccccaactgaggacattcaggctgcttgtactaaagacctgacaactgtggctgtggatgttgtacttgagaatgggtctcagtacaggtgtcaaccttttagaagcgaccttgttcttcctttccttccgagagctcgagcagagaggactgtgatgagacaggataacagagatactgtggatgatactgttagtagcgaatcgcttcagtctttgttctcagaatgggacaatccagtatttgcccgttatccagaggttgctgttgatgtaagcagtggccaggctgagagcttagcagttaaaattcacaacatcttgtatccctatcgtttcaccaaaggaatgattcattcaatgcaggttctccagcaagtagataacaagtttattgcctgtttgatgagcactaagactgaagagaatggcgaggcagattcctacgagaagcaacaggcacaaggctctggtcggaaaaaattactgtcttctactctaattcctccgctagagataacagtgacagaggaacaaaggagactcttatggtgttaccacaaaaatctggaagatctgggccttgaatttgtatttccagacactagtgattctctggtccttgtgggaaaagtaccactatgttttgtggaaagagaagccaatgaacttcggagaggaagatctactgtgaccaagagtattgtggaggaatttatccgagaacaactggagctactccagaccaccggaggcatccaagggacattgccactgactgtccagaaggtgttggcatcccaagcctgccatggggccattaagtttaatgatggcctgagcttacaggaaagttgccgccttattgaagctctgtcctcatgccagctgccattccagtgtgctcacgggagaccttctatgctgccgttagctgacatagaccacttggaacaggaaaaacagattaaacccaacctcactaaacttcgcaaaatggcccaggcctggcgtctctttggaaaagcagagtgtgatacaaggcagagcctgcagcaatccatgcctccctgtgagccaccatgagaacagaatcactggtctaaaaggaacaaagggatgttcactgtatgcctctgagcagagagcagcagcagcaggtaccagcacggccctgactgaatcagcccagtgtccctgagcagcttagacagcagggctctctgtatcagtctttcttgagcagatgattcccctagttgagtagccagatgaaattcaagcctaaagacaattcattcatttgcatccatgggcacagaaggttgctatatagtatctaccttttgctacttatttaatgataaaatttaatgacagtttgattggttgcttggtttgttatttgaagggtgtgatttttgtttttgtacagttttttttcaagcttcacatttgcgtgtatctaattcagctgatgctcaagtccaaggggtagtctgccttcccaggctgcccccagggtttctgcactggtcccctcttttcccttcagtcttcttcacttccctatgctgctgcttcatgtgctacatctcagacttaaagagtttctctactacagtgaaaacattctctagggtctttcatcaggcctttagttattttagggataaaaactattgataaaaaggacaaggatagaacagagaaaatttaaagtcctgttccgggttttttgttatgttttctttaaaaactcagagactgatgttcaatatcccaaaccagtaaaatggtgaaaatactatgagcttgttttttaaaatatgattttttttggtactttataaagtatctctttatgtgaaagcaattgtcatatcaaaacacagcatacatacgttcaacctaaccaaatatctttacactttttctttcaggagacaagggttctttgggtccctttcaaacggtatcttggtgttattacattatgcctatctattgcccttataatatcacttgggaccaggactgatcgttctgcaaatgcttgttatgccattctcaatctatttttcccgcaccttttcacatgatttgtggttaataggactcaacagactaaaattgcatagtagaaaaaaaatgcaaaaagccagctggtaatgtttattgcaactggggtgctatacaattagtaagatgatgcaatgagaatttctacttttgtatttcctgaccagcctgctcaaagtggcttttatatcaattgaatgattttcctcattttttaatacaggaaaccaattcgtgctcatggaagaaaagttcctttgccagcagccttgaagtgaatcttacaggagcaatgaaagtattgcattcattagcgtctgccccagagaaggttcagagaaaaccttcacttgttttcaaggggatccttgtagatttacgtaattggaatcctgaagaacaggccctactgtctaaaaaatggcttttattcttctaaatacatataaacggatgttttatagatgggaagacatgaccttagaaaggagagagttttcagaggatttgccaggctgtcaggggctctgcctccaggcccagtgtggcagtgtggcctcagggcctccgcctccctgcttgagggctgcatggaggccaactgtcctgggagttgtaaaaatcttttaaggccagaccaatttgagggattttaaaaagtgtctcagtgcctcttatgatttcagaaggttttgctatatgtaatcccaactactgttttcttgagagtagcagaggattagaaaaagtcctccataaattatgtaaccggccttcctgactagcctgactcaagcaatgtaagagataattattctgttttcataatttataagtgtgggggcatgcctcagcataaaaacaacctattagggaaaaatatctaatagattacctttatcgcctgttagggttttatgttgtttttaactcagatgccataagaacaaagatacatgtaatttataatagtaatcattaatacctatattgtgctttaaggtttacaaaataatttttctcatactttatcttagtttagtttcttgacagtccatgaggtaaggtggtagctttatcaccattttacaaagtgggaaacgaaggttcctcttaggaacctagttgtcacctttgtataataaaacttcgaagctcggagctgttaactggtttgctgaaggcttagctgtaagagccagaattcagacccaggtctgagtgacttcaaactgcacagtccttcccattattacccatatgctatcccttatatttttaatttattaggaattcattcatttataaacttggtgattcacctttattagattctggtcgctgaaggctttagtaacttcagagtaaaacttgagagatgagatgtaaaatgcagccattcttgagagttcctttttctgtaacattcatcaacacttcattgagaagtgaaggttcctatggctgtctctaccttcaagaggcttagctttagtcactgagaaagacaaggaaactaatgatagaatatagtagcttcttctggcgttaggtatcacagagtcacagctagttacagctagccctttattattgaaagaagaggagctagcagtcccactatcagaattaagactagagatggtaataggagctagtatcagaaaagcttaaggcaaagcataaagtgtaggctagaatgaagctggagaatggggagggggcttgggtaacatccagaacctggctggggacctggaactacatgagatgtaagaatggagaggttctagcagtcagaggtcaggtacaaatgaacagctgggatctgcgcatggcagacagtgaaaaaacccaggcaagcaaaatggtcagagcagaaaggggcccaaggccacgttcttgagatgtggagggggctgaggaagccacgccaagtaaggacagatgcagctcagcagttcctagcgagccctgacaagccagctcagctgaagcttcgggtgggagccagtcatggcacagtggagtgaaggaagagcagtttcaggcacccaaaacctgacccccacgacctgttttccacctgaagagccacccattccatccaaacccttggcaaaagtctgctaacagagagaaccggccagtatgctggccagtcgcgatcatgcctgtctttaccctctaagctgaagctgctcatcaacggtgagatggcaaaaaggtgggtccagaagaggggaaaagaagggagtctgtgaaaacaaaatgctgaagaatctgcatcaaataaacccttccttccttccttttt

SEQ ID NO: 156046 - DNA, 1120 bp, Homo sapiens
  Payload ID: 10639
  Gene Symbol: MLH3
  Gene Name: mutL homolog 3
  ENST ID: ENST00000555144
  CDS Start-End: 1-598
aatgaatccggtagaagatgccacaggtgaccaaaatggaatttgttttcagagtgaggaatctaaagcaagagcttgttctgaaactgaagagtcaaacacgtgttgttcagattggcagcggcatttcgatgtagccctgggaagaatggtttatgtcaacaaaatgactggactcagcacattcattgccccaactgaggacattcaggctgcttgtactaaagacctgacaactgtggctgtggatgttgtacttgagaatgggtctcagtacaggtgtcaaccttttagaagcgaccttgttcttcctttccttccgagagctcgagcagagaggactgtgatgagacaggataacagagatactgtggatgatactgttagtagcgaatcgcttcagtctttgttctcagaatgggacaatccagtatttgcccgttatccagaggttctccagcaagtagataacaagtttattgcctgtttgatgagcactaagactgaagagaatggcgaggcagctgagttgatgatgttgcaggacccgtgttgcaggcagagcagagaggatgaaaatcatgagttcagtctttgaaatgctccagaagagatgtcaaggtggccaggcacggtggctcacgcctgtaatcccagcactttgggaggccgaggtgggaacctgctcgtgctggtggatcagcacgctgcccatgagcgtatacgtctggagcagcttatcattgattcctacgagaagcaacaggcacaaggctctggtcggaaaaaattactgtcttctactctaattcctccgctagagataacagtgacagaggaacaaaggagactcttatggtgttaccacaaaaatctggaagatctgggccttgaatttgtatttccagacactagtgattctctggtccttgtgggaaaagtaccactatgttttgtggaaagagaagccaatgaacttcggagaggaagatctactgtgaccaagagtattgtggaggaatttatccgagaacaactggagctactccagaccaccggaggcatccaagggacattgccactgactgtccagaaggtgttggcatcccaagcctgccat

SEQ ID NO: 156047 - DNA, 825 bp, Homo sapiens
  Payload ID: 10639
  Gene Symbol: MLH3
  Gene Name: mutL homolog 3
  ENST ID: ENST00000554697
  CDS Start-End: 1-375
gaatttatccgagaacaactggagctactccagaccaccggaggcatccaagggacattgccactgactgtccagaaggtgttggcatcccaagcctgccatggggccattaagtttaatgatggcctgagcttacaggaaagttgccgccttattgaagctctgtcctcatgccagctgccattccagtgtgctcacgggagaccttctatgctgccgttagctgacatagaccacttggaacaggaaaaacagattaaacccaacctcactaaacttcgcaaaatggcccaggcctggcgtctctttggaaaagcagagtgtgatacaaggcagagcctgcagcaatccatgcctccctgtgagccaccatgagaacagaatcactggtctaaaaggaacaaagggatgttcactgtatgcctctgagcagagagcagcagcagcaggaaaccaattcgtgctcatggaagaaaagttcctttgccagcagccttgaagtgaatcttacaggagcaatgaaagtattgcattcattagcgtctgccccagagaaggttcagagaaaaccttcacttgttttcaaggggatccttgtagatttacgtaattggaatcctgaagaacaggccctactgtctaaaaaatggcttttattcttctaaatacatataaacggatgttttatagatgggaagacatgaccttagaaaggagagagttttcagaggatttgccaggctgtcaggggctctgcctccaggcccagtgtggcagtgtggcctcagggcctccgcctccctgcttgagggctgcatggaggcc

SEQ ID NO: 156048 - DNA, 583 bp, Homo sapiens
  Payload ID: 10639
  Gene Symbol: MLH3
  Gene Name: mutL homolog 3
  ENST ID: ENST00000557648
  CDS Start-End: 265-583
gtgggcacgcacgagcctcaagatccaagttgctgccggctgcttagtgcattagcttagaaagcagcagaaattctgcagttaagagccctgatttgtcccgagtttggaaaaccggccccaccgcctgcaggggcccacccacgtggctctcactgatggagaagaaggggagacctttaatggcactggaatcttagggcaattatttccagtcagagaaggaaaccagtgcctggcattctcaccatctttctacctaccatgatcaagtgcttgtcagttgaagtacaagccaaattgcgttctggtttggccataagctccttgggccaatgtgttgaggaacttgccctcaacagtattgatgctgaagcaaaatgtgtggctgtcagggtgaatatggaaaccttccaagttcaagtgatagacaatggatttgggatggggagtgatgatgtagagaaagtgggaaatcgttatttcaccagtaaatgccactcggtacaggacttggagaatccaaggttttatggtttccgaggagaggccttggcaaatattgctgacatggccagtgctg

SEQ ID NO: 156049 - DNA, 2118 bp, Homo sapiens
  Payload ID: 10639
  Gene Symbol: MLH3
  Gene Name: mutL homolog 3
  ENST ID: ENST00000553713
  CDS Start-End: 1-1433
ataattcctttaataaaaatagtaaaacacattctaacagcaatacaacagagaactgtgtgatatcagaaactcctttggtattgccctataataattctaaagttaccggtaaagattcagatgttcttatcagagcctcagaacaacagataggaagtcttgactctcccagtggaatgttaatgaatccggtagaagatgccacaggtgaccaaaatggaatttgttttcagagtgaggaatctaaagcaagagcttgttctgaaactgaagagtcaaacacgtgttgttcagattggcagcggcatttcgatgtagccctgggaagaatggtttatgtcaacaaaatgactggactcagcacattcattgccccaactgaggacattcaggctgcttgtactaaagacctgacaactgtggctgtggatgttgtacttgagaatgatactgtggatgatactgttagtagcgaatcgcttcagtctttgttctcagaatgggacaatccagtatttgcccgttatccagaggttgctgttgatgtaagcagtggccaggctgagagcttagcagttaaaattcacaacatcttgtatccctatcgtttcaccaaaggaatgattcattcaatgcaggttctccagcaagtagataacaagtttattgcctgtttgatgagcactaagactgaagagaatggcgaggcaggtgggaacctgctcgtgctggtggatcagcacgctgcccatgagcgtatacgtctggagcagcttatcattgattcctacgagaagcaacaggcacaaggctctggtcggaaaaaattactgtcttctactctaattcctccgctagagataacagtgacagaggaacaaaggagactcttatggtgttaccacaaaaatctggaagatctgggccttgaatttgtatttccagacactagtgattctctggtccttgtgggaaaagtaccactatgttttgtggaaagagaagccaatgaacttcggagaggaagatctactgtgaccaagagtattgtggaggaatttatccgagaacaactggagctactccagaccaccggaggcatccaagggacattgccactgactgtccagaaggtgttggcatcccaagcctgccatggggccattaagtttaatgatggcctgagcttacaggaaagttgccgccttattgaagctctgtcctcatgccagctgccattccagtgtgctcacgggagaccttctatgctgccgttagctgacatagaccacttggaacaggaaaaacagattaaacccaacctcactaaacttcgcaaaatggcccaggcctggcgtctctttggaaaagcagagtgtgatacaaggcagagcctgcagcaatccatgcctccctgtgagccaccatgagaacagaatcactggtctaaaaggaacaaagggatgttcactgtatgcctctgagcagagagcagcagcagcaggtaccagcacggccctgactgaatcagcccagtgtccctgagcagcttagacagcagggctctctgtatcagtctttcttgagcagatgattcccctagttgagtagccagatgaaattcaagcctaaagacaattcattcatttgcatccatgggcacagaaggttgctatatagtatctaccttttgctacttatttaatgataaaatttaatgacagtttgattggttgcttggtttgttatttgaagggtgtgatttttgtttttgtacagttttttttcaagcttcacatttgcgtgtatctaattcagctgatgctcaagtccaaggggtagtctgccttcccaggctgcccccagggtttctgcactggtcccctcttttcccttcagtcttcttcacttccctatgctgctgcttcatgtgctacatctcagacttaaagagtttctctactacagtgaaaacattctctagggtctttcatcaggcctttagttattttagggataaaaactattgataaaaaggacaaggatagaacagagaaaatttaaagtcctgttccgggttttttgttatgttttctttaaaaactcagagactga

SEQ ID NO: 156050 - DNA, 616 bp, Homo sapiens
  Payload ID: 10639
  Gene Symbol: MLH3
  Gene Name: mutL homolog 3
  ENST ID: ENST00000553263
  CDS Start-End: 130-616
ctcgcggcctggcgcgccccctccgaagcgcatgctcgtgggcacgcacgagcctcaagatccaaggcaattatttccagtcagagaaggaaaccagtgcctggcattctcaccatctttctacctaccatgatcaagtgcttgtcagttgaagtacaagccaaattgcgttctggtttggccataagctccttgggccaatgtgttgaggaacttgccctcaacagtattgatgctgaagcaaaatgtgtggctgtcagggtgaatatggaaaccttccaagttcaagtgatagacaatggatttgggatggggagtgatgatgtagagaaagtgggaaatcgttatttcaccagtaaatgccactcggtacaggacttggagaatccaaggttttatggtttccgaggagaggccttggcaaatattgctgacatggccagtgctgtggaaatttcgtccaagaaaaacaggacaatgaaaacttttgtgaaactgtttcagagtggaaaagccctgaaagcttgtgaagctgatgtgactagagcaagcgctgggactactgtaacagtgtataacctattttaccagcttcctgtaaggaggaaatgcatgg

SEQ ID NO: 156051 - DNA, 4229 bp, Homo sapiens
  Payload ID: 10639
  Gene Symbol: MLH3
  Gene Name: mutL homolog 3
  ENST ID: ENST00000556257
  CDS Start-End: 107-3934
acgagcctcaagatccaaggtgcgcgcgtcggcgtccgaggcggcaattatttccagtcagagaaggaaaccagtgcctggcattctcaccatctttctacctaccatgatcaagtgcttgtcagttgaagtacaagccaaattgcgttctggtttggccataagctccttgggccaatgtgttgaggaacttgccctcaacagtattgatgctgaagcaaaatgtgtggctgtcagggtgaatatggaaaccttccaagttcaagtgatagacaatggatttgggatggggagtgatgatgtagagaaagtgggaaatcgttatttcaccagtaaatgccactcggtacaggacttggagaatccaaggttttatggtttccgaggagaggccttggcaaatattgctgacatggccagtgctgtggaaatttcgtccaagaaaaacaggacaatgaaaacttttgtgaaactgtttcagagtggaaaagccctgaaagcttgtgaagctgatgtgactagagcaagcgctgggactactgtaacagtgtataacctattttaccagcttcctgtaaggaggaaatgcatggaccctagactggagtttgagaaggttaggcagagaatagaagctctctcactcatgcacccttccatttctttctctttgagaaatgatgtttctggttccatggttcttcagctccctaaaaccaaagacgtatgttcccgattttgtcaaatttatggattgggaaagtcccaaaagctaagagaaataagttttaaatataaagagtttgagcttagtggctatatcagctctgaagcacattacaacaagaatatgcagtttttgtttgtgaacaaaagactagttttaaggacaaagctacataaactcattgactttttattaaggaaagaaagtattatatgcaagccaaagaatggtcccaccagtaggcaaatgaattcaagtcttcggcaccggtctaccccagaactctatggcatatatgtaattaatgtgcagtgccaattctgtgagtatgatgtgtgcatggagccagccaaaactctgattgaatttcagaactgggacactctcttgttttgcattcaggaaggagtgaaaatgtttttaaagcaagaaaaattatttgtggaattatcaggtgaggatattaaggaatttagtgaagataatggttttagtttatttgatgctactcttcagaagcgtgtgacttccgatgagaggagcaatttccaggaagcatgtaataatattttagattcctatgagatgtttaatttgcagtcaaaagctgtgaaaagaaaaactactgcagaaaacgtaaacacacagagttctagggattcagaagctaccagaaaaaatacaaatgatgcatttttgtacatttatgaatcaggtggtccaggccatagcaaaatgacagagccatctttacaaaacaaagacagctcttgctcagaatcaaagatgttagaacaagagacaattgtagcatcagaagctggagaaaatgagaaacataaaaaatctttcctggaacatagctctttagaaaatccgtgtggaaccagtttagaaatgtttttaagcccttttcagacaccatgtcactttgaggagagtgggcaggatctagaaatatggaaagaaagtactactgttaatggcatggctgccaacatcttgaaaaataatagaattcagaatcaaccaaagagatttaaagatgctactgaagtgggatgccagcctctgccttttgcaacaacattatggggagtacatagtgctcagacagagaaagagaaaaaaaaagaatctagcaattgtggaagaagaaatgtttttagttatgggcgagttaaattatgttccactggctttataactcatgtagtacaaaatgaaaaaactaaatcaactgaaacagaacattcatttaaaaattatgttagacctggtcccacacgtgcccaagaaacatttggaaatagaacacgtcattcagttgaaactccagacatcaaagatttagccagcactttaagtaaagaatctggtcaattgcccaacaaaaaaaattgcagaacgaatataagttatgggctagagaatgaacctacagcaacttatacaatgttttctgcttttcaggaaggtagcaaaaaatcacaaacagattgcatattatctgatacatccccctctttcccctggtatagacacgtttccaatgatagtaggaaaacagataaattaattggtttctccaaaccaatcgtccgtaagaagctaagcttgagttcacagctaggatctttagagaagtttaagaggcaatatgggaaggttgaaaatcctctggatacagaagtagaggaaagtaatggagtcactaccaatctcagtcttcaagttgaacctgacattctgctgaaggacaagaaccgcttagagaactctgatgtttgtaaaatcactactatggagcatagtgattcagatagtagttgtcaaccagcaagccacatccttaactcagagaagtttccattctccaaggatgaagattgtttagaacaacagatgcctagtttgagagaaagtcctatgaccctgaaggagttatctctctttaatagaaaacctttggaccttgagaagtcatctgaatcactagcctctaaattatccagactgaagggttccgaaagagaaactcaaacaatggggatgatgagtcgttttaatgaacttccaaattcagattccagtaggaaagacagcaagttgtgcagtgtgttaacacaagatttttgtatgttatttaacaacaagcatgaaaaaacagagaatggtgtcatcccaacatcagattctgccacacaggataattcctttaataaaaatagtaaaacacattctaacagcaatacaacagagaactgtgtgatatcagaaactcctttggtattgccctataataattctaaagttaccggtaaagattcagatgttcttatcagagcctcagaacaacagataggaagtcttgactctcccagtggaatgttaatgaatccggtagaagatgccacaggtgaccaaaatggaatttgttttcagagtgaggaatctaaagcaagagcttgttctgaaactgaagagtcaaacacgtgttgttcagattggcagcggcatttcgatgtagccctgggaagaatggtttatgtcaacaaaatgactggactcagcacattcattgccccaactgaggacattcaggctgcttgtactaaagacctgacaactgtggctgtggatgttgtacttgagaatggttatctctttaggtgttaccacaaaaatctggaagatctgggccttgaatttgtatttccagacactagtgattctctggtccttgtgggaaaagtaccactatgttttgtggaaagagaagccaatgaacttcggagaggaagatctactgtgaccaagagtattgtggaggaatttatccgagaacaactggagctactccagaccaccggaggcatccaagggacattgccactgactgtccagaaggtgttggcatcccaagcctgccatggggccattaagtttaatgatggcctgagcttacaggaaagttgccgccttattgaagctctgtcctcatgccagctgccattccagtgtgctcacgggagaccttctatgctgccgttagctgacatagaccacttggaacaggaaaaacagattaaacccaacctcactaaacttcgcaaaatggcccaggcctggcgtctctttggaaaagcagagtgtgatacaaggcagagcctgcagcaatccatgcctccctgtgagccaccatgagaacagaatcactggtctaaaaggaacaaagggatgttcactgtatgcctctgagcagagagcagcagcagcaggtaccagcacggccctgactgaatcagcccagtgtccctgagcagcttagacagcagggctctctgtatcagtctttcttgagcagatgattcccctagttgagtagccagatgaaattcaagcctaaagacaattcattcatttgcatccatgggcacagaaggttgctatatagtatctaccttttgctacttatttaatgataaaatttaatgacagt

SEQ ID NO: 156052 - DNA, 635 bp, Homo sapiens
  Payload ID: 10639
  Gene Symbol: MLH3
  Gene Name: mutL homolog 3
  ENST ID: ENST00000556453
  CDS Start-End: 1-323
ctgaggacattcaggctgcttgtactaaagacctgacaactgtggctgtggatgttgtacttgagaatgatactgtggatgatactgttagtagcgaatcgcttcagtctttgttctcagaatgggacaatccagtatttgcccgttatccagaggttgctgttgatgtaagcagtggccaggctgagagcttagcagttaaaattcacaacatcttgtatccctatcgtttcaccaaaggaatgattcattcaatgcagattcctacgagaagcaacaggcacaaggctctggtcggaaaaaattactgtcttctactctaattcctccgctagagataacagtgacagaggaacaaaggagactcttatggtgttaccacaaaaatctggaagatctgggccttgaatttgtatttccagacactagtgattctctggtccttgtgggaaaagtaccactatgttttgtggaaagagaagccaatgaacttcggagaggaagatctactgtgaccaagagtattgtggaggaatttatccgagaacaactggagctactccagaccaccggaggcatccaagggacattgccactgactgtccagaaggtgttggcatcccaagcctgccatg

SEQ ID NO: 156053 - DNA, 4491 bp, Homo sapiens
  Payload ID: 10639
  Gene Symbol: MLH3
  Gene Name: mutL homolog 3
  Uniprot ID: Q9UHC1
  ENST ID: ENST00000556740
  CDS Start-End: 37-4398
ccagtgcctggcattctcaccatctttctacctaccatgatcaagtgcttgtcagttgaagtacaagccaaattgcgttctggtttggccataagctccttgggccaatgtgttgaggaacttgccctcaacagtattgatgctgaagcaaaatgtgtggctgtcagggtgaatatggaaaccttccaagttcaagtgatagacaatggatttgggatggggagtgatgatgtagagaaagtgggaaatcgttatttcaccagtaaatgccactcggtacaggacttggagaatccaaggttttatggtttccgaggagaggccttggcaaatattgctgacatggccagtgctgtggaaatttcgtccaagaaaaacaggacaatgaaaacttttgtgaaactgtttcagagtggaaaagccctgaaagcttgtgaagctgatgtgactagagcaagcgctgggactactgtaacagtgtataacctattttaccagcttcctgtaaggaggaaatgcatggaccctagactggagtttgagaaggttaggcagagaatagaagctctctcactcatgcacccttccatttctttctctttgagaaatgatgtttctggttccatggttcttcagctccctaaaaccaaagacgtatgttcccgattttgtcaaatttatggattgggaaagtcccaaaagctaagagaaataagttttaaatataaagagtttgagcttagtggctatatcagctctgaagcacattacaacaagaatatgcagtttttgtttgtgaacaaaagactagttttaaggacaaagctacataaactcattgactttttattaaggaaagaaagtattatatgcaagccaaagaatggtcccaccagtaggcaaatgaattcaagtcttcggcaccggtctaccccagaactctatggcatatatgtaattaatgtgcagtgccaattctgtgagtatgatgtgtgcatggagccagccaaaactctgattgaatttcagaactgggacactctcttgttttgcattcaggaaggagtgaaaatgtttttaaagcaagaaaaattatttgtggaattatcaggtgaggatattaaggaatttagtgaagataatggttttagtttatttgatgctactcttcagaagcgtgtgacttccgatgagaggagcaatttccaggaagcatgtaataatattttagattcctatgagatgtttaatttgcagtcaaaagctgtgaaaagaaaaactactgcagaaaacgtaaacacacagagttctagggattcagaagctaccagaaaaaatacaaatgatgcatttttgtacatttatgaatcaggtggtccaggccatagcaaaatgacagagccatctttacaaaacaaagacagctcttgctcagaatcaaagatgttagaacaagagacaattgtagcatcagaagctggagaaaatgagaaacataaaaaatctttcctggaacatagctctttagaaaatccgtgtggaaccagtttagaaatgtttttaagcccttttcagacaccatgtcactttgaggagagtgggcaggatctagaaatatggaaagaaagtactactgttaatggcatggctgccaacatcttgaaaaataatagaattcagaatcaaccaaagagatttaaagatgctactgaagtgggatgccagcctctgccttttgcaacaacattatggggagtacatagtgctcagacagagaaagagaaaaaaaaagaatctagcaattgtggaagaagaaatgtttttagttatgggcgagttaaattatgttccactggctttataactcatgtagtacaaaatgaaaaaactaaatcaactgaaacagaacattcatttaaaaattatgttagacctggtcccacacgtgcccaagaaacatttggaaatagaacacgtcattcagttgaaactccagacatcaaagatttagccagcactttaagtaaagaatctggtcaattgcccaacaaaaaaaattgcagaacgaatataagttatgggctagagaatgaacctacagcaacttatacaatgttttctgcttttcaggaaggtagcaaaaaatcacaaacagattgcatattatctgatacatccccctctttcccctggtatagacacgtttccaatgatagtaggaaaacagataaattaattggtttctccaaaccaatcgtccgtaagaagctaagcttgagttcacagctaggatctttagagaagtttaagaggcaatatgggaaggttgaaaatcctctggatacagaagtagaggaaagtaatggagtcactaccaatctcagtcttcaagttgaacctgacattctgctgaaggacaagaaccgcttagagaactctgatgtttgtaaaatcactactatggagcatagtgattcagatagtagttgtcaaccagcaagccacatccttaactcagagaagtttccattctccaaggatgaagattgtttagaacaacagatgcctagtttgagagaaagtcctatgaccctgaaggagttatctctctttaatagaaaacctttggaccttgagaagtcatctgaatcactagcctctaaattatccagactgaagggttccgaaagagaaactcaaacaatggggatgatgagtcgttttaatgaacttccaaattcagattccagtaggaaagacagcaagttgtgcagtgtgttaacacaagatttttgtatgttatttaacaacaagcatgaaaaaacagagaatggtgtcatcccaacatcagattctgccacacaggataattcctttaataaaaatagtaaaacacattctaacagcaatacaacagagaactgtgtgatatcagaaactcctttggtattgccctataataattctaaagttaccggtaaagattcagatgttcttatcagagcctcagaacaacagataggaagtcttgactctcccagtggaatgttaatgaatccggtagaagatgccacaggtgaccaaaatggaatttgttttcagagtgaggaatctaaagcaagagcttgttctgaaactgaagagtcaaacacgtgttgttcagattggcagcggcatttcgatgtagccctgggaagaatggtttatgtcaacaaaatgactggactcagcacattcattgccccaactgaggacattcaggctgcttgtactaaagacctgacaactgtggctgtggatgttgtacttgagaatgggtctcagtacaggtgtcaaccttttagaagcgaccttgttcttcctttccttccgagagctcgagcagagaggactgtgatgagacaggataacagagatactgtggatgatactgttagtagcgaatcgcttcagtctttgttctcagaatgggacaatccagtatttgcccgttatccagaggttgctgttgatgtaagcagtggccaggctgagagcttagcagttaaaattcacaacatcttgtatccctatcgtttcaccaaaggaatgattcattcaatgcaggttctccagcaagtagataacaagtttattgcctgtttgatgagcactaagactgaagagaatggcgaggcaggtgggaacctgctcgtgctggtggatcagcacgctgcccatgagcgtatacgtctggagcagcttatcattgattcctacgagaagcaacaggcacaaggctctggtcggaaaaaattactgtcttctactctaattcctccgctagagataacagtgacagaggaacaaaggagactcttatggtgttaccacaaaaatctggaagatctgggccttgaatttgtatttccagacactagtgattctctggtccttgtgggaaaagtaccactatgttttgtggaaagagaagccaatgaacttcggagaggaagatctactgtgaccaagagtattgtggaggaatttatccgagaacaactggagctactccagaccaccggaggcatccaagggacattgccactgactgtccagaaggtgttggcatcccaagcctgccatggggccattaagtttaatgatggcctgagcttacaggaaagttgccgccttattgaagctctgtcctcatgccagctgccattccagtgtgctcacgggagaccttctatgctgccgttagctgacatagaccacttggaacaggaaaaacagattaaacccaacctcactaaacttcgcaaaatggcccaggcctggcgtctctttggaaaagcagagtgtgatacaaggcagagcctgcagcaatccatgcctccctgtgagccaccatgagaacagaatcactggtctaaaaggaacaaagggatgttcactgtatgcctctgagcagagagcagcagcagcaggtaccagcacggccctgac

SEQ ID NO: 156054 - DNA, 3307 bp, Homo sapiens
  Payload ID: 10640
  Gene Symbol: MSH2
  Gene Name: mutS homolog 2
  Uniprot ID: P43246
  ENST ID: ENST00000233146
  CDS Start-End: 224-3028
gcagtagctaaagtcaccagcgtgcgcgggaagctgggccgcgtctgcttatgattggttgccgcggcagactcccacccaccgaaacgcagccctggaagctgattgggtgtggtcgccgtggccggacgccgctcgggggacgtgggaggggaggcgggaaacagcttagtgggtgtggggtcgcgcattttcttcaaccaggaggtgaggaggtttcgacatggcggtgcagccgaaggagacgctgcagttggagagcgcggccgaggtcggcttcgtgcgcttctttcagggcatgccggagaagccgaccaccacagtgcgccttttcgaccggggcgacttctatacggcgcacggcgaggacgcgctgctggccgcccgggaggtgttcaagacccagggggtgatcaagtacatggggccggcaggagcaaagaatctgcagagtgttgtgcttagtaaaatgaattttgaatcttttgtaaaagatcttcttctggttcgtcagtatagagttgaagtttataagaatagagctggaaataaggcatccaaggagaatgattggtatttggcatataaggcttctcctggcaatctctctcagtttgaagacattctctttggtaacaatgatatgtcagcttccattggtgttgtgggtgttaaaatgtccgcagttgatggccagagacaggttggagttgggtatgtggattccatacagaggaaactaggactgtgtgaattccctgataatgatcagttctccaatcttgaggctctcctcatccagattggaccaaaggaatgtgttttacccggaggagagactgctggagacatggggaaactgagacagataattcaaagaggaggaattctgatcacagaaagaaaaaaagctgacttttccacaaaagacatttatcaggacctcaaccggttgttgaaaggcaaaaagggagagcagatgaatagtgctgtattgccagaaatggagaatcaggttgcagtttcatcactgtctgcggtaatcaagtttttagaactcttatcagatgattccaactttggacagtttgaactgactacttttgacttcagccagtatatgaaattggatattgcagcagtcagagcccttaacctttttcagggttctgttgaagataccactggctctcagtctctggctgccttgctgaataagtgtaaaacccctcaaggacaaagacttgttaaccagtggattaagcagcctctcatggataagaacagaatagaggagagattgaatttagtggaagcttttgtagaagatgcagaattgaggcagactttacaagaagatttacttcgtcgattcccagatcttaaccgacttgccaagaagtttcaaagacaagcagcaaacttacaagattgttaccgactctatcagggtataaatcaactacctaatgttatacaggctctggaaaaacatgaaggaaaacaccagaaattattgttggcagtttttgtgactcctcttactgatcttcgttctgacttctccaagtttcaggaaatgatagaaacaactttagatatggatcaggtggaaaaccatgaattccttgtaaaaccttcatttgatcctaatctcagtgaattaagagaaataatgaatgacttggaaaagaagatgcagtcaacattaataagtgcagccagagatcttggcttggaccctggcaaacagattaaactggattccagtgcacagtttggatattactttcgtgtaacctgtaaggaagaaaaagtccttcgtaacaataaaaactttagtactgtagatatccagaagaatggtgttaaatttaccaacagcaaattgacttctttaaatgaagagtataccaaaaataaaacagaatatgaagaagcccaggatgccattgttaaagaaattgtcaatatttcttcaggctatgtagaaccaatgcagacactcaatgatgtgttagctcagctagatgctgttgtcagctttgctcacgtgtcaaatggagcacctgttccatatgtacgaccagccattttggagaaaggacaaggaagaattatattaaaagcatccaggcatgcttgtgttgaagttcaagatgaaattgcatttattcctaatgacgtatactttgaaaaagataaacagatgttccacatcattactggccccaatatgggaggtaaatcaacatatattcgacaaactggggtgatagtactcatggcccaaattgggtgttttgtgccatgtgagtcagcagaagtgtccattgtggactgcatcttagcccgagtaggggctggtgacagtcaattgaaaggagtctccacgttcatggctgaaatgttggaaactgcttctatcctcaggtctgcaaccaaagattcattaataatcatagatgaattgggaagaggaacttctacctacgatggatttgggttagcatgggctatatcagaatacattgcaacaaagattggtgctttttgcatgtttgcaacccattttcatgaacttactgccttggccaatcagataccaactgttaataatctacatgtcacagcactcaccactgaagagaccttaactatgctttatcaggtgaagaaaggtgtctgtgatcaaagttttgggattcatgttgcagagcttgctaatttccctaagcatgtaatagagtgtgctaaacagaaagccctggaacttgaggagtttcagtatattggagaatcgcaaggatatgatatcatggaaccagcagcaaagaagtgctatctggaaagagagcaaggtgaaaaaattattcaggagttcctgtccaaggtgaaacaaatgccctttactgaaatgtcagaagaaaacatcacaataaagttaaaacagctaaaagctgaagtaatagcaaagaataatagctttgtaaatgaaatcatttcacgaataaaagttactacgtgaaaaatcccagtaatggaatgaaggtaatattgataagctattgtctgtaatagttttatattgttttatattaaccctttttccatagtgttaactgtcagtgcccatgggctatcaacttaataagatatttagtaatattttactttgaggacattttcaaagatttttattttgaaaaatgagagctgtaactgaggactgtttgcaattgacataggcaataataagtgatgtgctgaattttataaataaaatcatgtagtttgtggaatttga

SEQ ID NO: 156055 - DNA, 3628 bp, Homo sapiens
  Payload ID: 10640
  Gene Symbol: MSH2
  Gene Name: mutS homolog 2
  ENST ID: ENST00000406134
  CDS Start-End: 63-2828
aaacagcttagtgggtgtggggtcgcgcattttcttcaaccaggaggtgaggaggtttcgacatggcggtgcagccgaaggagacgctgcagttggagagcgcggccgaggtcggcttcgtgcgcttctttcagggcatgccggagaagccgaccaccacagtgcgccttttcgaccggggcgacttctatacggcgcacggcgaggacgcgctgctggccgcccgggaggtgttcaagacccagggggtgatcaagtacatggggccggcaggagcaaagaatctgcagagtgttgtgcttagtaaaatgaattttgaatcttttgtaaaagatcttcttctggttcgtcagtatagagttgaagtttataagaatagagctggaaataaggcatccaaggagaatgattggtatttggcatataaggcttctcctggcaatctctctcagtttgaagacattctctttggtaacaatgatatgtcagcttccattggtgttgtgggtgttaaaatgtccgcagttgatggccagagacaggttggagttgggtatgtggattccatacagaggaaactaggactgtgtgaattccctgataatgatcagttctccaatcttgaggctctcctcatccagattggaccaaaggaatgtgttttacccggaggagagactgctggagacatggggaaactgagacagataattcaaagaggaggaattctgatcacagaaagaaaaaaagctgacttttccacaaaagacatttatcaggacctcaaccggttgttgaaaggcaaaaagggagagcagatgaatagtgctgtattgccagaaatggagaatcaggttgcagtttcatcactgtctgcggtaatcaagtttttagaactcttatcagatgattccaactttggacagtttgaactgactacttttgacttcagccagtatatgaaattggatattgcagcagtcagagcccttaacctttttcagggttctgttgaagataccactggctctcagtctctggctgccttgctgaataagtgtaaaacccctcaaggacaaagacttgttaaccagtggattaagcagcctctcatggataagaacagaatagaggagagattgaatttagtggaagcttttgtagaagatgcagaattgaggcagactttacaagaagatttacttcgtcgattcccagatcttaaccgacttgccaagaagtttcaaagacaagcagcaaacttacaagattgttaccgactctatcagggtataaatcaactacctaatgttatacaggctctggaaaaacatgaaggaaaacaccagaaattattgttggcagtttttgtgactcctcttactgatcttcgttctgacttctccaagtttcaggaaatgatagaaacaactttagatatggatcaggtggaaaaccatgaattccttgtaaaaccttcatttgatcctaatctcagtgaattaagagaaataatgaatgacttggaaaagaagatgcagtcaacattaataagtgcagccagagatcttggcttggaccctggcaaacagattaaactggattccagtgcacagtttggatattactttcgtgtaacctgtaaggaagaaaaagtccttcgtaacaataaaaactttagtactgtagatatccagaagaatggtgttaaatttaccaacagcaaattgacttctttaaatgaagagtataccaaaaataaaacagaatatgaagaagcccaggatgccattgttaaagaaattgtcaatatttcttcaggctatgtagaaccaatgcagacactcaatgatgtgttagctcagctagatgctgttgtcagctttgctcacgtgtcaaatggagcacctgttccatatgtacgaccagccattttggagaaaggacaaggaagaattatattaaaagcatccaggcatgcttgtgttgaagttcaagatgaaattgcatttattcctaatgacgtatactttgaaaaagataaacagatgttccacatcattactggccccaatatgggaggtaaatcaacatatattcgacaaactggggtgatagtactcatggcccaaattgggtgttttgtgccatgtgagtcagcagaagtgtccattgtggactgcatcttagcccgagtaggggctggtgacagtcaattgaaaggagtctccacgttcatggctgaaatgttggaaactgcttctatcctcaggtctgcaaccaaagattcattaataatcatagatgaattgggaagaggaacttctacctacgatggatttgggttagcatgggctatatcagaatacattgcaacaaagattggtgctttttgcatgtttgcaacccattttcatgaacttactgccttggccaatcagataccaactgttaataatctacatgtcacagcactcaccactgaagagaccttaactatgctttatcaggtgaagaaaggtgtctgtgatcaaagttttgggattcatgttgcagagcttgctaatttccctaagcatgtaatagagtgtgctaaacagaaagccctggaacttgaggagtttcagtatattggagaatcgcaaggatatgatatcatggaaccagcagcaaagaagtgctatctggaaagagagaacctcagagtgacagagccaaaagaccagtgcctcattttgctgacatggaaaaggaaacttcgtgggggaaagagatctgcttgcagtcggccagagagacagaaccagggcagtggtgagctctcatgacctggtgtctgttgccttctggttaagtttttcatttgtaattctacaaacatcccttctgtaaacatttccctcaaaatggagcaggaagctctcaaaaatggaccagaaaggggtcaggaatataactttctctgcccagattccaggacttacagtgagaaagcgccttctgggaacttcacaatggctaaagtgtgctaatgggatgatgtgcccttgtacacccactgcctctgaactctgctctgcattgctgagcaaactacatttcccagaactccttgttggattccttccaaacaggtttaccactgggagagcctgttggttggggagggcaggaagagggaggaaagaggaagggactcacttcctgtttccagctgaagtctaaatcaatccactatcaacaggtagctatcatactaccctcattgtcacccctcagaggtcccactgcagctgcataatgtcccctcagtggcctgaacatgagatgaacaacactcttcttgggagtaccagccttgcttggttcatggccacttttcctgattatcttgcagctatattaggtcatgtgacaaagttctggccagtggcaagggaacacaagtgataggtacagatagaagtgtctgatactacatagattatgcttgcactcactcttaagagagagacatgaacttttaccaacggaagccagtattattttgaacctctgttagagtggcttgaatctgtatcctaacttgtatccctaatgtgtgacccatgaaaattagccaggcagc

SEQ ID NO: 156056 - DNA, 560 bp, Homo sapiens
  Payload ID: 10640
  Gene Symbol: MSH2
  Gene Name: mutS homolog 2
  ENST ID: ENST00000454849
  CDS Start-End: 140-560
aagctgattgggtgtggtcgccgtggccggacgccgctcgggggacgtgggaggggaggcgggaaacagcttagtgggtgtggggtcgcgcattttcttcaaccaggaggtgttcaagacccagggggtgatcaagtacatggggccggcaggagcaaagaatctgcagagtgttgtgcttagtaaaatgaattttgaatcttttgtaaaagatcttcttctggttcgtcagtatagagttgaagtttataagaatagagctggaaataaggcatccaaggagaatgattggtatttggcatataaggcttctcctggcaatctctctcagtttgaagacattctctttggtaacaatgatatgtcagcttccattggtgttgtgggtgttaaaatgtccgcagttgatggccagagacaggttggagttgggtatgtggattccatacagaggaaactaggactgtgtgaattccctgataatgatcagttctccaatcttgaggctctcctcatccagattggaccaaaggaatgtgttttacccggaggagagactg

SEQ ID NO: 156057 - DNA, 3024 bp, Homo sapiens
  Payload ID: 10640
  Gene Symbol: MSH2
  Gene Name: mutS homolog 2
  Uniprot ID: P43246
  ENST ID: ENST00000543555
  CDS Start-End: 140-2746
aagctgattgggtgtggtcgccgtggccggacgccgctcgggggacgtgggaggggaggcgggaaacagcttagtgggtgtggggtcgcgcattttcttcaaccaggaggtgttcaagacccagggggtgatcaagtacatggggccggcaggagcaaagaatctgcagagtgttgtgcttagtaaaatgaattttgaatcttttgtaaaagatcttcttctggttcgtcagtatagagttgaagtttataagaatagagctggaaataaggcatccaaggagaatgattggtatttggcatataaggcttctcctggcaatctctctcagtttgaagacattctctttggtaacaatgatatgtcagcttccattggtgttgtgggtgttaaaatgtccgcagttgatggccagagacaggttggagttgggtatgtggattccatacagaggaaactaggactgtgtgaattccctgataatgatcagttctccaatcttgaggctctcctcatccagattggaccaaaggaatgtgttttacccggaggagagactgctggagacatggggaaactgagacagataattcaaagaggaggaattctgatcacagaaagaaaaaaagctgacttttccacaaaagacatttatcaggacctcaaccggttgttgaaaggcaaaaagggagagcagatgaatagtgctgtattgccagaaatggagaatcaggttgcagtttcatcactgtctgcggtaatcaagtttttagaactcttatcagatgattccaactttggacagtttgaactgactacttttgacttcagccagtatatgaaattggatattgcagcagtcagagcccttaacctttttcagggttctgttgaagataccactggctctcagtctctggctgccttgctgaataagtgtaaaacccctcaaggacaaagacttgttaaccagtggattaagcagcctctcatggataagaacagaatagaggagagattgaatttagtggaagcttttgtagaagatgcagaattgaggcagactttacaagaagatttacttcgtcgattcccagatcttaaccgacttgccaagaagtttcaaagacaagcagcaaacttacaagattgttaccgactctatcagggtataaatcaactacctaatgttatacaggctctggaaaaacatgaaggaaaacaccagaaattattgttggcagtttttgtgactcctcttactgatcttcgttctgacttctccaagtttcaggaaatgatagaaacaactttagatatggatcaggtggaaaaccatgaattccttgtaaaaccttcatttgatcctaatctcagtgaattaagagaaataatgaatgacttggaaaagaagatgcagtcaacattaataagtgcagccagagatcttggcttggaccctggcaaacagattaaactggattccagtgcacagtttggatattactttcgtgtaacctgtaaggaagaaaaagtccttcgtaacaataaaaactttagtactgtagatatccagaagaatggtgttaaatttaccaacagcaaattgacttctttaaatgaagagtataccaaaaataaaacagaatatgaagaagcccaggatgccattgttaaagaaattgtcaatatttcttcaggctatgtagaaccaatgcagacactcaatgatgtgttagctcagctagatgctgttgtcagctttgctcacgtgtcaaatggagcacctgttccatatgtacgaccagccattttggagaaaggacaaggaagaattatattaaaagcatccaggcatgcttgtgttgaagttcaagatgaaattgcatttattcctaatgacgtatactttgaaaaagataaacagatgttccacatcattactggccccaatatgggaggtaaatcaacatatattcgacaaactggggtgatagtactcatggcccaaattgggtgttttgtgccatgtgagtcagcagaagtgtccattgtggactgcatcttagcccgagtaggggctggtgacagtcaattgaaaggagtctccacgttcatggctgaaatgttggaaactgcttctatcctcaggtctgcaaccaaagattcattaataatcatagatgaattgggaagaggaacttctacctacgatggatttgggttagcatgggctatatcagaatacattgcaacaaagattggtgctttttgcatgtttgcaacccattttcatgaacttactgccttggccaatcagataccaactgttaataatctacatgtcacagcactcaccactgaagagaccttaactatgctttatcaggtgaagaaaggtgtctgtgatcaaagttttgggattcatgttgcagagcttgctaatttccctaagcatgtaatagagtgtgctaaacagaaagccctggaacttgaggagtttcagtatattggagaatcgcaaggatatgatatcatggaaccagcagcaaagaagtgctatctggaaagagagcaaggtgaaaaaattattcaggagttcctgtccaaggtgaaacaaatgccctttactgaaatgtcagaagaaaacatcacaataaagttaaaacagctaaaagctgaagtaatagcaaagaataatagctttgtaaatgaaatcatttcacgaataaaagttactacgtgaaaaatcccagtaatggaatgaaggtaatattgataagctattgtctgtaatagttttatattgttttatattaaccctttttccatagtgttaactgtcagtgcccatgggctatcaacttaataagatatttagtaatattttactttgaggacattttcaaagatttttattttgaaaaatgagagctgtaactgaggactgtttgcaattgacataggcaataataagtgatgtgctgaattttataaataaaatcatgtagtttgtggaatttg

SEQ ID NO: 156058 - DNA, 2917 bp, Homo sapiens
  Payload ID: 10640
  Gene Symbol: MSH2
  Gene Name: mutS homolog 2
  ENST ID: ENST00000617938
  CDS Start-End: 41-1066
tcgcgcattttcttcaaccaggaggtgaggaggtttcgacatggcggtgcagccgaaggagacgctgcagttggagagcgcggccgaggtcggcttcgtgcgcttctttcagggcatgccggagaagccgaccaccacagtgcgccttttcgaccggggcgacttctatacggcgcacggcgaggacgcgctgctggccgcccgggaggtgttcaagacccagggggtgatcaagtacatggggccggcaggagcaaagaatctgcagagtgttgtgcttagtaaaatgaattttgaatcttttgtaaaagatcttcttctggttcgtcagtatagagttgaagtttataagaatagagctggaaataaggcatccaaggagaatgattggtatttggcatataaggcttctcctggcaatctctctcagtttgaagacattctctttggtaacaatgatatgtcagcttccattggtgttgtgggtgttaaaatgtccgcagttgatggccagagacaggttggagttgggtatgtggattccatacagaggaaactaggactgtgtgaattccctgataatgatcagttctccaatcttgaggctctcctcatccagattggaccaaaggaatgtgttttacccggaggagagactgctggagacatggggaaactgagacagataattcaaagaggaggaattctgatcacagaaagaaaaaaagctgacttttccacaaaagacatttatcaggacctcaaccggttgttgaaaggcaaaaagggagagcagatgaatagtgctgtattgccagaaatggagaatcaggttgcagtttcatcactgtctgcggtaatcaagtttttagaactcttatcagatgattccaactttggacagtttgaactgactacttttgacttcagccagtatatgaaattggatattgcagcagtcagagcccttaacctttttcagggttctgttgaagataccactggctctcagtctctggctgccttgctgaataagtgtaaaacccctcaaggacaaacttgttaaccagtggattaagcagcctctcatggataagaacagaatagaggagagattgaatttagtggaagcttttgtagaagatgcagaattgaggcagactttacaagaagatttacttcgtcgattcccagatcttaaccgacttgccaagaagtttcaaagacaagcagcaaacttacaagattgttaccgactctatcagggtataaatcaactacctaatgttatacaggctctggaaaaacatgaaggaaaacaccagaaattattgttggcagtttttgtgactcctcttactgatcttcgttctgacttctccaagtttcaggaaatgatagaaacaactttagatatggatcaggtggaaaaccatgaattccttgtaaaaccttcatttgatcctaatctcagtgaattaagagaaataatgaatgacttggaaaagaagatgcagtcaacattaataagtgcagccagagatcttggcttggaccctggcaaacagattaaactggattccagtgcacagtttggatattactttcgtgtaacctgtaaggaagaaaaagtccttcgtaacaataaaaactttagtactgtagatatccagaagaatggtgttaaatttaccaacagcaaattgacttctttaaatgaagagtataccaaaaataaaacagaatatgaagaagcccaggatgccattgttaaagaaattgtcaatatttcttcaggctatgtagaaccaatgcagacactcaatgatgtgttagctcagctagatgctgttgtcagctttgctcacgtgtcaaatggagcacctgttccatatgtacgaccagccattttggagaaaggacaaggaagaattatattaaaagcatccaggcatgcttgtgttgaagttcaagatgaaattgcatttattcctaatgacgtatactttgaaaaagataaacagatgttccacatcattactggccccaatatgggaggtaaatcaacatatattcgacaaactggggtgatagtactcatggcccaaattgggtgttttgtgccatgtgagtcagcagaagtgtccattgtggactgcatcttagcccgagtaggggctggtgacagtcaattgaaaggagtctccacgttcatggctgaaatgttggaaactgcttctatcctcaggtctgcaaccaaagattcattaataatcatagatgaattgggaagaggaacttctacctacgatggatttgggttagcatgggctatatcagaatacattgcaacaaagattggtgctttttgcatgtttgcaacccattttcatgaacttactgccttggccaatcagataccaactgttaataatctacatgtcacagcactcaccactgaagagaccttaactatgctttatcaggtgaagaaaggtgtctgtgatcaaagttttgggattcatgttgcagagcttgctaatttccctaagcatgtaatagagtgtgctaaacagaaagccctggaacttgaggagtttcagtatattggagaatcgcaaggatatgatatcatggaaccagcagcaaagaagtgctatctggaaagagagcaaggtgaaaaaattattcaggagttcctgtccaaggtgaaacaaatgccctttactgaaatgtcagaagaaaacatcacaataaagttaaaacagctaaaagctgaagtaatagcaaagaataatagctttgtaaatgaaatcatttcacgaataaaagttactacgtgaaaaatcccagtaatggaatgaaggtaatattgataagctattgtctgtaatagttttatattgttttatattaa

SEQ ID NO: 156059 - DNA, 2918 bp, Homo sapiens
  Payload ID: 10640
  Gene Symbol: MSH2
  Gene Name: mutS homolog 2
  ENST ID: ENST00000621359
  CDS Start-End: 41-2473
tcgcgcattttcttcaaccaggaggtgaggaggtttcgacatggcggtgcagccgaaggagacgctgcagttggagagcgcggccgaggtcggcttcgtgcgcttctttcagggcatgccggagaagccgaccaccacagtgcgccttttcgaccggggcgacttctatacggcgcacggcgaggacgcgctgctggccgcccgggaggtgttcaagacccagggggtgatcaagtacatggggccggcaggagcaaagaatctgcagagtgttgtgcttagtaaaatgaattttgaatcttttgtaaaagatcttcttctggttcgtcagtatagagttgaagtttataagaatagagctggaaataaggcatccaaggagaatgattggtatttggcatataaggcttctcctggcaatctctctcagtttgaagacattctctttggtaacaatgatatgtcagcttccattggtgttgtgggtgttaaaatgtccgcagttgatggccagagacaggttggagttgggtatgtggattccatacagaggaaactaggactgtgtgaattccctgataatgatcagttctccaatcttgaggctctcctcatccagattggaccaaaggaatgtgttttacccggaggagagactgctggagacatggggaaactgagacagataattcaaagaggaggaattctgatcacagaaagaaaaaaagctgacttttccacaaaagacatttatcaggacctcaaccggttgttgaaaggcaaaaagggagagcagatgaatagtgctgtattgccagaaatggagaatcaggttgcagtttcatcactgtctgcggtaatcaagtttttagaactcttatcagatgattccaactttggacagtttgaactgactacttttgacttcagccagtatatgaaattggatattgcagcagtcagagcccttaacctttttcagggttctgttgaagataccactggctctcagtctctggctgccttgctgaataagtgtaaaacccctcaaggacaaagacttgttaaccagtggattaagcagcctctcatggataagaacagaatagaggagagattgaatttagtggaagcttttgtagaagatgcagaattgaggcagactttacaagaagatttacttcgtcgattcccagatcttaaccgacttgccaagaagtttcaaagacaagcagcaaacttacaagattgttaccgactctatcagggtataaatcaactacctaatgttatacaggctctggaaaaacatgaaggaaaacaccagaaattattgttggcagtttttgtgactcctcttactgatcttcgttctgacttctccaagtttcaggaaatgatagaaacaactttagatatggatcaggtggaaaaccatgaattccttgtaaaaccttcatttgatcctaatctcagtgaattaagagaaataatgaatgacttggaaaagaagatgcagtcaacattaataagtgcagccagagatcttggcttggaccctggcaaacagattaaactggattccagtgcacagtttggatattactttcgtgtaacctgtaaggaagaaaaagtccttcgtaacaataaaaactttagtactgtagatatccagaagaatggtgttaaatttaccaacagcaaattgacttctttaaatgaagagtataccaaaaataaaacagaatatgaagaagcccaggatgccattgttaaagaaattgtcaatatttcttcaggctatgtagaaccaatgcagacactcaatgatgtgttagctcagctagatgctgttgtcagctttgctcacgtgtcaaatggagcacctgttccatatgtacgaccagccattttggagaaaggacaaggaagaattatattaaaagcatccaggcatgcttgtgttgaagttcaagatgaaattgcatttattcctaatgacgtatactttgaaaaagataaacagatgttccacatcattactggccccaatatgggaggtaaatcaacatatattcgacaaactggggtgatagtactcatggcccaaattgggtgttttgtgccatgtgagtcagcagaagtgtccattgtggactgcatcttagcccgagtaggggctggtgacagtcaattgaaaggagtctccacgttcatggctgaaatgttggaaactgcttctatcctcaggtctgcaaccaaagattcattaataatcatagatgaattgggaagaggaacttctacctacgatggatttgggttagcatgggctatatcagaatacattgcaacaaagattggtgctttttgcatgtttgcaaccattttcatgaacttactgccttggccaatcagataccaactgttaataatctacatgtcacagcactcaccactgaagagaccttaactatgctttatcaggtgaagaaaggtgtctgtgatcaaagttttgggattcatgttgcagagcttgctaatttccctaagcatgtaatagagtgtgctaaacagaaagccctggaacttgaggagtttcagtatattggagaatcgcaaggatatgatatcatggaaccagcagcaaagaagtgctatctggaaagagagcaaggtgaaaaaattattcaggagttcctgtccaaggtgaaacaaatgccctttactgaaatgtcagaagaaaacatcacaataaagttaaaacagctaaaagctgaagtaatagcaaagaataatagctttgtaaatgaaatcatttcacgaataaaagttactacgtgaaaaatcccagtaatggaatgaaggtaatattgataagctattgtctgtaatagttttatattgttttatattaa

SEQ ID NO: 156060 - DNA, 2918 bp, Homo sapiens
  Payload ID: 10640
  Gene Symbol: MSH2
  Gene Name: mutS homolog 2
  ENST ID: ENST00000617333
  CDS Start-End: 41-1273
tcgcgcattttcttcaaccaggaggtgaggaggtttcgacatggcggtgcagccgaaggagacgctgcagttggagagcgcggccgaggtcggcttcgtgcgcttctttcagggcatgccggagaagccgaccaccacagtgcgccttttcgaccggggcgacttctatacggcgcacggcgaggacgcgctgctggccgcccgggaggtgttcaagacccagggggtgatcaagtacatggggccggcaggagcaaagaatctgcagagtgttgtgcttagtaaaatgaattttgaatcttttgtaaaagatcttcttctggttcgtcagtatagagttgaagtttataagaatagagctggaaataaggcatccaaggagaatgattggtatttggcatataaggcttctcctggcaatctctctcagtttgaagacattctctttggtaacaatgatatgtcagcttccattggtgttgtgggtgttaaaatgtccgcagttgatggccagagacaggttggagttgggtatgtggattccatacagaggaaactaggactgtgtgaattccctgataatgatcagttctccaatcttgaggctctcctcatccagattggaccaaaggaatgtgttttacccggaggagagactgctggagacatggggaaactgagacagataattcaaagaggaggaattctgatcacagaaagaaaaaaagctgacttttccacaaaagacatttatcaggacctcaaccggttgttgaaaggcaaaaagggagagcagatgaatagtgctgtattgccagaaatggagaatcaggttgcagtttcatcactgtctgcggtaatcaagtttttagaactcttatcagatgattccaactttggacagtttgaactgactacttttgacttcagccagtatatgaaattggatattgcagcagtcagagcccttaacctttttcagggttctgttgaagataccactggctctcagtctctggctgccttgctgaataagtgtaaaacccctcaaggacaaagacttgttaaccagtggattaagcagcctctcatggataagaacagaatagaggagagattgaatttagtggaagcttttgtagaagatgcagaattgaggcagactttacaagaagattacttcgtcgattcccagatcttaaccgacttgccaagaagtttcaaagacaagcagcaaacttacaagattgttaccgactctatcagggtataaatcaactacctaatgttatacaggctctggaaaaacatgaaggaaaacaccagaaattattgttggcagtttttgtgactcctcttactgatcttcgttctgacttctccaagtttcaggaaatgatagaaacaactttagatatggatcaggtggaaaaccatgaattccttgtaaaaccttcatttgatcctaatctcagtgaattaagagaaataatgaatgacttggaaaagaagatgcagtcaacattaataagtgcagccagagatcttggcttggaccctggcaaacagattaaactggattccagtgcacagtttggatattactttcgtgtaacctgtaaggaagaaaaagtccttcgtaacaataaaaactttagtactgtagatatccagaagaatggtgttaaatttaccaacagcaaattgacttctttaaatgaagagtataccaaaaataaaacagaatatgaagaagcccaggatgccattgttaaagaaattgtcaatatttcttcaggctatgtagaaccaatgcagacactcaatgatgtgttagctcagctagatgctgttgtcagctttgctcacgtgtcaaatggagcacctgttccatatgtacgaccagccattttggagaaaggacaaggaagaattatattaaaagcatccaggcatgcttgtgttgaagttcaagatgaaattgcatttattcctaatgacgtatactttgaaaaagataaacagatgttccacatcattactggccccaatatgggaggtaaatcaacatatattcgacaaactggggtgatagtactcatggcccaaattgggtgttttgtgccatgtgagtcagcagaagtgtccattgtggactgcatcttagcccgagtaggggctggtgacagtcaattgaaaggagtctccacgttcatggctgaaatgttggaaactgcttctatcctcaggtctgcaaccaaagattcattaataatcatagatgaattgggaagaggaacttctacctacgatggatttgggttagcatgggctatatcagaatacattgcaacaaagattggtgctttttgcatgtttgcaacccattttcatgaacttactgccttggccaatcagataccaactgttaataatctacatgtcacagcactcaccactgaagagaccttaactatgctttatcaggtgaagaaaggtgtctgtgatcaaagttttgggattcatgttgcagagcttgctaatttccctaagcatgtaatagagtgtgctaaacagaaagccctggaacttgaggagtttcagtatattggagaatcgcaaggatatgatatcatggaaccagcagcaaagaagtgctatctggaaagagagcaaggtgaaaaaattattcaggagttcctgtccaaggtgaaacaaatgccctttactgaaatgtcagaagaaaacatcacaataaagttaaaacagctaaaagctgaagtaatagcaaagaataatagctttgtaaatgaaatcatttcacgaataaaagttactacgtgaaaaatcccagtaatggaatgaaggtaatattgataagctattgtctgtaatagttttatattgttttatattaa

SEQ ID NO: 156061 - DNA, 2917 bp, Homo sapiens
  Payload ID: 10640
  Gene Symbol: MSH2
  Gene Name: mutS homolog 2
  ENST ID: ENST00000610696
  CDS Start-End: 41-1642
tcgcgcattttcttcaaccaggaggtgaggaggtttcgacatggcggtgcagccgaaggagacgctgcagttggagagcgcggccgaggtcggcttcgtgcgcttctttcagggcatgccggagaagccgaccaccacagtgcgccttttcgaccggggcgacttctatacggcgcacggcgaggacgcgctgctggccgcccgggaggtgttcaagacccagggggtgatcaagtacatggggccggcaggagcaaagaatctgcagagtgttgtgcttagtaaaatgaattttgaatcttttgtaaaagatcttcttctggttcgtcagtatagagttgaagtttataagaatagagctggaaataaggcatccaaggagaatgattggtatttggcatataaggcttctcctggcaatctctctcagtttgaagacattctctttggtaacaatgatatgtcagcttccattggtgttgtgggtgttaaaatgtccgcagttgatggccagagacaggttggagttgggtatgtggattccatacagaggaaactaggactgtgtgaattccctgataatgatcagttctccaatcttgaggctctcctcatccagattggaccaaaggaatgtgttttacccggaggagagactgctggagacatggggaaactgagacagataattcaaagaggaggaattctgatcacagaaagaaaaaaagctgacttttccacaaaagacatttatcaggacctcaaccggttgttgaaaggcaaaaagggagagcagatgaatagtgctgtattgccagaaatggagaatcaggttgcagtttcatcactgtctgcggtaatcaagtttttagaactcttatcagatgattccaactttggacagtttgaactgactacttttgacttcagccagtatatgaaattggatattgcagcagtcagagcccttaacctttttcagggttctgttgaagataccactggctctcagtctctggctgccttgctgaataagtgtaaaacccctcaaggacaaagacttgttaaccagtggattaagcagcctctcatggataagaacagaatagaggagagattgaatttagtggaagcttttgtagaagatgcagaattgaggcagactttacaagaagatttacttcgtcgattcccagatcttaaccgacttgccaagaagtttcaaagacaagcagcaaacttacaagattgttaccgactctatcagggtataaatcaactacctaatgttatacaggctctggaaaaacatgaaggaaaacaccagaaattattgttggcagtttttgtgactcctcttactgatcttcgttctgacttctccaagtttcaggaaatgatagaaacaactttagatatggatcaggtggaaaaccatgaattccttgtaaaaccttcatttgatcctaatctcagtgaattaagagaaataatgaatgacttggaaaagaagatgcagtcaacattaataagtgcagccagagatcttggcttggaccctggcaaacagattaaactggattccagtgcacagtttggatattactttcgtgtaacctgtaaggaaaaaagtccttcgtaacaataaaaactttagtactgtagatatccagaagaatggtgttaaatttaccaacagcaaattgacttctttaaatgaagagtataccaaaaataaaacagaatatgaagaagcccaggatgccattgttaaagaaattgtcaatatttcttcaggctatgtagaaccaatgcagacactcaatgatgtgttagctcagctagatgctgttgtcagctttgctcacgtgtcaaatggagcacctgttccatatgtacgaccagccattttggagaaaggacaaggaagaattatattaaaagcatccaggcatgcttgtgttgaagttcaagatgaaattgcatttattcctaatgacgtatactttgaaaaagataaacagatgttccacatcattactggccccaatatgggaggtaaatcaacatatattcgacaaactggggtgatagtactcatggcccaaattgggtgttttgtgccatgtgagtcagcagaagtgtccattgtggactgcatcttagcccgagtaggggctggtgacagtcaattgaaaggagtctccacgttcatggctgaaatgttggaaactgcttctatcctcaggtctgcaaccaaagattcattaataatcatagatgaattgggaagaggaacttctacctacgatggatttgggttagcatgggctatatcagaatacattgcaacaaagattggtgctttttgcatgtttgcaacccattttcatgaacttactgccttggccaatcagataccaactgttaataatctacatgtcacagcactcaccactgaagagaccttaactatgctttatcaggtgaagaaaggtgtctgtgatcaaagttttgggattcatgttgcagagcttgctaatttccctaagcatgtaatagagtgtgctaaacagaaagccctggaacttgaggagtttcagtatattggagaatcgcaaggatatgatatcatggaaccagcagcaaagaagtgctatctggaaagagagcaaggtgaaaaaattattcaggagttcctgtccaaggtgaaacaaatgccctttactgaaatgtcagaagaaaacatcacaataaagttaaaacagctaaaagctgaagtaatagcaaagaataatagctttgtaaatgaaatcatttcacgaataaaagttactacgtgaaaaatcccagtaatggaatgaaggtaatattgataagctattgtctgtaatagttttatattgttttatattaa

SEQ ID NO: 156062 - DNA, 2917 bp, Homo sapiens
  Payload ID: 10640
  Gene Symbol: MSH2
  Gene Name: mutS homolog 2
  ENST ID: ENST00000613514
  CDS Start-End: 41-1498
tcgcgcattttcttcaaccaggaggtgaggaggtttcgacatggcggtgcagccgaaggagacgctgcagttggagagcgcggccgaggtcggcttcgtgcgcttctttcagggcatgccggagaagccgaccaccacagtgcgccttttcgaccggggcgacttctatacggcgcacggcgaggacgcgctgctggccgcccgggaggtgttcaagacccagggggtgatcaagtacatggggccggcaggagcaaagaatctgcagagtgttgtgcttagtaaaatgaattttgaatcttttgtaaaagatcttcttctggttcgtcagtatagagttgaagtttataagaatagagctggaaataaggcatccaaggagaatgattggtatttggcatataaggcttctcctggcaatctctctcagtttgaagacattctctttggtaacaatgatatgtcagcttccattggtgttgtgggtgttaaaatgtccgcagttgatggccagagacaggttggagttgggtatgtggattccatacagaggaaactaggactgtgtgaattccctgataatgatcagttctccaatcttgaggctctcctcatccagattggaccaaaggaatgtgttttacccggaggagagactgctggagacatggggaaactgagacagataattcaaagaggaggaattctgatcacagaaagaaaaaaagctgacttttccacaaaagacatttatcaggacctcaaccggttgttgaaaggcaaaaagggagagcagatgaatagtgctgtattgccagaaatggagaatcaggttgcagtttcatcactgtctgcggtaatcaagtttttagaactcttatcagatgattccaactttggacagtttgaactgactacttttgacttcagccagtatatgaaattggatattgcagcagtcagagcccttaacctttttcagggttctgttgaagataccactggctctcagtctctggctgccttgctgaataagtgtaaaacccctcaaggacaaagacttgttaaccagtggattaagcagcctctcatggataagaacagaatagaggagagattgaatttagtggaagcttttgtagaagatgcagaattgaggcagactttacaagaagatttacttcgtcgattcccagatcttaaccgacttgccaagaagtttcaaagacaagcagcaaacttacaagattgttaccgactctatcagggtataaatcaactacctaatgttatacaggctctggaaaaacatgaaggaaaacaccagaaattattgttggcagtttttgtgactcctcttactgatcttcgttctgacttctccaagtttcaggaaatgatagaaacaactttagatatggatcaggtggaaaaccatgaattccttgtaaaaccttcatttgatcctaatctcagtgaattaagaaataatgaatgacttggaaaagaagatgcagtcaacattaataagtgcagccagagatcttggcttggaccctggcaaacagattaaactggattccagtgcacagtttggatattactttcgtgtaacctgtaaggaagaaaaagtccttcgtaacaataaaaactttagtactgtagatatccagaagaatggtgttaaatttaccaacagcaaattgacttctttaaatgaagagtataccaaaaataaaacagaatatgaagaagcccaggatgccattgttaaagaaattgtcaatatttcttcaggctatgtagaaccaatgcagacactcaatgatgtgttagctcagctagatgctgttgtcagctttgctcacgtgtcaaatggagcacctgttccatatgtacgaccagccattttggagaaaggacaaggaagaattatattaaaagcatccaggcatgcttgtgttgaagttcaagatgaaattgcatttattcctaatgacgtatactttgaaaaagataaacagatgttccacatcattactggccccaatatgggaggtaaatcaacatatattcgacaaactggggtgatagtactcatggcccaaattgggtgttttgtgccatgtgagtcagcagaagtgtccattgtggactgcatcttagcccgagtaggggctggtgacagtcaattgaaaggagtctccacgttcatggctgaaatgttggaaactgcttctatcctcaggtctgcaaccaaagattcattaataatcatagatgaattgggaagaggaacttctacctacgatggatttgggttagcatgggctatatcagaatacattgcaacaaagattggtgctttttgcatgtttgcaacccattttcatgaacttactgccttggccaatcagataccaactgttaataatctacatgtcacagcactcaccactgaagagaccttaactatgctttatcaggtgaagaaaggtgtctgtgatcaaagttttgggattcatgttgcagagcttgctaatttccctaagcatgtaatagagtgtgctaaacagaaagccctggaacttgaggagtttcagtatattggagaatcgcaaggatatgatatcatggaaccagcagcaaagaagtgctatctggaaagagagcaaggtgaaaaaattattcaggagttcctgtccaaggtgaaacaaatgccctttactgaaatgtcagaagaaaacatcacaataaagttaaaacagctaaaagctgaagtaatagcaaagaataatagctttgtaaatgaaatcatttcacgaataaaagttactacgtgaaaaatcccagtaatggaatgaaggtaatattgataagctattgtctgtaatagttttatattgttttatattaa

SEQ ID NO: 156063 - DNA, 4092 bp, Homo sapiens
  Payload ID: 10641
  Gene Symbol: MSH3
  Gene Name: mutS homolog 3
  Uniprot ID: P20585
  ENST ID: ENST00000265081
  CDS Start-End: 81-3494
ccgcagacgcctgggaactgcggccgcgggctcgcgctcctcgccaggccctgccgccgggctgccatccttgccctgccatgtctcgccggaagcctgcgtcgggcggcctcgctgcctccagctcagcccctgcgaggcaagcggttttgagccgattcttccagtctacgggaagcctgaaatccacctcctcctccacaggtgcagccgaccaggtggaccctggcgctgcagcggctgcagcggccgcagcggccgcagcgcccccagcgcccccagctcccgccttcccgccccagctgccgccgcacatagctacagaaattgacagaagaaagaagagaccattggaaaatgatgggcctgttaaaaagaaagtaaagaaagtccaacaaaaggaaggaggaagtgatctgggaatgtctggcaactctgagccaaagaaatgtctgaggaccaggaatgtttcaaagtctctggaaaaattgaaagaattctgctgcgattctgcccttcctcaaagtagagtccagacagaatctctgcaggagagatttgcagttctgccaaaatgtactgattttgatgatatcagtcttctacacgcaaagaatgcagtttcttctgaagattcgaaacgtcaaattaatcaaaaggacacaacactttttgatctcagtcagtttggatcatcaaatacaagtcatgaaaatttacagaaaactgcttccaaatcagctaacaaacggtccaaaagcatctatacgccgctagaattacaatacatagaaatgaagcagcagcacaaagatgcagttttgtgtgtggaatgtggatataagtatagattctttggggaagatgcagagattgcagcccgagagctcaatatttattgccatttagatcacaactttatgacagcaagtatacctactcacagactgtttgttcatgtacgccgcctggtggcaaaaggatataaggtgggagttgtgaagcaaactgaaactgcagcattaaaggccattggagacaacagaagttcactcttttcccggaaattgactgccctttatacaaaatctacacttattggagaagatgtgaatcccctaatcaagctggatgatgctgtaaatgttgatgagataatgactgatacttctaccagctatcttctgtgcatctctgaaaataaggaaaatgttagggacaaaaaaaagggcaacatttttattggcattgtgggagtgcagcctgccacaggcgaggttgtgtttgatagtttccaggactctgcttctcgttcagagctagaaacccggatgtcaagcctgcagccagtagagctgctgcttccttcggccttgtccgagcaaacagaggcgctcatccacagagccacatctgttagtgtgcaggatgacagaattcgagtcgaaaggatggataacatttattttgaatacagccatgctttccaggcagttacagagttttatgcaaaagatacagttgacatcaaaggttctcaaattatttctggcattgttaacttagagaagcctgtgatttgctctttggctgccatcataaaatacctcaaagaattcaacttggaaaagatgctctccaaacctgagaattttaaacagctatcaagtaaaatggaatttatgacaattaatggaacaacattaaggaatctggaaatcctacagaatcagactgatatgaaaaccaaaggaagtttgctgtgggttttagaccacactaaaacttcatttgggagacggaagttaaagaagtgggtgacccagccactccttaaattaagggaaataaatgcccggcttgatgctgtatcggaagttctccattcagaatctagtgtgtttggtcagatagaaaatcatctacgtaaattgcccgacatagagaggggactctgtagcatttatcacaaaaaatgttctacccaagagttcttcttgattgtcaaaactttatatcacctaaagtcagaatttcaagcaataatacctgctgttaattcccacattcagtcagacttgctccggaccgttattttagaaattcctgaactcctcagtccagtggagcattacttaaagatactcaatgaacaagctgccaaagttggggataaaactgaattatttaaagacctttctgacttccctttaataaaaaagaggaaggatgaaattcaaggtgttattgacgagatccgaatgcatttgcaagaaatacgaaaaatactaaaaaatccttctgcacaatatgtgacagtatcaggacaggagtttatgatagaaataaagaactctgctgtatcttgtataccaactgattgggtaaaggttggaagcacaaaagctgtgagccgctttcactctccttttattgtagaaaattacagacatctgaatcagctccgggagcagctagtccttgactgcagtgctgaatggcttgattttctagagaaattcagtgaacattatcactccttgtgtaaagcagtgcatcacctagcaactgttgactgcattttctccctggccaaggtcgctaagcaaggagattactgcagaccaactgtacaagaagaaagaaaaattgtaataaaaaatggaaggcaccctgtgattgatgtgttgctgggagaacaggatcaatatgtcccaaataatacagatttatcagaggactcagagagagtaatgataattaccggaccaaacatgggtggaaagagctcctacataaaacaagttgcattgattaccatcatggctcagattggctcctatgttcctgcagaagaagcgacaattgggattgtggatggcattttcacaaggatgggtgctgcagacaatatatataaaggacagagtacatttatggaagaactgactgacacagcagaaataatcagaaaagcaacatcacagtccttggttatcttggatgaactaggaagagggacgagcactcatgatggaattgccattgcctatgctacacttgagtatttcatcagagatgtgaaatccttaaccctgtttgtcacccattatccgccagtttgtgaactagaaaaaaattactcacaccaggtggggaattaccacatgggattcttggtcagtgaggatgaaagcaaactggatccaggcgcagcagaacaagtccctgattttgtcaccttcctttaccaaataactagaggaattgcagcaaggagttatggattaaatgtggctaaactagcagatgttcctggagaaattttgaagaaagcagctcacaagtcaaaagagctggaaggattaataaatacgaaaagaaagagactcaagtattttgcaaagttatggacgatgcataatgcacaagacctgcagaagtggacagaggagttcaacatggaagaaacacagacttctcttcttcattaaaatgaagactacatttgtgaacaaaaaatggagaattaaaaataccaactgtacaaaataactctccagtaacagcctatctttgtgtgacatgtgagcataaaattatgaccatggtatattcctattggaaacagagaggtttttctgaagacagtctttttcaagtttctgtcttcctaacttttctacgtataaacactcttgaatagacttccactttgtaattagaaaattttatggacagtaagtccagtaaagccttaagtggcagaatataattcccaagcttttggagggtgatataaaaatttacttgatatttttatttgtttcagttcagataattggcaactgggtgaatctggcaggaatctatccattgaactaaaataattttattatgcaaccagtttatccaccaagaacataagaattttttataagtagaaagaattggccaggcatggtggctcatgcctgtaatcccagcactttgggaggccaaggtaggcagatcacctgaggtcaggagttcaagaccagcctggccaacatggcaaaaccccatctttactaaaaatataaagtacatctc

SEQ ID NO: 156064 - DNA, 3266 bp, Homo sapiens
  Payload ID: 10642
  Gene Symbol: MSH4
  Gene Name: mutS homolog 4
  Uniprot ID: O15457
  ENST ID: ENST00000263187
  CDS Start-End: 105-2915
gcgcagttctcccgcccgtttcagcggcgcagcttctgtagttgggctactggaggggtcgctcagaaacctcatacttctcgggtcagggaaggtttgggaggatgctgaggcctgagatctcatcaacctcgccttctgccccggcggtttccccgtcgtcgggagaaacccgctcacctcagggtccccgctacaatttcggactccaggagactccacagagccgcccttcggtccaggtggtctctgcatccacctgtcctggcacgtcaggagctgcgggcgaccggagcagcagcagcagcagccttccctgccccgcgccaaactcccggccagctcaaggttcatactttggaaacaaaagagcttatgcagaaaacacagttgcatcaaattttacttttggtgcaagctcatcttctgcacgagatactaattatcctcaaacacttaaaactccattgtctactggaaatcctcagagatcaggttataagagctggacaccacaagtgggatattcagcttcatcctcatctgcgatttctgcacactccccatcagttattgtagctgttgtagaagggagaggacttgccagaggtgaaataggaatggcaagtattgatttaaaaaacccccaaattatactatcccagtttgcagacaacacaacatatgcaaaggtgatcactaaacttaaaattttatcacctttggaaataataatgtcaaatactgcttgtgctgtggggaattccaccaagttgttcactctgatcacagaaaatttcaagaatgttaatttcactactatccaaaggaaatacttcaatgaaacaaaaggattagagtacattgaacagttatgcatagcagaattcagcactgtcctaatggaggttcagtccaagtattactgccttgcagctgttgcagctttgttaaaatatgttgaatttattcaaaattcagtttatgcaccaaaatcactgaagatttgtttccagggtagtgaacagacagccatgatagattcatcatcagcccaaaaccttgaattgttaattaataatcaagactataggaataatcacactctctttggtgttctaaattatactaagactcctggagggagtagacgacttcgttctaatatattagagcctctagttgatattgaaaccattaacatgagattagattgtgttcaagaactacttcaagatgaggaactattttttggacttcaatcagttatatcaagatttcttgatacagagcagcttctttctgttttagtccaaattccaaagcaagacacggtcaatgctgctgaatcaaagataacaaatttaatatacttaaaacataccttggaacttgtggatcctttaaagattgctatgaagaactgtaacacacctttattaagagcttactatggttccttggaagacaagaggtttggaatcatacttgaaaagattaaaacagtaattaatgatgatgcaagatacatgaaaggatgcctaaacatgaggactcagaagtgctatgcagtgaggtctaacataaatgaatttcttgacatagcaagaagaacatacacagagattgtagatgacatagcaggaatgatatcacaacttggagaaaaatatagtctacctttaaggacaagttttagctctgctcgaggatttttcatccagatgactacagattgtatagccctacctagtgatcaacttccttcagaatttattaagatttctaaagtgaaaaattcttacagctttacatcagcagatttaattaaaatgaatgaaagatgccaagaatctttgagagaaatctatcacatgacttatatgatagtgtgcaaactgcttagtgagatttatgaacatattcattgcttatataaactatctgacactgtgtcaatgctggatatgctactgtcatttgctcatgcctgcactctttctgactatgttcgaccagaatttactgatactttagcaatcaaacagggatggcatcctattcttgaaaaaatatctgcggaaaaacctattgccaacaatacctatgttacagaagggagtaattttttgatcataactggaccaaacatgagtggaaaatccacatatttaaaacagattgctctttgtcagattatggcccagattggatcatatgttccagcagaatattcttcctttagaattgctaaacagatttttacaagaattagtactgatgatgatatcgaaacaaattcatcaacatttatgaaagaaatgaaagagatagcatatattctacataatgctaatgacaaatcgctcatattaattgatgaacttggcagaggtactaatacggaagaaggtattggcatttgttatgctgtttgtgaatatctactgagcttaaaggcatttacactgtttgctacacatttcctggaactatgccatattgatgccctgtatcctaatgtagaaaacatgcattttgaagttcaacatgtaaagaatacctcaagaaataaagaagcaattttgtatacctacaaactttctaagggactcacagaagagaaaaattatggattaaaagctgcagaggtgtcatcacttccaccatcaattgtcttggatgccaaggaaatcacaactcaaattacgagacaaattttgcaaaaccaaaggagtacccctgagatggaaagacagagagctgtgtaccatctagccactaggcttgttcaaactgctcgaaactctcaattggatccagacagtttacgaatatatttaagtaacctcaagaagaagtacaaagaagattttcccaggactgaacaagttccagaaaagactgaagaataatcacaattctaatgtaataatatatcttaattcaaggaacctagaatttatttttctccttagagataaggaaaataacatttgccaaatttcatattttaattgaaaattacattatattaacatcacaattgtcatctatatattctatatgaaaaatatttattataacttaacaaatgagaactacttaaaggaatggtttttatgttaggagaaaatacaatacaccacttttttctcacaaaaattcacattattaagacctaagttcatttatacttacaagttatagtttaaaatattattgtaaataccctagtttaataaacacctttctttttaggtctg

SEQ ID NO: 156065 - DNA, 2708 bp, Homo sapiens
  Payload ID: 10643
  Gene Symbol: MSH5
  Gene Name: mutS homolog 5
  Uniprot ID: O43196
  ENST ID: ENST00000375703
  CDS Start-End: 56-2563
gcggtcggtcagcggggcgttctcccacctgtagcgactcagagcctccaagctcatggcctccttaggagcgaacccaaggaggacaccgcagggaccgagacctggggcggcctcctccggcttccccagcccggccccagtgccgggccccagggaggccgaggaggaggaagtcgaggaggaggaggagctggccgagatccatctgtgtgtgctgtggaattcaggatacttgggcattgcctactatgatactagtgactccactatccacttcatgccagatgccccagaccacgagagcctcaagcttctccagagagttctggatgagatcaatccccagtctgttgttacgagtgccaaacaggatgagaatatgactcgatttctgggaaagcttgcctcccaggagcacagagagcctaaaagacctgaaatcatatttttgccaagtgtggattttggtctggagataagcaaacaacgcctcctttctggaaactactccttcatcccagacgccatgactgccactgagaaaatcctcttcctctcttccattattccctttgactgcctcctcacagttcgagcacttggagggctgctgaagttcctgggtcgaagaagaatcggggttgaactggaagactataatgtcagcgtccccatcctgggctttaagaaatttatgttgactcatctggtgaacatagatcaagacacttacagtgttctacagatttttaagagtgagtctcacccctcagtgtacaaagtggccagtggactgaaggaggggctcagcctctttggaatcctcaacagatgccactgtaagtggggagagaagctgctcaggctatggttcacacgtccgactcatgacctgggggagctcagttctcgtctggacgtcattcagttttttctgctgccccagaatctggacatggctcagatgctgcatcggctcctgggtcacatcaagaacgtgcctctgattctgaaacgcatgaagttgtcccacaccaaggtcagcgactggcaggttctctacaagactgtgtacagtgccctgggcctgagggatgcctgccgctccctgccgcagtccatccagctctttcgggacattgcccaagagttctctgatgacctgcaccatatcgccagcctcattgggaaagtagtggactttgagggcagccttgctgaaaatcgcttcacagtcctccccaacatagatcctgaaattgatgagaaaaagcgaagactgatgggacttcccagtttccttactgaggttgcccgcaaggagctggagaatctggactcccgtattccttcatgcagtgtcatctacatccctctgattggcttccttctttctattccccgcctgccttccatggtagaggccagtgactttgagattaatggactggacttcatgtttctctcagaggagaagctgcactatcgtagtgcccgaaccaaggagctggatgcattgctgggggacctgcactgcgagatccgggaccaggagacgctgctgatgtaccagctacagtgccaggtgctggcacgagcagctgtcttaacccgagtattggaccttgcctcccgcctggacgtcctgctggctcttgccagtgctgcccgggactatggctactcaaggccgcgttactccccacaagtccttggggtacgaatccagaatggcagacatcctctgatggaactctgtgcccgaacctttgtgcccaactccacagaatgtggtggggacaaagggagggtcaaagtcatcactggacccaactcatcagggaagagcatatacctcaaacaggtaggcttgatcacattcatggccctggtaggcagctttgtgccagcagaggaggccgaaattggggcagtagacgccatcttcacacgaattcatagctgcgaatccatctcccttggcctctccaccttcatgatcgacctcaaccagcaggtggcgaaagcagtgaacaatgccactgcacagtcgctggtccttattgatgaatttggaaagggaaccaacacggtggatgggctcgcgcttctggccgctgtgctccgacactggctggcacgtggacccacatgcccccacatctttgtggccaccaactttctgagccttgttcagctacaactgctgccacaagggcccctggtgcagtatttgaccatggagacctgtgaggatggcaacgatcttgtcttcttctatcaggtttgcgaaggtgttgcgaaggccagccatgcctcccacacagctgcccaggctgggcttcctgacaagcttgtggctcgtggcaaggaggtctcagacttgatccgcagtggaaaacccatcaagcctgtcaaggatttgctaaagaagaaccaaatggaaaattgccagacattagtggataagtttatgaaactggatttggaagatcctaacctggacttgaacgttttcatgagccaggaagtgctgcctgctgccaccagcatcctctgagagtccttccagtgtcctccccagcctcctgagactccggtgggctgccatgccctctttgtttccttatctccctcagacgcagagtttttagtttctctagaaattttgtttcatattaggaataaagtttattttgaagaaa

SEQ ID NO: 156066 - DNA, 2669 bp, Homo sapiens
  Payload ID: 10643
  Gene Symbol: MSH5
  Gene Name: mutS homolog 5
  Uniprot ID: O43196
  ENST ID: ENST00000375740
  CDS Start-End: 56-2524
gcggtcggtcagcggggcgttctcccacctgtagcgactcagagcctccaagctcatggcctccttaggagcgaacccaaggaggacaccgcagggaccgagacctggggcggcctcctccggcttccccagcccggccccagtgccgggccccagggaggccgaggaggaggaagtcgaggaggaggaggagctggccgagatccatctgtgtgtgctgtggaattcaggatacttgggcattgcctactatgatactagtgactccactatccacttcatgccagatgccccagaccacgagagcctcaagcttctccagagagttctggatgagatcaatccccagtctgttgttacgagtgccaaacaggatgagaatatgactcgatttctgggaaagcttgcctcccaggagcacagagagcctaaaagacctgaaatcatatttttgccaagtgtggattttggtctggagataagcaaacaacgcctcctttctggaaactactccttcatcccagacgccatgactgccactgagaaaatcctcttcctctcttccattattccctttgactgcctcctcacacccccaggagatttaagatttaccccgattccactgctgatcccctcccaggttcgagcacttggagggctgctgaagttcctgggtcgaagaagaatcggggttgaactggaagactataatgtcagcgtccccatcctgggctttaagaaatttatgttgactcatctggtgaacatagatcaagacacttacagtgttctacagatttttaagagtgagtctcacccctcagtgtacaaagtggccagtggactgaaggaggggctcagcctctttggaatcctcaacagatgccactgtaagtggggagagaagctgctcaggctatggttcacacgtccgactcatgacctgggggagctcagttctcgtctggacgtcattcagttttttctgctgccccagaatctggacatggctcagatgctgcatcggctcctgggtcacatcaagaacgtgcctctgattctgaaacgcatgaagttgtcccacaccaaggtcagcgactggcaggttctctacaagactgtgtacagtgccctgggcctgagggatgcctgccgctccctgccgcagtccatccagctctttcgggacattgcccaagagttctctgatgacctgcaccatatcgccagcctcattgggaaagtagtggactttgagggcagccttgctgaaaatcgcttcacagtcctccccaacatagatcctgaaattgatgagaaaaagcgaagactgatgggacttcccagtttccttactgaggttgcccgcaaggagctggagaatctggactcccgtattccttcatgcagtgtcatctacatccctctgattggcttccttctttctattccccgcctgccttccatggtagaggccagtgactttgagattaatggactggacttcatgtttctctcagaggagaagctgcactatcgtagtgcccgaaccaaggagctggatgcattgctgggggacctgcactgcgagatccgggaccaggagacgctgctgatgtaccagctacagtgccaggtgctggcacgagcagctgtcttaacccgagtattggaccttgcctcccgcctggacgtcctgctggctcttgccagtgctgcccgggactatggctactcaaggccgcgttactccccacaagtccttggggtacgaatccagaatggcagacatcctctgatggaactctgtgcccgaacctttgtgcccaactccacagaatgtggtggggacaaagggagggtcaaagtcatcactggacccaactcatcagggaagagcatatacctcaaacaggtaggcttgatcacattcatggccctggtaggcagctttgtgccagcagaggaggccgaaattggggcagtagacgccatcttcacacgaattcatagctgcgaatccatctcccttggcctctccaccttcatgatcgacctcaaccagcaggtggcgaaagcagtgaacaatgccactgcacagtcgctggtccttattgatgaatttggaaagggaaccaacacggtggatgggctcgcgcttctggccgctgtgctccgacactggctggcacgtggacccacatgcccccacatctttgtggccaccaactttctgagccttgttcagctacaactgctgccacaagggcccctggtgcagtatttgaccatggagacctgtgaggatggcaacgatcttgtcttcttctatcaggtctcagacttgatccgcagtggaaaacccatcaagcctgtcaaggatttgctaaagaagaaccaaatggaaaattgccagacattagtggataagtttatgaaactggatttggaagatcctaacctggacttgaacgttttcatgagccaggaagtgctgcctgctgccaccagcatcctctgagagtccttccagtgtcctccccagcctcctgagactccggtgggctgccatgccctctttgtttccttatctccctcagacgcagagtttttagtttctctagaaattttgtttcatattaggaataaagtttattttgaagaaa

SEQ ID NO: 156067 - DNA, 2775 bp, Homo sapiens
  Payload ID: 10643
  Gene Symbol: MSH5
  Gene Name: mutS homolog 5
  Uniprot ID: O43196
  ENST ID: ENST00000375750
  CDS Start-End: 126-2630
ggttaggagggcggggcgcgtgcgcgcgcacctcgctcacgcgccggcgcgctccttttgcaggctcgtggcggtcggtcagcggggcgttctcccacctgtagcgactcagagcctccaagctcatggcctccttaggagcgaacccaaggaggacaccgcagggaccgagacctggggcggcctcctccggcttccccagcccggccccagtgccgggccccagggaggccgaggaggaggaagtcgaggaggaggaggagctggccgagatccatctgtgtgtgctgtggaattcaggatacttgggcattgcctactatgatactagtgactccactatccacttcatgccagatgccccagaccacgagagcctcaagcttctccagagagttctggatgagatcaatccccagtctgttgttacgagtgccaaacaggatgagaatatgactcgatttctgggaaagcttgcctcccaggagcacagagagcctaaaagacctgaaatcatatttttgccaagtgtggattttggtctggagataagcaaacaacgcctcctttctggaaactactccttcatcccagacgccatgactgccactgagaaaatcctcttcctctcttccattattccctttgactgcctcctcacagttcgagcacttggagggctgctgaagttcctgggtcgaagaagaatcggggttgaactggaagactataatgtcagcgtccccatcctgggctttaagaaatttatgttgactcatctggtgaacatagatcaagacacttacagtgttctacagatttttaagagtgagtctcacccctcagtgtacaaagtggccagtggactgaaggaggggctcagcctctttggaatcctcaacagatgccactgtaagtggggagagaagctgctcaggctatggttcacacgtccgactcatgacctgggggagctcagttctcgtctggacgtcattcagttttttctgctgccccagaatctggacatggctcagatgctgcatcggctcctgggtcacatcaagaacgtgcctctgattctgaaacgcatgaagttgtcccacaccaaggtcagcgactggcaggttctctacaagactgtgtacagtgccctgggcctgagggatgcctgccgctccctgccgcagtccatccagctctttcgggacattgcccaagagttctctgatgacctgcaccatatcgccagcctcattgggaaagtagtggactttgagggcagccttgctgaaaatcgcttcacagtcctccccaacatagatcctgaaattgatgagaaaaagcgaagactgatgggacttcccagtttccttactgaggttgcccgcaaggagctggagaatctggactcccgtattccttcatgcagtgtcatctacatccctctgattggcttccttctttctattccccgcctgccttccatggtagaggccagtgactttgagattaatggactggacttcatgtttctctcagaggagaagctgcactatcgtagtgcccgaaccaaggagctggatgcattgctgggggacctgcactgcgagatccgggaccaggagacgctgctgatgtaccagctacagtgccaggtgctggcacgagcagctgtcttaacccgagtattggaccttgcctcccgcctggacgtcctgctggctcttgccagtgctgcccgggactatggctactcaaggccgcgttactccccacaagtccttggggtacgaatccagaatggcagacatcctctgatggaactctgtgcccgaacctttgtgcccaactccacagaatgtggtggggacaaagggagggtcaaagtcatcactggacccaactcatcagggaagagcatatacctcaaacaggtaggcttgatcacattcatggccctggtaggcagctttgtgccagcagaggaggccgaaattggggcagtagacgccatcttcacacgaattcatagctgcgaatccatctcccttggcctctccaccttcatgatcgacctcaaccaggtggcgaaagcagtgaacaatgccactgcacagtcgctggtccttattgatgaatttggaaagggaaccaacacggtggatgggctcgcgcttctggccgctgtgctccgacactggctggcacgtggacccacatgcccccacatctttgtggccaccaactttctgagccttgttcagctacaactgctgccacaagggcccctggtgcagtatttgaccatggagacctgtgaggatggcaacgatcttgtcttcttctatcaggtttgcgaaggtgttgcgaaggccagccatgcctcccacacagctgcccaggctgggcttcctgacaagcttgtggctcgtggcaaggaggtctcagacttgatccgcagtggaaaacccatcaagcctgtcaaggatttgctaaagaagaaccaaatggaaaattgccagacattagtggataagtttatgaaactggatttggaagatcctaacctggacttgaacgttttcatgagccaggaagtgctgcctgctgccaccagcatcctctgagagtccttccagtgtcctccccagcctcctgagactccggtgggctgccatgccctctttgtttccttatctccctcagacgcagagtttttagtttctctagaaattttgtttcatattaggaataaagtttattttgaagaaa

SEQ ID NO: 156068 - DNA, 3094 bp, Homo sapiens
  Payload ID: 10643
  Gene Symbol: MSH5
  Gene Name: mutS homolog 5
  Uniprot ID: O43196
  ENST ID: ENST00000375755
  CDS Start-End: 287-2791
agcggttaggagggcggggcgcgtgcgcgcgcacctcgctcacgcgccggcgcgctccttttgcaggctcgtggcggtcggtcagcggggcgttctcccacctgtagcgactcaggttactgaaaaggcgggaaaacgctgcgatggcggcagctgggggaggaggaagataagcgcgtgaggctggggtcctggcgcgtggttggcagaggcagagacataagacgtgcacgactcgccccacagggccctcagaccccttccttccaaaggagcctccaagctcatggcctccttaggagcgaacccaaggaggacaccgcagggaccgagacctggggcggcctcctccggcttccccagcccggccccagtgccgggccccagggaggccgaggaggaggaagtcgaggaggaggaggagctggccgagatccatctgtgtgtgctgtggaattcaggatacttgggcattgcctactatgatactagtgactccactatccacttcatgccagatgccccagaccacgagagcctcaagcttctccagagagttctggatgagatcaatccccagtctgttgttacgagtgccaaacaggatgagaatatgactcgatttctgggaaagcttgcctcccaggagcacagagagcctaaaagacctgaaatcatatttttgccaagtgtggattttggtctggagataagcaaacaacgcctcctttctggaaactactccttcatcccagacgccatgactgccactgagaaaatcctcttcctctcttccattattccctttgactgcctcctcacagttcgagcacttggagggctgctgaagttcctgggtcgaagaagaatcggggttgaactggaagactataatgtcagcgtccccatcctgggctttaagaaatttatgttgactcatctggtgaacatagatcaagacacttacagtgttctacagatttttaagagtgagtctcacccctcagtgtacaaagtggccagtggactgaaggaggggctcagcctctttggaatcctcaacagatgccactgtaagtggggagagaagctgctcaggctatggttcacacgtccgactcatgacctgggggagctcagttctcgtctggacgtcattcagttttttctgctgccccagaatctggacatggctcagatgctgcatcggctcctgggtcacatcaagaacgtgcctctgattctgaaacgcatgaagttgtcccacaccaaggtcagcgactggcaggttctctacaagactgtgtacagtgccctgggcctgagggatgcctgccgctccctgccgcagtccatccagctctttcgggacattgcccaagagttctctgatgacctgcaccatatcgccagcctcattgggaaagtagtggactttgagggcagccttgctgaaaatcgcttcacagtcctccccaacatagatcctgaaattgatgagaaaaagcgaagactgatgggacttcccagtttccttactgaggttgcccgcaaggagctggagaatctggactcccgtattccttcatgcagtgtcatctacatccctctgattggcttccttctttctattccccgcctgccttccatggtagaggccagtgactttgagattaatggactggacttcatgtttctctcagaggagaagctgcactatcgtagtgcccgaaccaaggagctggatgcattgctgggggacctgcactgcgagatccgggaccaggagacgctgctgatgtaccagctacagtgccaggtgctggcacgagcagctgtcttaacccgagtattggaccttgcctcccgcctggacgtcctgctggctcttgccagtgctgcccgggactatggctactcaaggccgcgttactccccacaagtccttggggtacgaatccagaatggcagacatcctctgatggaactctgtgcccgaacctttgtgcccaactccacagaatgtggtggggacaaagggagggtcaaagtcatcactggacccaactcatcagggaagagcatatacctcaaacaggtaggcttgatcacattcatggccctggtaggcagctttgtgccagcagaggaggccgaaattggggcagtagacgccatcttcacacgaattcatagctgcgaatccatctcccttggcctctccaccttcatgatcgacctcaaccaggtggcgaaagcagtgaacaatgccactgcacagtcgctggtccttattgatgaatttggaaagggaaccaacacggtggatgggctcgcgcttctggccgctgtgctccgacactggctggcacgtggacccacatgcccccacatctttgtggccaccaactttctgagccttgttcagctacaactgctgccacaagggcccctggtgcagtatttgaccatggagacctgtgaggatggcaacgatcttgtcttcttctatcaggtttgcgaaggtgttgcgaaggccagccatgcctcccacacagctgcccaggctgggcttcctgacaagcttgtggctcgtggcaaggaggtctcagacttgatccgcagtggaaaacccatcaagcctgtcaaggatttgctaaagaagaaccaaatggaaaattgccagacattagtggataagtttatgaaactggatttggaagatcctaacctggacttgaacgttttcatgagccaggaagtgctgcctgctgccaccagcatcctctgagagtccttccagtgtcctccccagcctcctgagactccggtgggctgccatgccctctttgtttccttatctccctcagacgcagagtttttagtttctctagaaattttgtttcatattaggaataaagtttattttgaagaaagatattgtttctttagtctcaaaacaagagactaggaaagatccaaaacacagagcaggagtccacaggggaacctgccctgcctcagtaaaaatacagtgttgttgctgtaggaagactcccggattctaccccaggatacttcatgagaacgaacc

SEQ ID NO: 156069 - DNA, 2704 bp, Homo sapiens
  Payload ID: 10643
  Gene Symbol: MSH5
  Gene Name: mutS homolog 5
  ENST ID: ENST00000395853
  CDS Start-End: 1033-2559
gtgatagaaatcatatagaaatacagaaaattgcttgatatttcccccactcttttttttttgagacagagtcttgctctgtcaccaggctggagtgcagtggcacaatcttggctcactgcaacctccacctcccgggttgggtttcaagtgattctcctgcctcagcctcccgagtagctgggactataggcgtgtgccaccatgcctggctaatttttgtatttttagtagagacagggtttcaccatgatggccaggatggtcttgatctcttgacctcgtgatccacccgcctcggcctcccaaagtgctgggattacaggtgtgagccaccgcgcccggccctgatagccgatgaggtttttttgtcattgttcttcttgtatcattacagactcatggccttttatagctatatttctctttctcccgactctgtacaaactcctttgttttagagtttgcacaaccctctatcaaagcacctaccacctcacttttaaatcttctgcatgtatttctgtcttccttcctagactgtgagcacatctgggacagggaccatatctttttttgtttatttgttttgttttgagacagagtctcgctctgtcggccaggctggagtgcaatggcgtgatctggctataacctccacctcccgggttcaagagattctcctgcctcagcctcccaagtagctggaattacatgtgcatgccaccaagcccagttaatttttgtattttgagtagagacagggtttcaccatgttggtgaggctgatctcgaactcctgacctcaggtgatctacccacctcagcctcccaaagtgctgggattacaggcatgagccactgtgcctggccaggaccatatcttaattgtctttgtagtttcagtgtttggtacagtgcctctcactgtttctttttgcctttgagatcttccctctttgttactgtgatcttccctactggtctttgttcttctgagtctgtccctatcaccacctcaacccgagctggatgtggcctgtcctcctttttgtgtttctctcacagactgtgtacagtgccctgggcctgagggatgcctgccgctccctgccgcagtccatccagctctttcgggacattgcccaagagttctctgatgacctgcaccatatcgccagcctcattgggaaagtagtggactttgagggcagccttgctgaaaatcgcttcacagtcctccccaacatagatcctgaaattgatgagaaaaagcgaagactgatgggacttcccagtttccttactgaggttgcccgcaaggagctggagaatctggactcccgtattccttcatgcagtgtcatctacatccctctgattggcttccttctttctattccccgcctgccttccatggtagaggccagtgactttgagattaatggactggacttcatgtttctctcagaggagaagctgcactatcgtagtgcccgaaccaaggagctggatgcattgctgggggacctgcactgcgagatccgggaccaggagacgctgctgatgtaccagctacagtgccaggtgctggcacgagcagctgtcttaacccgagtattggaccttgcctcccgcctggacgtcctgctggctcttgccagtgctgcccgggactatggctactcaaggccgcgttactccccacaagtccttggggtacgaatccagaatggcagacatcctctgatggaactctgtgcccgaacctttgtgcccaactccacagaatgtggtggggacaaagggagggtcaaagtcatcactggacccaactcatcagggaagagcatatacctcaaacaggtaggcttgatcacattcatggccctggtaggcagctttgtgccagcagaggaggccgaaattggggcagtagacgccatcttcacacgaattcatagctgcgaatccatctcccttggcctctccaccttcatgatcgacctcaaccaggtggcgaaagcagtgaacaatgccactgcacagtcgctggtccttattgatgaatttggaaagggaaccaacacggtggatgggctcgcgcttctggccgctgtgctccgacactggctggcacgtggacccacatgcccccacatctttgtggccaccaactttctgagccttgttcagctacaactgctgccacaagggcccctggtgcagtatttgaccatggagacctgtgaggatggcaacgatcttgtcttcttctatcaggtttgcgaaggtgttgcgaaggccagccatgcctcccacacagctgcccaggctgggcttcctgacaagcttgtggctcgtggcaaggaggtctcagacttgatccgcagtggaaaacccatcaagcctgtcaaggatttgctaaagaagaaccaaatggaaaattgccagacattagtggataagtttatgaaactggatttggaagatcctaacctggacttgaacgttttcatgagccaggaagtgctgcctgctgccaccagcatcctctgagagtccttccagtgtcctccccagcctcctgagactccggtgggctgccatgccctctttgtttccttatctccctcagacgcagagtttttagtttctctagaaattttgtttcatattaggaataaagtttattttgaagaaa

SEQ ID NO: 156070 - DNA, 1639 bp, Homo sapiens
  Payload ID: 10643
  Gene Symbol: MSH5
  Gene Name: mutS homolog 5
  ENST ID: ENST00000442688
  CDS Start-End: 1-1494
actgtgtacagtgccctgggcctgagggatgcctgccgctccctgccgcagtccatccagctctttcgggacattgcccaagagttctctgatgacctgcaccatatcgccagcctcattgggaaagtagtggactttgagggcagccttgctgaaaatcgcttcacagtcctccccaacatagatcctgaaattgatgagaaaaagcgaagactgatgggacttcccagtttccttactgaggttgcccgcaaggagctggagaatctggactcccgtattccttcatgcagtgtcatctacatccctctgattggcttccttctttctattccccgcctgccttccatggtagaggccagtgactttgagattaatggactggacttcatgtttctctcagaggagaagctgcactatcgtagtgcccgaaccaaggagctggatgcattgctgggggacctgcactgcgagatccgggaccaggagacgctgctgatgtaccagctacagtgccaggtgctggcacgagcagctgtcttaacccgagtattggaccttgcctcccgcctggacgtcctgctggctcttgccagtgctgcccgggactatggctactcaaggccgcgttactccccacaagtccttggggtacgaatccagaatggcagacatcctctgatggaactctgtgcccgaacctttgtgcccaactccacagaatgtggtggggacaaagggagggtcaaagtcatcactggacccaactcatcagggaagagcatatacctcaaacaggtaggcttgatcacattcatggccctggtaggcagctttgtgccagcagaggaggccgaaattggggcagtagacgccatcttcacacgaattcatagctgcgaatccatctcccttggcctctccaccttcatgatcgacctcaaccagcaggtggcgaaagcagtgaacaatgccactgcacagtcgctggtccttattgatgaatttggaaagggaaccaacacggtggatgggctcgcgcttctggccgctgtgctccgacactggctggcacgtggacccacatgcccccacatctttgtggccaccaactttctgagccttgttcagctacaactgctgccacaagggcccctggtgcagtatttgaccatggagacctgtgaggatggcaacgatcttgtcttcttctatcaggtttgcgaaggtgttgcgaaggccagccatgcctcccacacagctgcccaggctgggcttcctgacaagcttgtggctcgtggcaaggaggtctcagacttgatccgcagtggaaaacccatcaagcctgtcaaggatttgctaaagaagaaccaaatggaaaattgccagacattagtggataagtttatgaaactggatttggaagatcctaacctggacttgaacgttttcatgagccaggaagtgctgcctgctgccaccagcatcctctgagagtccttccagtgtcctccccagcctcctgagactccggtgggctgccatgccctctttgtttccttatctccctcagacgcagagtttttagtttctctagaaattttgtttcatattaggaataaagtttattttgaagaaa

SEQ ID NO: 156071 - DNA, 616 bp, Homo sapiens
  Payload ID: 10643
  Gene Symbol: MSH5
  Gene Name: mutS homolog 5
  ENST ID: ENST00000452856
  CDS Start-End: 1-471
actgcacagtcgctggtccttattgatgaatttggaaagggaaccaacacggtggatgggctcgcgcttctggccgctgtgctccgacactggctggcacgtggacccacatgcccccacatctttgtggccaccaactttctgagccttgttcagctacaactgctgccacaagggcccctggtgcagtatttggtttgcgaaggtgttgcgaaggccagccatgcctcccacacagctgcccaggctgggcttcctgacaagcttgtggctcgtggcaaggaggtctcagacttgatccgcagtggaaaacccatcaagcctgtcaaggatttgctaaagaagaaccaaatggaaaattgccagacattagtggataagtttatgaaactggatttggaagatcctaacctggacttgaacgttttcatgagccaggaagtgctgcctgctgccaccagcatcctctgagagtccttccagtgtcctccccagcctcctgagactccggtgggctgccatgccctctttgtttccttatctccctcagacgcagagtttttagtttctctagaaattttgtttcatattaggaataaagtttattttgaagaaa

SEQ ID NO: 156072 - DNA, 2669 bp, Homo sapiens; identical to SEQ ID NO: 156066
  Payload ID: 10643
  Gene Symbol: MSH5
  Gene Name: mutS homolog 5
  Uniprot ID: O43196
  ENST ID: ENST00000448617
  CDS Start-End: 56-2524

SEQ ID NO: 156073 - DNA, 694 bp, Homo sapiens
  Payload ID: 10643
  Gene Symbol: MSH5
  Gene Name: mutS homolog 5
  ENST ID: ENST00000445611
  CDS Start-End: 113-694
gcgccggcgcgctccttttgcaggctcgtggcggtcggtcagcggggcgttctcccacctgtagcgactcagggccctcagaccccttccttccaaaggagcctccaagctcatggcctccttaggagcgaacccaaggaggacaccgcagggaccgagacctggggcggcctcctccggcttccccagcccggccccagtgccgggccccagggaggccgaggaggaggaagtcgaggaggaggaggagctggccgagatccatctgtgtgtgctgtggaattcaggatacttgggcattgcctactatgatactagtgactccactatccacttcatgccagatgccccagaccacgagagcctcaagcttctccagagagttctggatgagatcaatccccagtctgttgttacgagtgccaaacaggatgagaatatgactcgatttctgggaaagcttgcctcccaggagcacagagagcctaaaagacctgaaatcatatttttgccaagtgtggattttggtctggagataagcaaacaacgcctcctttctggaaactactccttcatcccagacgccatgactgccactgagaaaatcctcttcctctcttccattattccctttgactgcctcctcacagttcgagcacttggagggctgctgaagttcctgggtcgaagaaga

SEQ ID NO: 156074 - DNA, 2729 bp, Homo sapiens
  Payload ID: 10643
  Gene Symbol: MSH5
  Gene Name: mutS homolog 5
  Uniprot ID: O43196
  ENST ID: ENST00000427735
  CDS Start-End: 80-2584
gcgcgctccttttgcaggctcgtggcggtcggtcagcggggcgttctcccacctgtagcgactcagagcctccaagctcatggcctccttaggagcgaacccaaggaggacaccgcagggaccgagacctggggcggcctcctccggcttccccagcccggccccagtgccgggccccagggaggccgaggaggaggaagtcgaggaggaggaggagctggccgagatccatctgtgtgtgctgtggaattcaggatacttgggcattgcctactatgatactagtgactccactatccacttcatgccagatgccccagaccacgagagcctcaagcttctccagagagttctggatgagatcaatccccagtctgttgttacgagtgccaaacaggatgagaatatgactcgatttctgggaaagcttgcctcccaggagcacagagagcctaaaagacctgaaatcatatttttgccaagtgtggattttggtctggagataagcaaacaacgcctcctttctggaaactactccttcatcccagacgccatgactgccactgagaaaatcctcttcctctcttccattattccctttgactgcctcctcacagttcgagcacttggagggctgctgaagttcctgggtcgaagaagaatcggggttgaactggaagactataatgtcagcgtccccatcctgggctttaagaaatttatgttgactcatctggtgaacatagatcaagacacttacagtgttctacagatttttaagagtgagtctcacccctcagtgtacaaagtggccagtggactgaaggaggggctcagcctctttggaatcctcaacagatgccactgtaagtggggagagaagctgctcaggctatggttcacacgtccgactcatgacctgggggagctcagttctcgtctggacgtcattcagttttttctgctgccccagaatctggacatggctcagatgctgcatcggctcctgggtcacatcaagaacgtgcctctgattctgaaacgcatgaagttgtcccacaccaaggtcagcgactggcaggttctctacaagactgtgtacagtgccctgggcctgagggatgcctgccgctccctgccgcagtccatccagctctttcgggacattgcccaagagttctctgatgacctgcaccatatcgccagcctcattgggaaagtagtggactttgagggcagccttgctgaaaatcgcttcacagtcctccccaacatagatcctgaaattgatgagaaaaagcgaagactgatgggacttcccagtttccttactgaggttgcccgcaaggagctggagaatctggactcccgtattccttcatgcagtgtcatctacatccctctgattggcttccttctttctattccccgcctgccttccatggtagaggccagtgactttgagattaatggactggacttcatgtttctctcagaggagaagctgcactatcgtagtgcccgaaccaaggagctggatgcattgctgggggacctgcactgcgagatccgggaccaggagacgctgctgatgtaccagctacagtgccaggtgctggcacgagcagctgtcttaacccgagtattggaccttgcctcccgcctggacgtcctgctggctcttgccagtgctgcccgggactatggctactcaaggccgcgttactccccacaagtccttggggtacgaatccagaatggcagacatcctctgatggaactctgtgcccgaacctttgtgcccaactccacagaatgtggtggggacaaagggagggtcaaagtcatcactggacccaactcatcagggaagagcatatacctcaaacaggtaggcttgatcacattcatggccctggtaggcagctttgtgccagcagaggaggccgaaattggggcagtagacgccatcttcacacgaattcatagctgcgaatccatctcccttggcctctccaccttcatgatcgacctcaaccaggtggcgaaagcagtgaacaatgccactgcacagtcgctggtccttattgatgaatttggaaagggaaccaacacggtggatgggctcgcgcttctggccgctgtgctccgacactggctggcacgtggacccacatgcccccacatctttgtggccaccaactttctgagccttgttcagctacaactgctgccacaagggcccctggtgcagtatttgaccatggagacctgtgaggatggcaacgatcttgtcttcttctatcaggtttgcgaaggtgttgcgaaggccagccatgcctcccacacagctgcccaggctgggcttcctgacaagcttgtggctcgtggcaaggaggtctcagacttgatccgcagtggaaaacccatcaagcctgtcaaggatttgctaaagaagaaccaaatggaaaattgccagacattagtggataagtttatgaaactggatttggaagatcctaacctggacttgaacgttttcatgagccaggaagtgctgcctgctgccaccagcatcctctgagagtccttccagtgtcctccccagcctcctgagactccggtgggctgccatgccctctttgtttccttatctccctcagacgcagagtttttagtttctctagaaattttgtttcatattaggaataaagtttattttgaagaaa

SEQ ID NO: 156075 - DNA, 1549 bp, Homo sapiens
  Payload ID: 10643
  Gene Symbol: MSH5
  Gene Name: mutS homolog 5
  ENST ID: ENST00000444225
  CDS Start-End: 1-1404
actgtgtacagtgccctgggcctgagggatgcctgccgctccctgccgcagtccatccagctctttcgggacattgcccaagagttctctgatgacctgcaccatatcgccagcctcattgggaaagtagtggactttgagggcagccttgctgaaaatcgcttcacagtcctccccaacatagatcctgaaattgatgagaaaaagcgaagactgatgggacttcccagtttccttactgaggttgcccgcaaggagctggagaatctggactcccgtattccttcatgcagtgtcatctacatccctctgattggcttccttctttctattccccgcctgccttccatggtagaggccagtgactttgagattaatggactggacttcatgtttctctcagaggagaagctgcactatcgtagtgcccgaaccaaggagctggatgcattgctgggggacctgcactgcgagatccgggaccaggagacgctgctgatgtaccagctacagtgccaggtgctggcacgagcagctgtcttaacccgagtattggaccttgcctcccgcctggacgtcctgctggctcttgccagtgctgcccgggactatggctactcaaggccgcgttactccccacaagtccttggggtacgaatccagaatggcagacatcctctgatggaactctgtgcccgaacctttgtgcccaactccacagaatgtggtggggacaaagggagggtcaaagtcatcactggacccaactcatcagggaagagcatatacctcaaacaggtaggcttgatcacattcatggccctggtaggcagctttgtgccagcagaggaggccgaaattggggcagtagacgccatcttcacacgaattcatagctgcgaatccatctcccttggcctctccaccttcatgatcgacctcaaccagcaggtggcgaaagcagtgaacaatgccactgcacagtcgctggtccttattgatgaatttggaaagggaaccaacacggtggatgggctcgcgcttctggccgctgtgctccgacactggctggcacgtggacccacatgcccccacatctttgtggccaccaactttctgagccttgttcagctacaactgctgccacaagggcccctggtgcagtatttgaccatggagacctgtgaggatggcaacgatcttgtcttcttctatcaggtctcagacttgatccgcagtggaaaacccatcaagcctgtcaaggatttgctaaagaagaaccaaatggaaaattgccagacattagtggataagtttatgaaactggatttggaagatcctaacctggacttgaacgttttcatgagccaggaagtgctgcctgctgccaccagcatcctctgagagtccttccagtgtcctccccagcctcctgagactccggtgggctgccatgccctctttgtttccttatctccctcagacgcagagtttttagtttctctagaaattttgtttcatattaggaataaagtttattttgaagaaa

SEQ ID NO: 156076 - DNA, 575 bp, Homo sapiens
  Payload ID: 10643
  Gene Symbol: MSH5
  Gene Name: mutS homolog 5
  ENST ID: ENST00000446724
  CDS Start-End: 1-348
attgcccaagagttctctgatgacctgcaccatatcgccagcctcattgggaaagtagtggactttgagggcagccttgctgaaaatcgcttcacagtcctccccaacatagatcctgaaattgatgagaaaaagcgaagactgatgggacttcccagtttccttactgaggttgcccgcaaggagctggagaatctggactcccgtattccttcatgcagtgtcatctacatccctctgattggcttccttctttctattccccgcctgccttccatggtagaggccagtgactttgagattaatggactggacttcatggtaagaccctcaacctctgtaaggtgagtgatgaggaaaatgagtcagcagctgaggaagagcgttactctacagcagcactgcccaatatgggatctctcctctgtagttttactctgagctttaccagcactgagacaaaggaaagagaagtcagagttaggggctggaggtggggttagaaagatggggaaggagaggaggaccaagagatgcaaagtccacagctttgaacccctgtacccagtttctct

SEQ ID NO: 156077 - DNA, 2704 bp, Homo sapiens
  Payload ID: 10643
  Gene Symbol: MSH5
  Gene Name: mutS homolog 5
  ENST ID: ENST00000414412
  CDS Start-End: 1033-2559
gtgatagaaatcatatagaaatacagaaaattgcttgatatttcccccactcttttttttttgagacagagtcttgctctgtcaccaggctggagtgcagtggcacaatcttggctcactgcaacctccacctcccgggttgggtttcaagtgattctcctgcctcagcctcccgagtagctgggactataggcgtgtgccaccatgcctggctaatttttgtatttttagtagagacagggtttcaccatgatggccaggatggtcttgatctcttgacctcgtgatccacccgcctcggcctcccaaagtgctgggattacaggtgtgagccaccgcgcccggccctgatagccaatgaggtttttttgtcattgttcttcttgtatcattacagactcatggccttttgtagctatatttctctttctcccgactctgtacaaactcctttgttttagagtttgcacaaccctctatcaaagcacctaccacctcacttttaaatcttctgcatgtatttctgtcttccttcctagactgtgagcacatctgggacagggaccatatctttttttgtttatttgttttgttttgagacagagtctcgctctgtcggccaggctggagtgcaatggcgtgatctggctataacctccacctcccgggttcaagagattctcctgcctcagcctcccaagtagctggaattacatgtgcatgccaccaagcccagttaatttttgtattttgagtagagacagggtttcaccatgttggtgaggctgatctcgaactcctgacctcaggtgatctacccacctcagcctcccaaagtgctgggattacaggcatgagccactgtgcctggccaggaccatatcttaattgtctttgtagtttcagtgtttggtacagtgcctctcactgtttctttttgcctttgagatcttccctctttgttactgtgatcttccctactggtctttgttcttctgagtctgtccctatcaccacctcaacccgagctggatgtggcctgtcctcctttttgtgtttctctcacagactgtgtacagtgccctgggcctgagggatgcctgccgctccctgccgcagtccatccagctctttcgggacattgcccaagagttctctgatgacctgcaccatatcgccagcctcattgggaaagtagtggactttgagggcagccttgctgaaaatcgcttcacagtcctccccaacatagatcctgaaattgatgagaaaaagcgaagactgatgggacttcccagtttccttactgaggttgcccgcaaggagctggagaatctggactcccgtattccttcatgcagtgtcatctacatccctctgattggcttccttctttctattccccgcctgccttccatggtagaggccagtgactttgagattaatggactggacttcatgtttctctcagaggagaagctgcactatcgtagtgcccgaaccaaggagctggatgcattgctgggggacctgcactgcgagatccgggaccaggagacgctgctgatgtaccagctacagtgccaggtgctggcacgagcagctgtcttaacccgagtattggaccttgcctcccgcctggacgtcctgctggctcttgccagtgctgcccgggactatggctactcaaggccgcgttactccccacaagtccttggggtacgaatccagaatggcagacatcctctgatggaactctgtgcccgaacttttgtgcccaactccacagaatgtggtggggacaaagggagggtcaaagtcatcactggacccaactcatcagggaagagcatatacctcaaacaggtaggcttgatcacattcatggccctggtaggcagctttgtgccagcagaggaggccgaaattggggcagtagacgccatcttcacacgaattcatagctgcgaatccatctcccttggcctctccaccttcatgatcgacctcaaccaggtggcgaaagcagtgaacaatgccactgcacagtcgctggtccttattgatgaatttggaaagggaaccaacacggtggatgggctcgcgcttctggccgctgtgctccgacactggctggcacgtggacccacatgcccccacatctttgtggccaccaactttctgagccttgttcagctacagctgctgccacaagggcccctggtgcagtatttgaccatggagacctgtgaggatggcaacgatcttgtcttcttctatcaggtttgcgaaggtgttgcgaaggccagccatgcctcccacacagctgcccaggctgggcttcctgacaagcttgtggctcgtggcaaggaggtctcagacttgatccgcagtggaaaacccatcaagcctgtcaaggatttgctaaagaagaaccaaatggaaaattgccagacattagtggataagtttatgaaactggatttggaagatcctaacctggacttgaacgttttcatgagccaggaagtgctgcctgctgccaccagcatcctctgagagtccttccagtgtcctccccagcctcctgagactccggtgggctgccatgccctctttgtttccttatctccctcagacgcagagtttttagtttctctagaaattttgtttcatattaggaataaagtttattttgaagaaa

SEQ ID NO: 156078 - DNA, 694 bp, Homo sapiens; identical to SEQ ID NO: 156073
  Payload ID: 10643
  Gene Symbol: MSH5
  Gene Name: mutS homolog 5
  ENST ID: ENST00000422658
  CDS Start-End: 113-694

SEQ ID NO: 156079 - DNA, 405 bp, Homo sapiens
  Payload ID: 10643
  Gene Symbol: MSH5
  Gene Name: mutS homolog 5
  ENST ID: ENST00000430241
  CDS Start-End: 1-405
ggctactcaaggccgcgttactccccacaagtccttggggtacgaatccagaatggcagacatcctctgatggaactctgtgcccgaacctttgtgcccaactccacagaatgtggtggggacaaagggagggtcaaagtcatcactggacccaactcatcagggaagagcatatacctcaaacaggtggcgaaagcagtgaacaatgccactgcacagtcgctggtccttattgatgaatttggaaagggaaccaacacggtggatgggctcgcgcttctggccgctgtgctccgacactggctggcacgtggacccacatgcccccacatctttgtggccaccaactttctgagccttgttcagctacaactgctgccacaagggcccctggtgcagtatttg

SEQ ID NO: 156080 - DNA, 2884 bp, Homo sapiens
  Payload ID: 10643
  Gene Symbol: MSH5
  Gene Name: mutS homolog 5
  Uniprot ID: O43196
  ENST ID: ENST00000456839
  CDS Start-End: 235-2739
cgctccttttgcaggctcgtggcggtcggtcagcggggcgttctcccacctgtagcgactcaggttactgaaaaggcgggaaaacgctgcgatggcggcagctgggggaggaggaagataagcgcgtgaggctggggtcctggcgcgtggttggcagaggcagagacataagacgtgcacgactcgccccacagggccctcagaccccttccttccaaaggagcctccaagctcatggcctccttaggagcgaacccaaggaggacaccgcagggaccgagacctggggcggcctcctccggcttccccagcccggccccagtgccgggccccagggaggccgaggaggaggaagtcgaggaggaggaggagctggccgagatccatctgtgtgtgctgtggaattcaggatacttgggcattgcctactatgatactagtgactccactatccacttcatgccagatgccccagaccacgagagcctcaagcttctccagagagttctggatgagatcaatccccagtctgttgttacgagtgccaaacaggatgagaatatgactcgatttctgggaaagcttgcctcccaggagcacagagagcctaaaagacctgaaatcatatttttgccaagtgtggattttggtctggagataagcaaacaacgcctcctttctggaaactactccttcatcccagacgccatgactgccactgagaaaatcctcttcctctcttccattattccctttgactgcctcctcacagttcgagcacttggagggctgctgaagttcctgggtcgaagaagaatcggggttgaactggaagactataatgtcagcgtccccatcctgggctttaagaaatttatgttgactcatctggtgaacatagatcaagacacttacagtgttctacagatttttaagagtgagtctcacccctcagtgtacaaagtggccagtggactgaaggaggggctcagcctctttggaatcctcaacagatgccactgtaagtggggagagaagctgctcaggctatggttcacacgtccgactcatgacctgggggagctcagttctcgtctggacgtcattcagttttttctgctgccccagaatctggacatggctcagatgctgcatcggctcctgggtcacatcaagaacgtgcctctgattctgaaacgcatgaagttgtcccacaccaaggtcagcgactggcaggttctctacaagactgtgtacagtgccctgggcctgagggatgcctgccgctccctgccgcagtccatccagctctttcgggacattgcccaagagttctctgatgacctgcaccatatcgccagcctcattgggaaagtagtggactttgagggcagccttgctgaaaatcgcttcacagtcctccccaacatagatcctgaaattgatgagaaaaagcgaagactgatgggacttcccagtttccttactgaggttgcccgcaaggagctggagaatctggactcccgtattccttcatgcagtgtcatctacatccctctgattggcttccttctttctattccccgcctgccttccatggtagaggccagtgactttgagattaatggactggacttcatgtttctctcagaggagaagctgcactatcgtagtgcccgaaccaaggagctggatgcattgctgggggacctgcactgcgagatccgggaccaggagacgctgctgatgtaccagctacagtgccaggtgctggcacgagcagctgtcttaacccgagtattggaccttgcctcccgcctggacgtcctgctggctcttgccagtgctgcccgggactatggctactcaaggccgcgttactccccacaagtccttggggtacgaatccagaatggcagacatcctctgatggaactctgtgcccgaacttttgtgcccaactccacagaatgtggtggggacaaagggagggtcaaagtcatcactggacccaactcatcagggaagagcatatacctcaaacaggtaggcttgatcacattcatggccctggtaggcagctttgtgccagcagaggaggccgaaattggggcagtagacgccatcttcacacgaattcatagctgcgaatccatctcccttggcctctccaccttcatgatcgacctcaaccaggtggcgaaagcagtgaacaatgccactgcacagtcgctggtccttattgatgaatttggaaagggaaccaacacggtggatgggctcgcgcttctggccgctgtgctccgacactggctggcacgtggacccacatgcccccacatctttgtggccaccaactttctgagccttgttcagctacagctgctgccacaagggcccctggtgcagtatttgaccatggagacctgtgaggatggcaacgatcttgtcttcttctatcaggtttgcgaaggtgttgcgaaggccagccatgcctcccacacagctgcccaggctgggcttcctgacaagcttgtggctcgtggcaaggaggtctcagacttgatccgcagtggaaaacccatcaagcctgtcaaggatttgctaaagaagaaccaaatggaaaattgccagacattagtggataagtttatgaaactggatttggaagatcctaacctggacttgaacgttttcatgagccaggaagtgctgcctgctgccaccagcatcctctgagagtccttccagtgtcctccccagcctcctgagactccggtgggctgccatgccctctttgtttccttatctccctcagacgcagagtttttagtttctctagaaattttgtttcatattaggaataaagtttattttgaagaaa

SEQ ID NO: 156081 - DNA, 326 bp, Homo sapiens
  Payload ID: 10643
  Gene Symbol: MSH5
  Gene Name: mutS homolog 5
  ENST ID: ENST00000432714
  CDS Start-End: 56-326
gcggtcggtcagcggggcgttctcccacctgtagcgactcagagcctccaagctcatggcctccttaggagcgaacccaaggaggacaccgcagggaccgagacctggggcggcctcctccggcttccccagcccggccccagtgccgggccccagggaggccgaggaggaggaagtcgaggaggaggaggagctggccgagatccatctgtgtgtgctgtggaattcaggatacttgggcattgcctactatgatactagtgactccactatccacttcatgccagatgccccagaccacgagagcctcaagcttctccagagag

SEQ ID NO: 156082 - DNA, 2290 bp, Homo sapiens
  Payload ID: 10643
  Gene Symbol: MSH5
  Gene Name: mutS homolog 5
  ENST ID: ENST00000457917
  CDS Start-End: 56-2290
gcggtcggtcagcggggcgttctcccacctgtagcgactcagagcctccaagctcatggcctccttaggagcgaacccaaggaggacaccgcagggaccgagacctggggcggcctcctccggcttccccagcccggccccagtgccgggccccagggaggccgaggaggaggaagtcgaggaggaggaggagctggccgagatccatctgtgtgtgctgtggaattcaggatacttgggcattgcctactatgatactagtgactccactatccacttcatgccagatgccccagaccacgagagcctcaagcttctccagagagttctggatgagatcaatccccagtctgttgttacgagtgccaaacaggatgagaatatgactcgatttctgggaaagcttgcctcccaggagcacagagagcctaaaagacctgaaatcatatttttgccaagtgtggattttggtctggagataagcaaacaacgcctcctttctggaaactactccttcatcccagacgccatgactgccactgagaaaatcctcttcctctcttccattattccctttgactgcctcctcacacccccaggagatttaagatttaccccgattccactgctgatcccctcccaggttcgagcacttggagggctgctgaagttcctgggtcgaagaagaatcggggttgaactggaagactataatgtcagcgtccccatcctgggctttaagaaatttatgttgactcatctggtgaacatagatcaagacacttacagtgttctacagatttttaagagtgagtctcacccctcagtgtacaaagtggccagtggactgaaggaggggctcagcctctttggaatcctcaacagatgccactgtaagtggggagagaagctgctcaggctatggttcacacgtccgactcatgacctgggggagctcagttctcgtctggacgtcattcagttttttctgctgccccagaatctggacatggctcagatgctgcatcggctcctgggtcacatcaagaacgtgcctctgattctgaaacgcatgaagttgtcccacaccaaggtcagcgactggcaggttctctacaagactgtgtacagtgccctgggcctgagggatgcctgccgctccctgccgcagtccatccagctctttcgggacattgcccaagagttctctgatgacctgcaccatatcgccagcctcattgggaaagtagtggactttgagggcagccttgctgaaaatcgcttcacagtcctccccaacatagatcctgaaattgatgagaaaaagcgaagactgatgggacttcccagtttccttactgaggttgcccgcaaggagctggagaatctggactcccgtattccttcatgcagtgtcatctacatccctctgattggcttccttctttctattccccgcctgccttccatggtagaggccagtgactttgagattaatggactggacttcatgtttctctcagaggagaagctgcactatcgtagtgcccgaaccaaggagctggatgcattgctgggggacctgcactgcgagatccgggaccaggagacgctgctgatgtaccagctacagtgccaggtgctggcacgagcagctgtcttaacccgagtattggaccttgcctcccgcctggacgtcctgctggctcttgccagtgctgcccgggactatggctactcaaggccgcgttactccccacaagtccttggggtacgaatccagaatggcagacatcctctgatggaactctgtgcccgaacctttgtgcccaactccacagaatgtggtggggacaaagggagggtcaaagtcatcactggacccaactcatcagggaagagcatatacctcaaacaggtaggcttgatcacattcatggccctggtaggcagctttgtgccagcagaggaggccgaaattggggcagtagacgccatcttcacacgaattcatagctgcgaatccatctcccttggcctctccaccttcatgatcgacctcaaccagcaggtggcgaaagcagtgaacaatgccactgcacagtcgctggtccttattgatgaatttggaaagggaaccaacacggtggatgggctcgcgcttctggccgctgtgctccgacactggctggcacgtggacccacatgcccccacatctttgtggccaccaactttctgagccttgttcagctacaactgctgccacaagggcccctggtgcagtatttg

SEQ ID NO: 156083 - DNA, 2708 bp, Homo sapiens
  Payload ID: 10643
  Gene Symbol: MSH5
  Gene Name: mutS homolog 5
  Uniprot ID: O43196
  ENST ID: ENST00000419269
  CDS Start-End: 56-2563
gcggtcggtcagcggggcgttctcccacctgtagcgactcagagcctccaagctcatggcctccttaggagcgaacccaaggaggacaccgcagggaccgagacctggggcggcctcctccggcttccccagcccggccccagtgccgggccccagggaggccgaggaggaggaagtcgaggaggaggaggagctggccgagatccatctgtgtgtgctgtggaattcaggatacttgggcattgcctactatgatactagtgactccactatccacttcatgccagatgccccagaccacgagagcctcaagcttctccagagagttctggatgagatcaatccccagtctgttgttacgagtgccaaacaggatgagaatatgactcgatttctgggaaagcttgcctcccaggagcacagagagcctaaaagacctgaaatcatatttttgccaagtgtggattttggtctggagataagcaaacaacgcctcctttctggaaactactccttcatcccagacgccatgactgccactgagaaaatcctcttcctctcttccattattccctttgactgcctcctcacagttcgagcacttggagggctgctgaagttcctgggtcgaagaagaatcggggttgaactggaagactataatgtcagcgtccccatcctgggctttaagaaatttatgttgactcatctggtgaacatagatcaagacacttacagtgttctacagatttttaagagtgagtctcacccctcagtgtacaaagtggccagtggactgaaggaggggctcagcctctttggaatcctcaacagatgccactgtaagtggggagagaagctgctcaggctatggttcacacgtccgactcatgacctgggggagctcagttctcgtctggacgtcattcagttttttctgctgccccagaatctggacatggctcagatgctgcatcggctcctgggtcacatcaagaacgtgcctctgattctgaaacgcatgaagttgtcccacaccaaggtcagcgactggcaggttctctacaagactgtgtacagtgccctgggcctgagggatgcctgccgctccctgccgcagtccatccagctctttcgggacattgcccaagagttctctgatgacctgcaccatatcgccagcctcattgggaaagtagtggactttgagggcagccttgctgaaaatcgcttcacagtcctccccaacatagatcctgaaattgatgagaaaaagcgaagactgatgggacttcccagtttccttactgaggttgcccgcaaggagctggagaatctggactcccgtattccttcatgcagtgtcatctacatccctctgattggcttccttctttctattccccgcctgccttccatggtagaggccagtgactttgagattaatggactggacttcatgtttctctcagaggagaagctgcactatcgtagtgcccgaaccaaggagctggatgcattgctgggggacctgcactgcgagatccgggaccaggagacgctgctgatgtaccagctacagtgccaggtgctggcacgagcagctgtcttaacccgagtattggaccttgcctcccgcctggacgtcctgctggctcttgccagtgctgcccgggactatggctactcaaggccgcgttactccccacaagtccttggggtacgaatccagaatggcagacatcctctgatggaactctgtgcccgaacttttgtgcccaactccacagaatgtggtggggacaaagggagggtcaaagtcatcactggacccaactcatcagggaagagcatatacctcaaacaggtaggcttgatcacattcatggccctggtaggcagctttgtgccagcagaggaggccgaaattggggcagtagacgccatcttcacacgaattcatagctgcgaatccatctcccttggcctctccaccttcatgatcgacctcaaccagcaggtggcgaaagcagtgaacaatgccactgcacagtcgctggtccttattgatgaatttggaaagggaaccaacacggtggatgggctcgcgcttctggccgctgtgctccgacactggctggcacgtggacccacatgcccccacatctttgtggccaccaactttctgagccttgttcagctacagctgctgccacaagggcccctggtgcagtatttgaccatggagacctgtgaggatggcaacgatcttgtcttcttctatcaggtttgcgaaggtgttgcgaaggccagccatgcctcccacacagctgcccaggctgggcttcctgacaagcttgtggctcgtggcaaggaggtctcagacttgatccgcagtggaaaacccatcaagcctgtcaaggatttgctaaagaagaaccaaatggaaaattgccagacattagtggataagtttatgaaactggatttggaagatcctaacctggacttgaacgttttcatgagccaggaagtgctgcctgctgccaccagcatcctctgagagtccttccagtgtcctccccagcctcctgagactccggtgggctgccatgccctctttgtttccttatctccctcagacgcagagtttttagtttctctagaaattttgtttcatattaggaataaagtttattttgaagaaa

SEQ ID NO: 156084 - DNA, 1000 bp, Homo sapiens
  Payload ID: 10643
  Gene Symbol: MSH5
  Gene Name: mutS homolog 5
  ENST ID: ENST00000450148
  CDS Start-End: 1-1000
aaaatcctcttcctctcttccattattccctttgactgcctcctcacagttcgagcacttggagggctgctgaagttcctgggtcgaagaagaatcggggttgaactggaagactataatgtcagcgtccccatcctgggctttaagaaatttatgttgactcatctggtgaacatagatcaagacacttacagtgttctacagatttttaagagtgagtctcacccctcagtgtacaaagtggccagtggactgaaggaggggctcagcctctttggaatcctcaacagatgccactgtaagtggggagagaagctgctcaggctatggttcacacgtccgactcatgacctgggggagctcagttctcgtctggacgtcattcagttttttctgctgccccagaatctggacatggctcagatgctgcatcggctcctgggtcacatcaagaacgtgcctctgattctgaaacgcatgaagttgtcccacaccaaggtcagcgactggcaggttctctacaagactgtgtacagtgccctgggcctgagggatgcctgccgctccctgccgcagtccatccagctctttcgggacattgcccaagagttctctgatgacctgcaccatatcgccagcctcattgggaaagtatacttatctcctcaggtggactttgagggcagccttgctgaaaatcgcttcacagtcctccccaacatagatcctgaaattgatgagaaaaagcgaagactgatgggacttcccagtttccttactgaggttgcccgcaaggagctggagaatctggactcccgtattccttcatgcagtgtcatctacatccctctgattggcttccttctttctattccccgcctgccttccatggtagaggccagtgactttgagattaatggactggacttcatgtttctctcagaggagaagctgcactatcgtagtgcccgaaccaaggagctggatgcattgctggggg

SEQ ID NO: 156085 - DNA, 2666 bp, Homo sapiens
  Payload ID: 10643
  Gene Symbol: MSH5
  Gene Name: mutS homolog 5
  ENST ID: ENST00000436559
  CDS Start-End: 56-2521
gcggtcggtcagcggggcgttctcccacctgtagcgactcagagcctccaagctcatggcctccttaggagcgaacccaaggaggacaccgcagggaccgagacctggggcggcctcctccggcttccccagcccggccccagtgccgggccccagggaggccgaggaggaggaagtcgaggaggaggaggagctggccgagatccatctgtgtgtgctgtggaattcaggatacttgggcattgcctactatgatactagtgactccactatccacttcatgccagatgccccagaccacgagagcctcaagcttctccagagagttctggatgagatcaatccccagtctgttgttacgagtgccaaacaggatgagaatatgactcgatttctgggaaagcttgcctcccaggagcacagagagcctaaaagacctgaaatcatatttttgccaagtgtggattttggtctggagataagcaaacaacgcctcctttctggaaactactccttcatcccagacgccatgactgccactgagaaaatcctcttcctctcttccattattccctttgactgcctcctcacacccccaggagatttaagatttaccccgattccactgctgatcccctcccaggttcgagcacttggagggctgctgaagttcctgggtcgaagaagaatcggggttgaactggaagactataatgtcagcgtccccatcctgggctttaagaaatttatgttgactcatctggtgaacatagatcaagacacttacagtgttctacagatttttaagagtgagtctcacccctcagtgtacaaagtggccagtggactgaaggaggggctcagcctctttggaatcctcaacagatgccactgtaagtggggagagaagctgctcaggctatggttcacacgtccgactcatgacctgggggagctcagttctcgtctggacgtcattcagttttttctgctgccccagaatctggacatggctcagatgctgcatcggctcctgggtcacatcaagaacgtgcctctgattctgaaacgcatgaagttgtcccacaccaaggtcagcgactggcaggttctctacaagactgtgtacagtgccctgggcctgagggatgcctgccgctccctgccgcagtccatccagctctttcgggacattgcccaagagttctctgatgacctgcaccatatcgccagcctcattgggaaagtagtggactttgagggcagccttgctgaaaatcgcttcacagtcctccccaacatagatcctgaaattgatgagaaaaagcgaagactgatgggacttcccagtttccttactgaggttgcccgcaaggagctggagaatctggactcccgtattccttcatgcagtgtcatctacatccctctgattggcttccttctttctattccccgcctgccttccatggtagaggccagtgactttgagattaatggactggacttcatgtttctctcagaggagaagctgcactatcgtagtgcccgaaccaaggagctggatgcattgctgggggacctgcactgcgagatccgggaccaggagacgctgctgatgtaccagctacagtgccaggtgctggcacgagcagctgtcttaacccgagtattggaccttgcctcccgcctggacgtcctgctggctcttgccagtgctgcccgggactatggctactcaaggccgcgttactccccacaagtccttggggtacgaatccagaatggcagacatcctctgatggaactctgtgcccgaacctttgtgcccaactccacagaatgtggtggggacaaagggagggtcaaagtcatcactggacccaactcatcagggaagagcatatacctcaaacaggtaggcttgatcacattcatggccctggtaggcagctttgtgccagcagaggaggccgaaattggggcagtagacgccatcttcacacgaattcatagctgcgaatccatctcccttggcctctccaccttcatgatcgacctcaaccaggtggcgaaagcagtgaacaatgccactgcacagtcgctggtccttattgatgaatttggaaagggaaccaacacggtggatgggctcgcgcttctggccgctgtgctccgacactggctggcacgtggacccacatgcccccacatctttgtggccaccaactttctgagccttgttcagctacaactgctgccacaagggcccctggtgcagtatttgaccatggagacctgtgaggatggcaacgatcttgtcttcttctatcaggtctcagacttgatccgcagtggaaaacccatcaagcctgtcaaggatttgctaaagaagaaccaaatggaaaattgccagacattagtggataagtttatgaaactggatttggaagatcctaacctggacttgaacgttttcatgagccaggaagtgctgcctgctgccaccagcatcctctgagagtccttccagtgtcctccccagcctcctgagactccggtgggctgccatgccctctttgtttccttatctccctcagacgcagagtttttagtttctctagaaattttgtttcatattaggaataaagtttattttgaagaaa

SEQ ID NO: 156086 - DNA, 891 bp, Homo sapiens
  Payload ID: 10643
  Gene Symbol: MSH5
  Gene Name: mutS homolog 5
  Uniprot ID: O43196
  ENST ID: ENST00000436091
  CDS Start-End: 80-891
gcgcgctccttttgcaggctcgtggcggtcggtcagcggggcgttctcccacctgtagcgactcagagcctccaagctcatggcctccttaggagcgaacccaaggaggacaccgcagggaccgagacctggggcggcctcctccggcttccccagcccggccccagtgccgggccccagggaggccgaggaggaggaagtcgaggaggaggaggagctggccgagatccatctgtgtgtgctgtggaattcaggatacttgggcattgcctactatgatactagtgactccactatccacttcatgccagatgccccagaccacgagagcctcaagcttctccagagagttctggatgagatcaatccccagtctgttgttacgagtgccaaacaggatgagaatatgactcgatttctgggaaagcttgcctcccaggagcacagagagcctaaaagacctgaaatcatatttttgccaagtgtggattttggtctggagataagcaaacaacgcctcctttctggaaactactccttcatcccagacgccatgactgccactgagaaaatcctcttcctctcttccattattccctttgactgcctcctcacagttcgagcacttggagggctgctgaagttcctgggtcgaagaagaatcggggttgaactggaagactataatgtcagcgtccccatcctgggctttaagaaatttatgttgactcatctggtgaacatagatcaagacacttacagtgttctacagatttttaagagtgagtctcacccctcagtgtacaaagtggccagtggactgaaggaggggctcagcctctttggaatcctcaacagatgccactgtaagtggggagagaagctgctcag

SEQ ID NO: 156087 - DNA, 1000 bp, Homo sapiens; identical to SEQ ID NO: 156084
  Payload ID: 10643
  Gene Symbol: MSH5
  Gene Name: mutS homolog 5
  ENST ID: ENST00000443665
  CDS Start-End: 1-1000

SEQ ID NO: 156088 - DNA, 475 bp, Homo sapiens
  Payload ID: 10643
  Gene Symbol: MSH5
  Gene Name: mutS homolog 5
  ENST ID: ENST00000456436
  CDS Start-End: 1-475
actgtgtacagtgccctgggcctgagggatgcctgccgctccctgccgcagtccatccagctctttcgggacattgcccaagagttctctgatgacctgcaccatatcgccagcctcattgggaaagtatacttatctcctcaggtggactttgagggcagccttgctgaaaatcgcttcacagtcctccccaacatagatcctgaaattgatgagaaaaagcgaagactgatgggacttcccagtttccttactgaggttgcccgcaaggagctggagaatctggactcccgtattccttcatgcagtgtcatctacatccctctgattggcttccttctttctattccccgcctgccttccatggtagaggccagtgactttgagattaatggactggacttcatgtttctctcagaggagaagctgcactatcgtagtgcccgaaccaaggagctggatgcattgctggggg

SEQ ID NO: 156089 - DNA, 323 bp, Homo sapiens
  Payload ID: 10643
  Gene Symbol: MSH5
  Gene Name: mutS homolog 5
  ENST ID: ENST00000453872
  CDS Start-End: 1-323
aaaatcctcttcctctcttccattattccctttgactgcctcctcacagttcgagcacttggagggctgctgaagttcctgggtcgaagaagaatcggggttgaactggaagactataatgtcagcgtccccatcctgggctttaagaaatttatgttgactcatctggtgaacatagatcaagacacttacagtgttctacagatttttaagagtgagtctcacccctcagtgtacaaagtggccagtggactgaaggaggggctcagcctctttggaatcctcaacagatgccactgtaagtggggagagaagctgctcag

SEQ ID NO: 156090 - DNA, 2704 bp, Homo sapiens; identical to SEQ ID NO: 156069
  Payload ID: 10643
  Gene Symbol: MSH5
  Gene Name: mutS homolog 5
  ENST ID: ENST00000436004
  CDS Start-End: 1033-2559

SEQ ID NO: 156091 - DNA, 2704 bp, Homo sapiens; identical to SEQ ID NO: 156069
  Payload ID: 10643
  Gene Symbol: MSH5
  Gene Name: mutS homolog 5
  ENST ID: ENST00000430216
  CDS Start-End: 1033-2559

SEQ ID NO: 156092 - DNA, 326 bp, Homo sapiens; identical to SEQ ID NO: 156081
  Payload ID: 10643
  Gene Symbol: MSH5
  Gene Name: mutS homolog 5
  ENST ID: ENST00000416964
  CDS Start-End: 56-326

SEQ ID NO: 156093 - DNA, 694 bp, Homo sapiens; identical to SEQ ID NO: 156073
  Payload ID: 10643
  Gene Symbol: MSH5
  Gene Name: mutS homolog 5
  ENST ID: ENST00000430217
  CDS Start-End: 113-694

SEQ ID NO: 156094 - DNA, 2729 bp, Homo sapiens
  Payload ID: 10643
  Gene Symbol: MSH5
  Gene Name: mutS homolog 5
  Uniprot ID: O43196
  ENST ID: ENST00000416549
  CDS Start-End: 80-2584
gcgcgctccttttgcaggctcgtggcggtcggtcagcggggcgttctcccacctgtagcgactcagagcctccaagctcatggcctccttaggagcgaacccaaggaggacaccgcagggaccgagacctggggcggcctcctccggcttccccagcccggccccagtgccgggccccagggaggccgaggaggaggaagtcgaggaggaggaggagctggccgagatccatctgtgtgtgctgtggaattcaggatacttgggcattgcctactatgatactagtgactccactatccacttcatgccagatgccccagaccacgagagcctcaagcttctccagagagttctggatgagatcaatccccagtctgttgttacgagtgccaaacaggatgagaatatgactcgatttctgggaaagcttgcctcccaggagcacagagagcctaaaagacctgaaatcatatttttgccaagtgtggattttggtctggagataagcaaacaacgcctcctttctggaaactactccttcatcccagacgccatgactgccactgagaaaatcctcttcctctcttccattattccctttgactgcctcctcacagttcgagcacttggagggctgctgaagttcctgggtcgaagaagaatcggggttgaactggaagactataatgtcagcgtccccatcctgggctttaagaaatttatgttgactcatctggtgaacatagatcaagacacttacagtgttctacagatttttaagagtgagtctcacccctcagtgtacaaagtggccagtggactgaaggaggggctcagcctctttggaatcctcaacagatgccactgtaagtggggagagaagctgctcaggctatggttcacacgtccgactcatgacctgggggagctcagttctcgtctggacgtcattcagttttttctgctgccccagaatctggacatggctcagatgctgcatcggctcctgggtcacatcaagaacgtgcctctgattctgaaacgcatgaagttgtcccacaccaaggtcagcgactggcaggttctctacaagactgtgtacagtgccctgggcctgagggatgcctgccgctccctgccgcagtccatccagctctttcgggacattgcccaagagttctctgatgacctgcaccatatcgccagcctcattgggaaagtagtggactttgagggcagccttgctgaaaatcgcttcacagtcctccccaacatagatcctgaaattgatgagaaaaagcgaagactgatgggacttcccagtttccttactgaggttgcccgcaaggagctggagaatctggactcccgtattccttcatgcagtgtcatctacatccctctgattggcttccttctttctattccccgcctgccttccatggtagaggccagtgactttgagattaatggactggacttcatgtttctctcagaggagaagctgcactatcgtagtgcccgaaccaaggagctggatgcattgctgggggacctgcactgcgagatccgggaccaggagacgctgctgatgtaccagctacagtgccaggtgctggcacgagcagctgtcttaacccgagtattggaccttgcctcccgcctggacgtcctgctggctcttgccagtgctgcccgggactatggctactcaaggccgcgttactccccacaagtccttggggtacgaatccagaatggcagacatcctctgatggaactctgtgcccgaacttttgtgcccaactccacagaatgtggtggggacaaagggagggtcaaagtcatcactggacccaactcatcagggaagagcatatacctcaaacaggtaggcttgatcacattcatggccctggtaggcagctttgtgccagcagaggaggccgaaattggggcagtagacgccatcttcacacgaattcatagctgcgaatccatctcccttggcctctccaccttcatgatcgacctcaaccaggtggcgaaagcagtgaacaatgccactgcacagtcgctggtccttattgatgaatttggaaagggaaccaacacggtggatgggctcgcgcttctggccgctgtgctccgacactggctggcacgtggacccacatgcccccacatctttgtggccaccaactttctgagccttgttcagctacagctgctgccacaagggcccctggtgcagtatttgaccatggagacctgtgaggatggcaacgatcttgtcttcttctatcaggtttgcgaaggtgttgcgaaggccagccatgcctcccacacagctgcccaggctgggcttcctgacaagcttgtggctcgtggcaaggaggtctcagacttgatccgcagtggaaaacccatcaagcctgtcaaggatttgctaaagaagaaccaaatggaaaattgccagacattagtggataagtttatgaaactggatttggaagatcctaacctggacttgaacgttttcatgagccaggaagtgctgcctgctgccaccagcatcctctgagagtccttccagtgtcctccccagcctcctgagactccggtgggctgccatgccctctttgtttccttatctccctcagacgcagagtttttagtttctctagaaattttgtttcatattaggaataaagtttattttgaagaaa

SEQ ID NO: 156095 - DNA, 545 bp, Homo sapiens
  Payload ID: 10643
  Gene Symbol: MSH5
  Gene Name: mutS homolog 5
  ENST ID: ENST00000456073
  CDS Start-End: 1-477
cacgagagcctcaagcttctccagagagttctggatgagatcaatccccagtctgttgttacgagtgccaaacaggatgagaatatgactcgatttctgggaaagcttgcctcccaggagcacagagagcctaaaagacctgaaatcatatttttgccaagtgtggattttggtctggagataagcaaacaacgcctcctttctggaaactactccttcatcccagacgccatgactgccactgagaaaatcctcttcctctcttccattattccctttgactgcctcctcacaatcccctcccaggttcgagcacttggagggctgctgaagttcctgggtcgaagaagaatcggggttgaactggaagactataatgtcagcgtccccatcctgggctttaagaaatttatgttgactcatctggtgaacatagatcaagacacttacaggaatcctcaacagatgccactgtaagtggggagagaagctgctcaggctatggttcacacgtccgactcatgacctgggggagctcagttctc

SEQ ID NO: 156096 - DNA, 867 bp, Homo sapiens
  Payload ID: 10643
  Gene Symbol: MSH5
  Gene Name: mutS homolog 5
  Uniprot ID: O43196
  ENST ID: ENST00000420731
  CDS Start-End: 56-867
gcggtcggtcagcggggcgttctcccacctgtagcgactcagagcctccaagctcatggcctccttaggagcgaacccaaggaggacaccgcagggaccgagacctggggcggcctcctccggcttccccagcccggccccagtgccgggccccagggaggccgaggaggaggaagtcgaggaggaggaggagctggccgagatccatctgtgtgtgctgtggaattcaggatacttgggcattgcctactatgatactagtgactccactatccacttcatgccagatgccccagaccacgagagcctcaagcttctccagagagttctggatgagatcaatccccagtctgttgttacgagtgccaaacaggatgagaatatgactcgatttctgggaaagcttgcctcccaggagcacagagagcctaaaagacctgaaatcatatttttgccaagtgtggattttggtctggagataagcaaacaacgcctcctttctggaaactactccttcatcccagacgccatgactgccactgagaaaatcctcttcctctcttccattattccctttgactgcctcctcacagttcgagcacttggagggctgctgaagttcctgggtcgaagaagaatcggggttgaactggaagactataatgtcagcgtccccatcctgggctttaagaaatttatgttgactcatctggtgaacatagatcaagacacttacagtgttctacagatttttaagagtgagtctcacccctcagtgtacaaagtggccagtggactgaaggaggggctcagcctctttggaatcctcaacagatgccactgtaagtggggagagaagctgctcag

SEQ ID NO: 156097 - DNA, 2704 bp, Homo sapiens; identical to SEQ ID NO: 156069
  Payload ID: 10643
  Gene Symbol: MSH5
  Gene Name: mutS homolog 5
  ENST ID: ENST00000448169
  CDS Start-End: 1033-2559

SEQ ID NO: 156098 - DNA, 2260 bp, Homo sapiens
  Payload ID: 10643
  Gene Symbol: MSH5
  Gene Name: mutS homolog 5
  ENST ID: ENST00000427968
  CDS Start-End: 80-2260
gcgcgctccttttgcaggctcgtggcggtcggtcagcggggcgttctcccacctgtagcgactcagagcctccaagctcatggcctccttaggagcgaacccaaggaggacaccgcagggaccgagacctggggcggcctcctccggcttccccagcccggccccagtgccgggccccagggaggccgaggaggaggaagtcgaggaggaggaggagctggccgagatccatctgtgtgtgctgtggaattcaggatacttgggcattgcctactatgatactagtgactccactatccacttcatgccagatgccccagaccacgagagcctcaagcttctccagagagttctggatgagatcaatccccagtctgttgttacgagtgccaaacaggatgagaatatgactcgatttctgggaaagcttgcctcccaggagcacagagagcctaaaagacctgaaatcatatttttgccaagtgtggattttggtctggagataagcaaacaacgcctcctttctggaaactactccttcatcccagacgccatgactgccactgagaaaatcctcttcctctcttccattattccctttgactgcctcctcacagttcgagcacttggagggctgctgaagttcctgggtcgaagaagaatcggggttgaactggaagactataatgtcagcgtccccatcctgggctttaagaaatttatgttgactcatctggtgaacatagatcaagacacttacagtgttctacagatttttaagagtgagtctcacccctcagtgtacaaagtggccagtggactgaaggaggggctcagcctctttggaatcctcaacagatgccactgtaagtggggagagaagctgctcaggctatggttcacacgtccgactcatgacctgggggagctcagttctcgtctggacgtcattcagttttttctgctgccccagaatctggacatggctcagatgctgcatcggctcctgggtcacatcaagaacgtgcctctgattctgaaacgcatgaagttgtcccacaccaaggtcagcgactggcaggttctctacaagactgtgtacagtgccctgggcctgagggatgcctgccgctccctgccgcagtccatccagctctttcgggacattgcccaagagttctctgatgacctgcaccatatcgccagcctcattgggaaagtagtggactttgagggcagccttgctgaaaatcgcttcacagtcctccccaacatagatcctgaaattgatgagaaaaagcgaagactgatgggacttcccagtttccttactgaggttgcccgcaaggagctggagaatctggactcccgtattccttcatgcagtgtcatctacatccctctgattggcttccttctttctattccccgcctgccttccatggtagaggccagtgactttgagattaatggactggacttcatgtttctctcagaggagaagctgcactatcgtagtgcccgaaccaaggagctggatgcattgctgggggacctgcactgcgagatccgggaccaggagacgctgctgatgtaccagctacagtgccaggtgctggcacgagcagctgtcttaacccgagtattggaccttgcctcccgcctggacgtcctgctggctcttgccagtgctgcccgggactatggctactcaaggccgcgttactccccacaagtccttggggtacgaatccagaatggcagacatcctctgatggaactctgtgcccgaacctttgtgcccaactccacagaatgtggtggggacaaagggagggtcaaagtcatcactggacccaactcatcagggaagagcatatacctcaaacaggtaggcttgatcacattcatggccctggtaggcagctttgtgccagcagaggaggccgaaattggggcagtagacgccatcttcacacgaattcatagctgcgaatccatctcccttggcctctccaccttcatgatcgacctcaaccaggtggcgaaagcagtgaacaatgccactgcacagtcgctggtccttattgatgaatttggaaagggaaccaacacggtggatgggctcgcgcttctggccgctgtgctccgacactggctggcacgtggacccacatgcccccacatctttgtggccaccaactttctgagccttgttcagctacaactgctgccacaagggcccctggtgcagtatttg

SEQ ID NO: 156099 - DNA, 616 bp, Homo sapiens; identical to SEQ ID NO: 156071
  Payload ID: 10643
  Gene Symbol: MSH5
  Gene Name: mutS homolog 5
  ENST ID: ENST00000427687
  CDS Start-End: 1-471

SEQ ID NO: 156100 - DNA, 1636 bp, Homo sapiens
  Payload ID: 10643
  Gene Symbol: MSH5
  Gene Name: mutS homolog 5
  ENST ID: ENST00000414810
  CDS Start-End: 1-1491
actgtgtacagtgccctgggcctgagggatgcctgccgctccctgccgcagtccatccagctctttcgggacattgcccaagagttctctgatgacctgcaccatatcgccagcctcattgggaaagtagtggactttgagggcagccttgctgaaaatcgcttcacagtcctccccaacatagatcctgaaattgatgagaaaaagcgaagactgatgggacttcccagtttccttactgaggttgcccgcaaggagctggagaatctggactcccgtattccttcatgcagtgtcatctacatccctctgattggcttccttctttctattccccgcctgccttccatggtagaggccagtgactttgagattaatggactggacttcatgtttctctcagaggagaagctgcactatcgtagtgcccgaaccaaggagctggatgcattgctgggggacctgcactgcgagatccgggaccaggagacgctgctgatgtaccagctacagtgccaggtgctggcacgagcagctgtcttaacccgagtattggaccttgcctcccgcctggacgtcctgctggctcttgccagtgctgcccgggactatggctactcaaggccgcgttactccccacaagtccttggggtacgaatccagaatggcagacatcctctgatggaactctgtgcccgaacctttgtgcccaactccacagaatgtggtggggacaaagggagggtcaaagtcatcactggacccaactcatcagggaagagcatatacctcaaacaggtaggcttgatcacattcatggccctggtaggcagctttgtgccagcagaggaggccgaaattggggcagtagacgccatcttcacacgaattcatagctgcgaatccatctcccttggcctctccaccttcatgatcgacctcaaccaggtggcgaaagcagtgaacaatgccactgcacagtcgctggtccttattgatgaatttggaaagggaaccaacacggtggatgggctcgcgcttctggccgctgtgctccgacactggctggcacgtggacccacatgcccccacatctttgtggccaccaactttctgagccttgttcagctacaactgctgccacaagggcccctggtgcagtatttgaccatggagacctgtgaggatggcaacgatcttgtcttcttctatcaggtttgcgaaggtgttgcgaaggccagccatgcctcccacacagctgcccaggctgggcttcctgacaagcttgtggctcgtggcaaggaggtctcagacttgatccgcagtggaaaacccatcaagcctgtcaaggatttgctaaagaagaaccaaatggaaaattgccagacattagtggataagtttatgaaactggatttggaagatcctaacctggacttgaacgttttcatgagccaggaagtgctgcctgctgccaccagcatcctctgagagtccttccagtgtcctccccagcctcctgagactccggtgggctgccatgccctctttgtttccttatctccctcagacgcagagtttttagtttctctagaaattttgtttcatattaggaataaagtttattttgaagaaa

SEQ ID NO: 156101 - DNA, 2729 bp, Homo sapiens; identical to SEQ ID NO: 156074
  Payload ID: 10643
  Gene Symbol: MSH5
  Gene Name: mutS homolog 5
  Uniprot ID: O43196
  ENST ID: ENST00000441395
  CDS Start-End: 80-2584

SEQ ID NO: 156102 - DNA, 694 bp, Homo sapiens; identical to SEQ ID NO: 156073
  Payload ID: 10643
  Gene Symbol: MSH5
  Gene Name: mutS homolog 5
  ENST ID: ENST00000425703
  CDS Start-End: 113-694

SEQ ID NO: 156103 - DNA, 694 bp, Homo sapiens; identical to SEQ ID NO: 156073
  Payload ID: 10643
  Gene Symbol: MSH5
  Gene Name: mutS homolog 5
  ENST ID: ENST00000427298
  CDS Start-End: 113-694

SEQ ID NO: 156104 - DNA, 2704 bp, Homo sapiens; identical to SEQ ID NO: 156069
  Payload ID: 10643
  Gene Symbol: MSH5
  Gene Name: mutS homolog 5
  ENST ID: ENST00000439816
  CDS Start-End: 1033-2559

SEQ ID NO: 156105 - DNA, 383 bp, Homo sapiens
  Payload ID: 10643
  Gene Symbol: MSH5
  Gene Name: mutS homolog 5
  ENST ID: ENST00000424681
  CDS Start-End: 113-383
gcgccggcgcgctccttttgcaggctcgtggcggtcggtcagcggggcgttctcccacctgtagcgactcagggccctcagaccccttccttccaaaggagcctccaagctcatggcctccttaggagcgaacccaaggaggacaccgcagggaccgagacctggggcggcctcctccggcttccccagcccggccccagtgccgggccccagggaggccgaggaggaggaagtcgaggaggaggaggagctggccgagatccatctgtgtgtgctgtggaattcaggatacttgggcattgcctactatgatactagtgactccactatccacttcatgccagatgccccagaccacgagagcctcaagcttctccagagag

SEQ ID NO: 156106 - DNA, 1546 bp, Homo sapiens
  Payload ID: 10643
  Gene Symbol: MSH5
  Gene Name: mutS homolog 5
  ENST ID: ENST00000458424
  CDS Start-End: 1-1401
actgtgtacagtgccctgggcctgagggatgcctgccgctccctgccgcagtccatccagctctttcgggacattgcccaagagttctctgatgacctgcaccatatcgccagcctcattgggaaagtagtggactttgagggcagccttgctgaaaatcgcttcacagtcctccccaacatagatcctgaaattgatgagaaaaagcgaagactgatgggacttcccagtttccttactgaggttgcccgcaaggagctggagaatctggactcccgtattccttcatgcagtgtcatctacatccctctgattggcttccttctttctattccccgcctgccttccatggtagaggccagtgactttgagattaatggactggacttcatgtttctctcagaggagaagctgcactatcgtagtgcccgaaccaaggagctggatgcattgctgggggacctgcactgcgagatccgggaccaggagacgctgctgatgtaccagctacagtgccaggtgctggcacgagcagctgtcttaacccgagtattggaccttgcctcccgcctggacgtcctgctggctcttgccagtgctgcccgggactatggctactcaaggccgcgttactccccacaagtccttggggtacgaatccagaatggcagacatcctctgatggaactctgtgcccgaacctttgtgcccaactccacagaatgtggtggggacaaagggagggtcaaagtcatcactggacccaactcatcagggaagagcatatacctcaaacaggtaggcttgatcacattcatggccctggtaggcagctttgtgccagcagaggaggccgaaattggggcagtagacgccatcttcacacgaattcatagctgcgaatccatctcccttggcctctccaccttcatgatcgacctcaaccaggtggcgaaagcagtgaacaatgccactgcacagtcgctggtccttattgatgaatttggaaagggaaccaacacggtggatgggctcgcgcttctggccgctgtgctccgacactggctggcacgtggacccacatgcccccacatctttgtggccaccaactttctgagccttgttcagctacaactgctgccacaagggcccctggtgcagtatttgaccatggagacctgtgaggatggcaacgatcttgtcttcttctatcaggtctcagacttgatccgcagtggaaaacccatcaagcctgtcaaggatttgctaaagaagaaccaaatggaaaattgccagacattagtggataagtttatgaaactggatttggaagatcctaacctggacttgaacgttttcatgagccaggaagtgctgcctgctgccaccagcatcctctgagagtccttccagtgtcctccccagcctcctgagactccggtgggctgccatgccctctttgtttccttatctccctcagacgcagagtttttagtttctctagaaattttgtttcatattaggaataaagtttattttgaagaaa

SEQ ID NO: 156107 - DNA, 1000 bp, Homo sapiens; identical to SEQ ID NO: 156084
  Payload ID: 10643
  Gene Symbol: MSH5
  Gene Name: mutS homolog 5
  ENST ID: ENST00000425344
  CDS Start-End: 1-1000

SEQ ID NO: 156108 - DNA, 1046 bp, Homo sapiens
  Payload ID: 10643
  Gene Symbol: MSH5
  Gene Name: mutS homolog 5
  Uniprot ID: O43196
  ENST ID: ENST00000412070
  CDS Start-End: 235-1046
cgctccttttgcaggctcgtggcggtcggtcagcggggcgttctcccacctgtagcgactcaggttactgaaaaggcgggaaaacgctgcgatggcggcagctgggggaggaggaagataagcgcgtgaggctggggtcctggcgcgtggttggcagaggcagagacataagacgtgcacgactcgccccacagggccctcagaccccttccttccaaaggagcctccaagctcatggcctccttaggagcgaacccaaggaggacaccgcagggaccgagacctggggcggcctcctccggcttccccagcccggccccagtgccgggccccagggaggccgaggaggaggaagtcgaggaggaggaggagctggccgagatccatctgtgtgtgctgtggaattcaggatacttgggcattgcctactatgatactagtgactccactatccacttcatgccagatgccccagaccacgagagcctcaagcttctccagagagttctggatgagatcaatccccagtctgttgttacgagtgccaaacaggatgagaatatgactcgatttctgggaaagcttgcctcccaggagcacagagagcctaaaagacctgaaatcatatttttgccaagtgtggattttggtctggagataagcaaacaacgcctcctttctggaaactactccttcatcccagacgccatgactgccactgagaaaatcctcttcctctcttccattattccctttgactgcctcctcacagttcgagcacttggagggctgctgaagttcctgggtcgaagaagaatcggggttgaactggaagactataatgtcagcgtccccatcctgggctttaagaaatttatgttgactcatctggtgaacatagatcaagacacttacagtgttctacagatttttaagagtgagtctcacccctcagtgtacaaagtggccagtggactgaaggaggggctcagcctctttggaatcctcaacagatgccactgtaagtggggagagaagctgctcag

SEQ ID NO: 156109 - DNA, 2239 bp, Homo sapiens
  Payload ID: 10643
  Gene Symbol: MSH5
  Gene Name: mutS homolog 5
  ENST ID: ENST00000416819
  CDS Start-End: 56-2239
gcggtcggtcagcggggcgttctcccacctgtagcgactcagagcctccaagctcatggcctccttaggagcgaacccaaggaggacaccgcagggaccgagacctggggcggcctcctccggcttccccagcccggccccagtgccgggccccagggaggccgaggaggaggaagtcgaggaggaggaggagctggccgagatccatctgtgtgtgctgtggaattcaggatacttgggcattgcctactatgatactagtgactccactatccacttcatgccagatgccccagaccacgagagcctcaagcttctccagagagttctggatgagatcaatccccagtctgttgttacgagtgccaaacaggatgagaatatgactcgatttctgggaaagcttgcctcccaggagcacagagagcctaaaagacctgaaatcatatttttgccaagtgtggattttggtctggagataagcaaacaacgcctcctttctggaaactactccttcatcccagacgccatgactgccactgagaaaatcctcttcctctcttccattattccctttgactgcctcctcacagttcgagcacttggagggctgctgaagttcctgggtcgaagaagaatcggggttgaactggaagactataatgtcagcgtccccatcctgggctttaagaaatttatgttgactcatctggtgaacatagatcaagacacttacagtgttctacagatttttaagagtgagtctcacccctcagtgtacaaagtggccagtggactgaaggaggggctcagcctctttggaatcctcaacagatgccactgtaagtggggagagaagctgctcaggctatggttcacacgtccgactcatgacctgggggagctcagttctcgtctggacgtcattcagttttttctgctgccccagaatctggacatggctcagatgctgcatcggctcctgggtcacatcaagaacgtgcctctgattctgaaacgcatgaagttgtcccacaccaaggtcagcgactggcaggttctctacaagactgtgtacagtgccctgggcctgagggatgcctgccgctccctgccgcagtccatccagctctttcgggacattgcccaagagttctctgatgacctgcaccatatcgccagcctcattgggaaagtagtggactttgagggcagccttgctgaaaatcgcttcacagtcctccccaacatagatcctgaaattgatgagaaaaagcgaagactgatgggacttcccagtttccttactgaggttgcccgcaaggagctggagaatctggactcccgtattccttcatgcagtgtcatctacatccctctgattggcttccttctttctattccccgcctgccttccatggtagaggccagtgactttgagattaatggactggacttcatgtttctctcagaggagaagctgcactatcgtagtgcccgaaccaaggagctggatgcattgctgggggacctgcactgcgagatccgggaccaggagacgctgctgatgtaccagctacagtgccaggtgctggcacgagcagctgtcttaacccgagtattggaccttgcctcccgcctggacgtcctgctggctcttgccagtgctgcccgggactatggctactcaaggccgcgttactccccacaagtccttggggtacgaatccagaatggcagacatcctctgatggaactctgtgcccgaacctttgtgcccaactccacagaatgtggtggggacaaagggagggtcaaagtcatcactggacccaactcatcagggaagagcatatacctcaaacaggtaggcttgatcacattcatggccctggtaggcagctttgtgccagcagaggaggccgaaattggggcagtagacgccatcttcacacgaattcatagctgcgaatccatctcccttggcctctccaccttcatgatcgacctcaaccagcaggtggcgaaagcagtgaacaatgccactgcacagtcgctggtccttattgatgaatttggaaagggaaccaacacggtggatgggctcgcgcttctggccgctgtgctccgacactggctggcacgtggacccacatgcccccacatctttgtggccaccaactttctgagccttgttcagctacaactgctgccacaagggcccctggtgcagtatttg

SEQ ID NO: 156110 - DNA, 1636 bp, Homo sapiens; identical to SEQ ID NO: 156100
  Payload ID: 10643
  Gene Symbol: MSH5
  Gene Name: mutS homolog 5
  ENST ID: ENST00000454820
  CDS Start-End: 1-1491

SEQ ID NO: 156111 - DNA, 616 bp, Homo sapiens; identical to SEQ ID NO: 156071
  Payload ID: 10643
  Gene Symbol: MSH5
  Gene Name: mutS homolog 5
  ENST ID: ENST00000447504
  CDS Start-End: 1-471

SEQ ID NO: 156112 - DNA, 2884 bp, Homo sapiens
  Payload ID: 10643
  Gene Symbol: MSH5
  Gene Name: mutS homolog 5
  Uniprot ID: O43196
  ENST ID: ENST00000441401
  CDS Start-End: 235-2739
cgctccttttgcaggctcgtggcggtcggtcagcggggcgttctcccacctgtagcgactcaggttactgaaaaggcgggaaaacgctgcgatggcggcagctgggggaggaggaagataagcgcgtgaggctggggtcctggcgcgtggttggcagaggcagagacataagacgtgcacgactcgccccacagggccctcagaccccttccttccaaaggagcctccaagctcatggcctccttaggagcgaacccaaggaggacaccgcagggaccgagacctggggcggcctcctccggcttccccagcccggccccagtgccgggccccagggaggccgaggaggaggaagtcgaggaggaggaggagctggccgagatccatctgtgtgtgctgtggaattcaggatacttgggcattgcctactatgatactagtgactccactatccacttcatgccagatgccccagaccacgagagcctcaagcttctccagagagttctggatgagatcaatccccagtctgttgttacgagtgccaaacaggatgagaatatgactcgatttctgggaaagcttgcctcccaggagcacagagagcctaaaagacctgaaatcatatttttgccaagtgtggattttggtctggagataagcaaacaacgcctcctttctggaaactactccttcatcccagacgccatgactgccactgagaaaatcctcttcctctcttccattattccctttgactgcctcctcacagttcgagcacttggagggctgctgaagttcctgggtcgaagaagaatcggggttgaactggaagactataatgtcagcgtccccatcctgggctttaagaaatttatgttgactcatctggtgaacatagatcaagacacttacagtgttctacagatttttaagagtgagtctcacccctcagtgtacaaagtggccagtggactgaaggaggggctcagcctctttggaatcctcaacagatgccactgtaagtggggagagaagctgctcaggctatggttcacacgtccgactcatgacctgggggagctcagttctcgtctggacgtcattcagttttttctgctgccccagaatctggacatggctcagatgctgcatcggctcctgggtcacatcaagaacgtgcctctgattctgaaacgcatgaagttgtcccacaccaaggtcagcgactggcaggttctctacaagactgtgtacagtgccctgggcctgagggatgcctgccgctccctgccgcagtccatccagctctttcgggacattgcccaagagttctctgatgacctgcaccatatcgccagcctcattgggaaagtagtggactttgagggcagccttgctgaaaatcgcttcacagtcctccccaacatagatcctgaaattgatgagaaaaagcgaagactgatgggacttcccagtttccttactgaggttgcccgcaaggagctggagaatctggactcccgtattccttcatgcagtgtcatctacatccctctgattggcttccttctttctattccccgcctgccttccatggtagaggccagtgactttgagattaatggactggacttcatgtttctctcagaggagaagctgcactatcgtagtgcccgaaccaaggagctggatgcattgctgggggacctgcactgcgagatccgggaccaggagacgctgctgatgtaccagctacagtgccaggtgctggcacgagcagctgtcttaacccgagtattggaccttgcctcccgcctggacgtcctgctggctcttgccagtgctgcccgggactatggctactcaaggccgcgttactccccacaagtccttggggtacgaatccagaatggcagacatcctctgatggaactctgtgcccgaacctttgtgcccaactccacagaatgtggtggggacaaagggagggtcaaagtcatcactggacccaactcatcagggaagagcatatacctcaaacaggtaggcttgatcacattcatggccctggtaggcagctttgtgccagcagaggaggccgaaattggggcagtagacgccatcttcacacgaattcatagctgcgaatccatctcccttggcctctccaccttcatgatcgacctcaaccaggtggcgaaagcagtgaacaatgccactgcacagtcgctggtccttattgatgaatttggaaagggaaccaacacggtggatgggctcgcgcttctggccgctgtgctccgacactggctggcacgtggacccacatgcccccacatctttgtggccaccaactttctgagccttgttcagctacaactgctgccacaagggcccctggtgcagtatttgaccatggagacctgtgaggatggcaacgatcttgtcttcttctatcaggtttgcgaaggtgttgcgaaggccagccatgcctcccacacagctgcccaggctgggcttcctgacaagcttgtggctcgtggcaaggaggtctcagacttgatccgcagtggaaaacccatcaagcctgtcaaggatttgctaaagaagaaccaaatggaaaattgccagacattagtggataagtttatgaaactggatttggaagatcctaacctggacttgaacgttttcatgagccaggaagtgctgcctgctgccaccagcatcctctgagagtccttccagtgtcctccccagcctcctgagactccggtgggctgccatgccctctttgtttccttatctccctcagacgcagagtttttagtttctctagaaattttgtttcatattaggaataaagtttattttgaagaaa

SEQ ID NO: 156113 - DNA, 616 bp, Homo sapiens; identical to SEQ ID NO: 156071
  Payload ID: 10643
  Gene Symbol: MSH5
  Gene Name: mutS homolog 5
  ENST ID: ENST00000412630
  CDS Start-End: 1-471

SEQ ID NO: 156114 - DNA, 2706 bp, Homo sapiens
  Payload ID: 10643
  Gene Symbol: MSH5
  Gene Name: mutS homolog 5
  ENST ID: ENST00000423982
  CDS Start-End: 242-2155
ctccgcgtgacaggaatgagggtggggcgcgtggagtttcccacaatctgtactttagttaaatacccgagaattcacctcctgtgtccacagctctccacgcccctcagccctgccccgcagccctgtagcagaagtacttagtgctttgcattctgcgcgccaccctaccccggcctcctctgtgaatcgttgcttccgaaccgccctcactttttgcatccgcagagcctccaagctcatggcctccttaggagcgaacccaaggaggacaccgcagggaccgagacctggggcggcctcctccggcttccccagcccggccccagtgccgggccccagggaggccgaggaggaggaagtcgaggaggaggaggagctggccgagatccatctgtgtgtgctgtggaattcaggatacttgggcattgcctactatgatactagtgactccactatccacttcatgccagatgccccagaccacgagagcctcaagcttctccagagagttctggatgagatcaatccccagtctgttgttacgagtgccaaacaggatgagaatatgactcgatttctgggaaagcttgcctcccaggagcacagagagcctaaaagacctgaaatcatatttttgccaagtgtggattttggtctggagataagcaaacaacgcctcctttctggaaactactccttcatcccagacgccatgactgccactgagaaaatcctcttcctctcttccattattccctttgactgcctcctcacagttcgagcacttggagggctgctgaagttcctgggtcgaagaagaatcggggttgaactggaagactataatgtcagcgtccccatcctgggctttaagaaatttatgttgactcatctggtgaacatagatcaagacacttacagtgttctacagatttttaagagtgagtctcacccctcagtgtacaaagtggccagtggactgaaggaggggctcagcctctttggaatcctcaacagatgccactgtaagtggggagagaagctgctcaggctatggttcacacgtccgactcatgacctgggggagctcagttctcgtctggacgtcattcagttttttctgctgccccagaatctggacatggctcagatgctgcatcggctcctgggtcacatcaagaacgtgcctctgattctgaaacgcatgaagttgtcccacaccaaggtcagcgactggcaggttctctacaagactgtgtacagtgccctgggcctgagggatgcctgccgctccctgccgcagtccatccagctctttcgggacattgcccaagagttctctgatgacctgcaccatatcgccagcctcattgggaaagtagtggactttgagggcagccttgctgaaaatcgcttcacagtcctccccaacatagatcctgaaattgatgagaaaaagcgaagactgatgggacttcccagtttccttactgaggttgcccgcaaggagctggagaatctggactcccgtattccttcatgcagtgtcatctacatccctctgattggcttccttctttctattccccgcctgccttccatggtagaggccagtgactttgagattaatggactggacttcatgtttctctcagaggagaagctgcactatcgtagtgcccgaaccaaggagctggatgcattgctgggggacctgcactgcgagatccgggaccaggagacgctgctgatgtaccagctacagtgccaggtgctggcacgagcagctgtcttaacccgagtattggaccttgcctcccgcctggacgtcctgctggctcttgccagtgctgcccgggactatggctactcaaggccgcgttactccccacaagtccttggggtacgaatccagaatggcagacatcctctgatggaactctgtgcccgaacctttgtgcccaactccacagaatgtggtggggacaaagggagggtcaaagtcatcactggacccaactcatcagggaagagcatatacctcaaacagctgcgaatccatctcccttggcctctccaccttcatgatcgacctcaaccaggtggcgaaagcagtgaacaatgccactgcacagtcgctggtccttattgatgaatttggaaagggaaccaacacggtggatgggctcgcgcttctggccgctgtgctccgacactggctggcacgtggacccacatgcccccacatctttgtggccaccaactttctgagccttgttcagctacaactgctgccacaagggcccctggtgcagtatttgaccatggagacctgtgaggatggcaacgatcttgtcttcttctatcaggtttgcgaaggtgttgcgaaggccagccatgcctcccacacagctgcccaggctgggcttcctgacaagcttgtggctcgtggcaaggaggtctcagacttgatccgcagtggaaaacccatcaagcctgtcaaggatttgctaaagaagaaccaaatggaaaattgccagacattagtggataagtttatgaaactggatttggaagatcctaacctggacttgaacgttttcatgagccaggaagtgctgcctgctgccaccagcatcctctgagagtccttccagtgtcctccccagcctcctgagactccggtgggctgccatgccctct

SEQ ID NO: 156115 - DNA, 616 bp, Homo sapiens; identical to SEQ ID NO: 156071
  Payload ID: 10643
  Gene Symbol: MSH5
  Gene Name: mutS homolog 5
  ENST ID: ENST00000429846
  CDS Start-End: 1-471

SEQ ID NO: 156116 - DNA, 2712 bp, Homo sapiens
  Payload ID: 10643
  Gene Symbol: MSH5
  Gene Name: mutS homolog 5
  Uniprot ID: O43196
  ENST ID: ENST00000436192
  CDS Start-End: 56-2563
gcggtcggtcagcggggcgttctcccacctgtagcgactcagagcctccaagctcatggcctccttaggagcgaacccaaggaggacaccgcagggaccgagacctggggcggcctcctccggcttccccagcccggccccagtgccgggccccagggaggccgaggaggaggaagtcgaggaggaggaggagctggccgagatccatctgtgtgtgctgtggaattcaggatacttgggcattgcctactatgatactagtgactccactatccacttcatgccagatgccccagaccacgagagcctcaagcttctccagagagttctggatgagatcaatccccagtctgttgttacgagtgccaaacaggatgagaatatgactcgatttctgggaaagcttgcctcccaggagcacagagagcctaaaagacctgaaatcatatttttgccaagtgtggattttggtctggagataagcaaacaacgcctcctttctggaaactactccttcatcccagacgccatgactgccactgagaaaatcctcttcctctcttccattattccctttgactgcctcctcacagttcgagcacttggagggctgctgaagttcctgggtcgaagaagaatcggggttgaactggaagactataatgtcagcgtccccatcctgggctttaagaaatttatgttgactcatctggtgaacatagatcaagacacttacagtgttctacagatttttaagagtgagtctcacccctcagtgtacaaagtggccagtggactgaaggaggggctcagcctctttggaatcctcaacagatgccactgtaagtggggagagaagctgctcaggctatggttcacacgtccgactcatgacctgggggagctcagttctcgtctggacgtcattcagttttttctgctgccccagaatctggacatggctcagatgctgcatcggctcctgggtcacatcaagaacgtgcctctgattctgaaacgcatgaagttgtcccacaccaaggtcagcgactggcaggttctctacaagactgtgtacagtgccctgggcctgagggatgcctgccgctccctgccgcagtccatccagctctttcgggacattgcccaagagttctctgatgacctgcaccatatcgccagcctcattgggaaagtagtggactttgagggcagccttgctgaaaatcgcttcacagtcctccccaacatagatcctgaaattgatgagaaaaagcgaagactgatgggacttcccagtttccttactgaggttgcccgcaaggagctggagaatctggactcccgtattccttcatgcagtgtcatctacatccctctgattggcttccttctttctattccccgcctgccttccatggtagaggccagtgactttgagattaatggactggacttcatgtttctctcagaggagaagctgcactatcgtagtgcccgaaccaaggagctggatgcattgctgggggacctgcactgcgagatccgggaccaggagacgctgctgatgtaccagctacagtgccaggtgctggcacgagcagctgtcttaacccgagtattggaccttgcctcccgcctggacgtcctgctggctcttgccagtgctgcccgggactatggctactcaaggccgcgttactccccacaagtccttggggtacgaatccagaatggcagacatcctctgatggaactctgtgcccgaacctttgtgcccaactccacagaatgtggtggggacaaagggagggtcaaagtcatcactggacccaactcatcagggaagagcatatacctcaaacaggtaggcttgatcacattcatggccctggtaggcagctttgtgccagcagaggaggccgaaattggggcagtagacgccatcttcacacgaattcatagctgcgaatccatctcccttggcctctccaccttcatgatcgacctcaaccagcaggtggcgaaagcagtgaacaatgccactgcacagtcgctggtccttattgatgaatttggaaagggaaccaacacggtggatgggctcgcgcttctggccgctgtgctccgacactggctggcacgtggacccacatgcccccacatctttgtggccaccaactttctgagccttgttcagctacaactgctgccacaagggcccctggtgcagtatttgaccatggagacctgtgaggatggcaacgatcttgtcttcttctatcaggtttgcgaaggtgttgcgaaggccagccatgcctcccacacagctgcccaggctgggcttcctgacaagcttgtggctcgtggcaaggaggtctcagacttgatccgcagtggaaaacccatcaagcctgtcaaggatttgctaaagaagaaccaaatggaaaattgccagacattagtggataagtttatgaaactggatttggaagatcctaacctggacttgaacgttttcatgagccaggaagtgctgcctgctgccaccagcatcctctgagagtccttccagtgtcctccccagcctcctgagactccggtgggctgccatgccctctttgtttccttatctccctcagacgcagagtttttagtttctctagaaattttgtttcatattaggaataaagtttattttgaagaaagata

SEQ ID NO: 156117 - DNA, 2708 bp, Homo sapiens; identical to SEQ ID NO: 156065
  Payload ID: 10643
  Gene Symbol: MSH5
  Gene Name: mutS homolog 5
  Uniprot ID: O43196
  ENST ID: ENST00000435700
  CDS Start-End: 56-2563

SEQ ID NO: 156118 - DNA, 1000 bp, Homo sapiens; identical to SEQ ID NO: 156084
  Payload ID: 10643
  Gene Symbol: MSH5
  Gene Name: mutS homolog 5
  ENST ID: ENST00000412201
  CDS Start-End: 1-1000

SEQ ID NO: 156119 - DNA, 1636 bp, Homo sapiens; identical to SEQ ID NO: 156100
  Payload ID: 10643
  Gene Symbol: MSH5
  Gene Name: mutS homolog 5
  ENST ID: ENST00000414514
  CDS Start-End: 1-1491

SEQ ID NO: 156120 - DNA, 2884 bp, Homo sapiens; identical to SEQ ID NO: 156112
  Payload ID: 10643
  Gene Symbol: MSH5
  Gene Name: mutS homolog 5
  Uniprot ID: O43196
  ENST ID: ENST00000457742
  CDS Start-End: 235-2739

SEQ ID NO: 156121 - DNA, 2236 bp, Homo sapiens
  Payload ID: 10643
  Gene Symbol: MSH5
  Gene Name: mutS homolog 5
  ENST ID: ENST00000412975
  CDS Start-End: 1034-2236
gtgatagaaatcatatagaaatacagaaaattgcttgatatttcccccactcttttttttttgagacagagtcttgctctgtcaccaggctggagtgcagtggcacaatcttggctcactgcaacctccacctcccgggttgggtttcaagtgattctcctgcctcagcctcccgagtagctgggactataggcgtgtgccaccatgcctggctaatttttgtatttttagtagagacagggtttcaccatgatggccaggatggtcttgatctcttgacctcgtgatccacccgcctcggcctcccaaagtgctgggattacaggtgtgagccaccgcgcccggccctgatagccgatgaggtttttttgtcattgttcttcttgtatcattacagactcatggccttttatagctatatttctctttctcccgactctgtacaaactcctttgttttagagtttgcacaaccctctatcaaagcacctaccacctcacttttaaatcttctgcatgtatttctgtcttccttcctagactgtgagcacatctgggacagggaccatatctttttttgtttatttgttttgttttgagacagagtctcgctctgtcggccaggctggagtgcaatggcgtgatctggctataacctccacctcccgggttcaagagattctcctgcctcagcctcccaagtagctggaattacatgtgcatgccaccaagcccagttaattttttgtattttgagtagagacagggtttcaccatgttggtgaggctgatctcgaactcctgacctcaggtgatctacccacctcagcctcccaaagtgctgggattacaggcatgagccactgtgcctggccaggaccatatcttaattgtctttgtagtttcagtgtttggtacagtgcctctcactgtttctttttgcctttgagatcttccctctttgttactgtgatcttccctactggtctttgttcttctgagtctgtccctatcaccacctcaacccgagctggatgtggcctgtcctcctttttgtgtttctctcacagactgtgtacagtgccctgggcctgagggatgcctgccgctccctgccgcagtccatccagctctttcgggacattgcccaagagttctctgatgacctgcaccatatcgccagcctcattgggaaagtagtggactttgagggcagccttgctgaaaatcgcttcacagtcctccccaacatagatcctgaaattgatgagaaaaagcgaagactgatgggacttcccagtttccttactgaggttgcccgcaaggagctggagaatctggactcccgtattccttcatgcagtgtcatctacatccctctgattggcttccttctttctattccccgcctgccttccatggtagaggccagtgactttgagattaatggactggacttcatgtttctctcagaggagaagctgcactatcgtagtgcccgaaccaaggagctggatgcattgctgggggacctgcactgcgagatccgggaccaggagacgctgctgatgtaccagctacagtgccaggtgctggcacgagcagctgtcttaacccgagtattggaccttgcctcccgcctggacgtcctgctggctcttgccagtgctgcccgggactatggctactcaaggccgcgttactccccacaagtccttggggtacgaatccagaatggcagacatcctctgatggaactctgtgcccgaacctttgtgcccaactccacagaatgtggtggggacaaagggagggtcaaagtcatcactggacccaactcatcagggaagagcatatacctcaaacaggtaggcttgatcacattcatggccctggtaggcagctttgtgccagcagaggaggccgaaattggggcagtagacgccatcttcacacgaattcatagctgcgaatccatctcccttggcctctccaccttcatgatcgacctcaaccaggtggcgaaagcagtgaacaatgccactgcacagtcgctggtccttattgatgaatttggaaagggaaccaacacggtggatgggctcgcgcttctggccgctgtgctccgacactggctggcacgtggacccacatgcccccacatctttgtggccaccaactttctgagccttgttcagctacaactgctgccacaagggcccctggtgcagtatttg

SEQ ID NO: 156122 - DNA, 1639 bp, Homo sapiens; identical to SEQ ID NO: 156070
  Payload ID: 10643
  Gene Symbol: MSH5
  Gene Name: mutS homolog 5
  ENST ID: ENST00000426512
  CDS Start-End: 1-1494

SEQ ID NO: 156123 - DNA, 694 bp, Homo sapiens; identical to SEQ ID NO: 156073
  Payload ID: 10643
  Gene Symbol: MSH5
  Gene Name: mutS homolog 5
  ENST ID: ENST00000443906
  CDS Start-End: 113-694

SEQ ID NO: 156124 - DNA, 1000 bp, Homo sapiens; identical to SEQ ID NO: 156084
  Payload ID: 10643
  Gene Symbol: MSH5
  Gene Name: mutS homolog 5
  ENST ID: ENST00000435942
  CDS Start-End: 1-1000

SEQ ID NO: 156125 - DNA, 475 bp, Homo sapiens; identical to SEQ ID NO: 156088
  Payload ID: 10643
  Gene Symbol: MSH5
  Gene Name: mutS homolog 5
  ENST ID: ENST00000422428
  CDS Start-End: 1-475

SEQ ID NO: 156126 - DNA, 1636 bp, Homo sapiens; identical to SEQ ID NO: 156100
  Payload ID: 10643
  Gene Symbol: MSH5
  Gene Name: mutS homolog 5
  ENST ID: ENST00000437726
  CDS Start-End: 1-1491

SEQ ID NO: 156127 - DNA, 616 bp, Homo sapiens
  Payload ID: 10643
  Gene Symbol: MSH5
  Gene Name: mutS homolog 5
  ENST ID: ENST00000457795
  CDS Start-End: 1-471
actgcacagtcgctggtccttattgatgaatttggaaagggaaccaacacggtggatgggctcgcgcttctggccgctgtgctccgacactggctggcacgtggacccacatgcccccacatctttgtggccaccaactttctgagccttgttcagctacagctgctgccacaagggcccctggtgcagtatttggtttgcgaaggtgttgcgaaggccagccatgcctcccacacagctgcccaggctgggcttcctgacaagcttgtggctcgtggcaaggaggtctcagacttgatccgcagtggaaaacccatcaagcctgtcaaggatttgctaaagaagaaccaaatggaaaattgccagacattagtggataagtttatgaaactggatttggaagatcctaacctggacttgaacgttttcatgagccaggaagtgctgcctgctgccaccagcatcctctgagagtccttccagtgtcctccccagcctcctgagactccggtgggctgccatgccctctttgtttccttatctccctcagacgcagagtttttagtttctctagaaattttgtttcatattaggaataaagtttattttgaagaaa

SEQ ID NO: 156128 - DNA, 2415 bp, Homo sapiens
  Payload ID: 10643
  Gene Symbol: MSH5
  Gene Name: mutS homolog 5
  ENST ID: ENST00000458058
  CDS Start-End: 235-2415
cgctccttttgcaggctcgtggcggtcggtcagcggggcgttctcccacctgtagcgactcaggttactgaaaaggcgggaaaacgctgcgatggcggcagctgggggaggaggaagataagcgcgtgaggctggggtcctggcgcgtggttggcagaggcagagacataagacgtgcacgactcgccccacagggccctcagaccccttccttccaaaggagcctccaagctcatggcctccttaggagcgaacccaaggaggacaccgcagggaccgagacctggggcggcctcctccggcttccccagcccggccccagtgccgggccccagggaggccgaggaggaggaagtcgaggaggaggaggagctggccgagatccatctgtgtgtgctgtggaattcaggatacttgggcattgcctactatgatactagtgactccactatccacttcatgccagatgccccagaccacgagagcctcaagcttctccagagagttctggatgagatcaatccccagtctgttgttacgagtgccaaacaggatgagaatatgactcgatttctgggaaagcttgcctcccaggagcacagagagcctaaaagacctgaaatcatatttttgccaagtgtggattttggtctggagataagcaaacaacgcctcctttctggaaactactccttcatcccagacgccatgactgccactgagaaaatcctcttcctctcttccattattccctttgactgcctcctcacagttcgagcacttggagggctgctgaagttcctgggtcgaagaagaatcggggttgaactggaagactataatgtcagcgtccccatcctgggctttaagaaatttatgttgactcatctggtgaacatagatcaagacacttacagtgttctacagatttttaagagtgagtctcacccctcagtgtacaaagtggccagtggactgaaggaggggctcagcctctttggaatcctcaacagatgccactgtaagtggggagagaagctgctcaggctatggttcacacgtccgactcatgacctgggggagctcagttctcgtctggacgtcattcagttttttctgctgccccagaatctggacatggctcagatgctgcatcggctcctgggtcacatcaagaacgtgcctctgattctgaaacgcatgaagttgtcccacaccaaggtcagcgactggcaggttctctacaagactgtgtacagtgccctgggcctgagggatgcctgccgctccctgccgcagtccatccagctctttcgggacattgcccaagagttctctgatgacctgcaccatatcgccagcctcattgggaaagtagtggactttgagggcagccttgctgaaaatcgcttcacagtcctccccaacatagatcctgaaattgatgagaaaaagcgaagactgatgggacttcccagtttccttactgaggttgcccgcaaggagctggagaatctggactcccgtattccttcatgcagtgtcatctacatccctctgattggcttccttctttctattccccgcctgccttccatggtagaggccagtgactttgagattaatggactggacttcatgtttctctcagaggagaagctgcactatcgtagtgcccgaaccaaggagctggatgcattgctgggggacctgcactgcgagatccgggaccaggagacgctgctgatgtaccagctacagtgccaggtgctggcacgagcagctgtcttaacccgagtattggaccttgcctcccgcctggacgtcctgctggctcttgccagtgctgcccgggactatggctactcaaggccgcgttactccccacaagtccttggggtacgaatccagaatggcagacatcctctgatggaactctgtgcccgaacctttgtgcccaactccacagaatgtggtggggacaaagggagggtcaaagtcatcactggacccaactcatcagggaagagcatatacctcaaacaggtaggcttgatcacattcatggccctggtaggcagctttgtgccagcagaggaggccgaaattggggcagtagacgccatcttcacacgaattcatagctgcgaatccatctcccttggcctctccaccttcatgatcgacctcaaccaggtggcgaaagcagtgaacaatgccactgcacagtcgctggtccttattgatgaatttggaaagggaaccaacacggtggatgggctcgcgcttctggccgctgtgctccgacactggctggcacgtggacccacatgcccccacatctttgtggccaccaactttctgagccttgttcagctacaactgctgccacaagggcccctggtgcagtatttg

SEQ ID NO: 156129 - DNA, 2666 bp, Homo sapiens
  Payload ID: 10643
  Gene Symbol: MSH5
  Gene Name: mutS homolog 5
  ENST ID: ENST00000458144
  CDS Start-End: 56-2521
gcggtcggtcagcggggcgttctcccacctgtagcgactcagagcctccaagctcatggcctccttaggagcgaacccaaggaggacaccgcagggaccgagacctggggcggcctcctccggcttccccagcccggccccagtgccgggccccagggaggccgaggaggaggaagtcgaggaggaggaggagctggccgagatccatctgtgtgtgctgtggaattcaggatacttgggcattgcctactatgatactagtgactccactatccacttcatgccagatgccccagaccacgagagcctcaagcttctccagagagttctggatgagatcaatccccagtctgttgttacgagtgccaaacaggatgagaatatgactcgatttctgggaaagcttgcctcccaggagcacagagagcctaaaagacctgaaatcatatttttgccaagtgtggattttggtctggagataagcaaacaacgcctcctttctggaaactactccttcatcccagacgccatgactgccactgagaaaatcctcttcctctcttccattattccctttgactgcctcctcacacccccaggagatttaagatttaccccgattccactgctgatcccctcccaggttcgagcacttggagggctgctgaagttcctgggtcgaagaagaatcggggttgaactggaagactataatgtcagcgtccccatcctgggctttaagaaatttatgttgactcatctggtgaacatagatcaagacacttacagtgttctacagatttttaagagtgagtctcacccctcagtgtacaaagtggccagtggactgaaggaggggctcagcctctttggaatcctcaacagatgccactgtaagtggggagagaagctgctcaggctatggttcacacgtccgactcatgacctgggggagctcagttctcgtctggacgtcattcagttttttctgctgccccagaatctggacatggctcagatgctgcatcggctcctgggtcacatcaagaacgtgcctctgattctgaaacgcatgaagttgtcccacaccaaggtcagcgactggcaggttctctacaagactgtgtacagtgccctgggcctgagggatgcctgccgctccctgccgcagtccatccagctctttcgggacattgcccaagagttctctgatgacctgcaccatatcgccagcctcattgggaaagtagtggactttgagggcagccttgctgaaaatcgcttcacagtcctccccaacatagatcctgaaattgatgagaaaaagcgaagactgatgggacttcccagtttccttactgaggttgcccgcaaggagctggagaatctggactcccgtattccttcatgcagtgtcatctacatccctctgattggcttccttctttctattccccgcctgccttccatggtagaggccagtgactttgagattaatggactggacttcatgtttctctcagaggagaagctgcactatcgtagtgcccgaaccaaggagctggatgcattgctgggggacctgcactgcgagatccgggaccaggagacgctgctgatgtaccagctacagtgccaggtgctggcacgagcagctgtcttaacccgagtattggaccttgcctcccgcctggacgtcctgctggctcttgccagtgctgcccgggactatggctactcaaggccgcgttactccccacaagtccttggggtacgaatccagaatggcagacatcctctgatggaactctgtgcccgaacttttgtgcccaactccacagaatgtggtggggacaaagggagggtcaaagtcatcactggacccaactcatcagggaagagcatatacctcaaacaggtaggcttgatcacattcatggccctggtaggcagctttgtgccagcagaggaggccgaaattggggcagtagacgccatcttcacacgaattcatagctgcgaatccatctcccttggcctctccaccttcatgatcgacctcaaccaggtggcgaaagcagtgaacaatgccactgcacagtcgctggtccttattgatgaatttggaaagggaaccaacacggtggatgggctcgcgcttctggccgctgtgctccgacactggctggcacgtggacccacatgcccccacatctttgtggccaccaactttctgagccttgttcagctacagctgctgccacaagggcccctggtgcagtatttgaccatggagacctgtgaggatggcaacgatcttgtcttcttctatcaggtctcagacttgatccgcagtggaaaacccatcaagcctgtcaaggatttgctaaagaagaaccaaatggaaaattgccagacattagtggataagtttatgaaactggatttggaagatcctaacctggacttgaacgttttcatgagccaggaagtgctgcctgctgccaccagcatcctctgagagtccttccagtgtcctccccagcctcctgagactccggtgggctgccatgccctctttgtttccttatctccctcagacgcagagtttttagtttctctagaaattttgtttcatattaggaataaagtttattttgaagaaa

SEQ ID NO: 156130 - DNA, 694 bp, Homo sapiens; identical to SEQ ID NO: 156073
  Payload ID: 10643
  Gene Symbol: MSH5
  Gene Name: mutS homolog 5
  ENST ID: ENST00000420729
  CDS Start-End: 113-694

SEQ ID NO: 156131 - DNA, 195 bp, Homo sapiens
  Payload ID: 10643
  Gene Symbol: MSH5
  Gene Name: mutS homolog 5
  ENST ID: ENST00000445511
  CDS Start-End: 1-195
actgcacagtcgctggtccttattgatgaatttggaaagggaaccaacacggtggatgggctcgcgcttctggccgctgtgctccgacactggctggcacgtggacccacatgcccccacatctttgtggccaccaactttctgagccttgttcagctacaactgctgccacaagggcccctggtgcagtatttg

SEQ ID NO: 156132 - DNA, 918 bp, Homo sapiens
  Payload ID: 10643
  Gene Symbol: MSH5
  Gene Name: mutS homolog 5
  ENST ID: ENST00000443040
  CDS Start-End: 56-918
gcggtcggtcagcggggcgttctcccacctgtagcgactcagagcctccaagctcatggcctccttaggagcgaacccaaggaggacaccgcagggaccgagacctggggcggcctcctccggcttccccagcccggccccagtgccgggccccagggaggccgaggaggaggaagtcgaggaggaggaggagctggccgagatccatctgtgtgtgctgtggaattcaggatacttgggcattgcctactatgatactagtgactccactatccacttcatgccagatgccccagaccacgagagcctcaagcttctccagagagttctggatgagatcaatccccagtctgttgttacgagtgccaaacaggatgagaatatgactcgatttctgggaaagcttgcctcccaggagcacagagagcctaaaagacctgaaatcatatttttgccaagtgtggattttggtctggagataagcaaacaacgcctcctttctggaaactactccttcatcccagacgccatgactgccactgagaaaatcctcttcctctcttccattattccctttgactgcctcctcacacccccaggagatttaagatttaccccgattccactgctgatcccctcccaggttcgagcacttggagggctgctgaagttcctgggtcgaagaagaatcggggttgaactggaagactataatgtcagcgtccccatcctgggctttaagaaatttatgttgactcatctggtgaacatagatcaagacacttacagtgttctacagatttttaagagtgagtctcacccctcagtgtacaaagtggccagtggactgaaggaggggctcagcctctttggaatcctcaacagatgccactgtaagtggggagagaagctgctcag

SEQ ID NO: 156133 - DNA, 764 bp, Homo sapiens
  Payload ID: 10643
  Gene Symbol: MSH5
  Gene Name: mutS homolog 5
  ENST ID: ENST00000497269
  CDS Start-End: 1-130
aagaatcggggttgaactggaagactataatgtcagcgtccccatcctgggctttaagaaatttatgttgactcatctggtgaacatagatcaagacacttacaggaatcctcaacagatgccactgtaagtggggagagaagctgctcaggctatggttcacacgtccgactcatgacctgggggagctcagttctcgtctggacgtcattcagttttttctgctgccccagaatctggacatggctcagatgctgcatcggctcctgggtcacatcaagaacgtgcctctgattctgaaacgcatgaagttgtcccacaccaaggtcagcgactggcaggttctctacaaggtaaggccttccttcttgaatcccaaaagtccaggtaaaggccctcagcctgtattccagactgtctgtaccctagacatgctgtccaattttattctaccctcttttttttttttttggagacagcctcgctctgtcgcccaggctgaagtgccatggggcgatcttggctcactgcaacctccgcctcctgggttcaagcaattctgcctcagcctcccgagaagttgggattacaagcgcccgccaccatgcctggcaaatttttgtatttttagtagagacaggatttcaccatgttggccaggctggtcttgaactcctgacttcaggtgatccacctgcctcagcctcccaaggtgctgggattacaggtgtgaaccaccaggcccggcctccctcttttttttt

SEQ ID NO: 156134 - DNA, 2296 bp, Homo sapiens
  Payload ID: 10643
  Gene Symbol: MSH5
  Gene Name: mutS homolog 5
  ENST ID: ENST00000463144
  CDS Start-End: 1-478
agatgccccagaccacgagagcctcaagcttctccagagagttctggatgagatcaatccccagtctgttgttacgagtgccaaacaggatgagaatatgactcgatttctgggaaagcttgcctcccaggagcacagagagcctaaaagacctgaaatcatatttttgccaagtgtggattttggtctggagataagcaaacaacgcctcctttctggaaactactccttcatcccagacgccatgactgccactgagaaaatcctcttcctctcttccattattccctttgactgcctcctcacagttcgagcacttggagggctgctgaagttcctgggtcgaagaagaatcggggttgaactggaagactataatgtcagcgtccccatcctgggctttaagaaatttatgttgactcatctggtgaacatagatcaagacacttacaggaatcctcaacagatgccactgtaagtggggagagaagctgctcaggctatggttcacacgtccgactcatgacctgggggagctcagttctcgtctggacgtcattcagttttttctgctgccccagaatctggacatggctcagatgctgcatcggctcctgggtcacatcaagaacgtgcctctgattctgaaacgcatgaagttgtcccacaccaaggtcagcgactggcaggttctctacaagactgtgtacagtgccctgggcctgagggatgcctgccgctccctgccgcagtccatccagctctttcgggacattgcccaagagttctctgatgacctgcaccatatcgccagcctcattgggaaagtagtggactttgagggcagccttgctgaaaatcgcttcacagtcctccccaacatagatcctgaaattgatgagaaaaagcgaagactgatgggacttcccagtttccttactgaggttgcccgcaaggagctggagaatctggactcccgtattccttcatgcagtgtcatctacatccctctgattggcttccttctttctattccccgcctgccttccatggtagaggccagtgactttgagattaatggactggacttcatgtttctctcagaggagaagctgcactatcgtagtgcccgaaccaaggagctggatgcattgctgggggacctgcactgcgagatccgggaccaggagacgctgctgatgtaccagctacagtgccaggtgctggcacgagcagctgtcttaacccgagtattggaccttgcctcccgcctggacgtcctgctggctcttgccagtgctgcccgggactatggctactcaaggccgcgttactccccacaagtccttggggtacgaatccagaatggcagacatcctctgatggaactctgtgcccgaacctttgtgcccaactccacagaatgtggtggggacaaagggagggtcaaagtcatcactggacccaactcatcagggaagagcatatacctcaaacaggtaggcttgatcacattcatggccctggtaggcagctttgtgccagcagaggaggccgaaattggggcagtagacgccatcttcacacgaattcatagctgcgaatccatctcccttggcctctccaccttcatgatcgacctcaaccaggtggcgaaagcagtgaacaatgccactgcacagtcgctggtccttattgatgaatttggaaagggaaccaacacggtggatgggctcgcgcttctggccgctgtgctccgacactggctggcacgtggacccacatgcccccacatctttgtggccaccaactttctgagccttgttcagctacaactgctgccacaagggcccctggtgcagtatttgaccatggagacctgtgaggatggcaacgatcttgtcttcttctatcaggtttgcgaaggtgttgcgaaggccagccatgcctcccacacagctgcccaggctgggcttcctgacaagcttgtggctcgtggcaaggaggtctcagacttgatccgcagtggaaaacccatcaagcctgtcaaggatttgctaaagaagaaccaaatggaaaattgccagacattagtggataagtttatgaaactggatttggaagatcctaacctggacttgaacgttttcatgagccaggaagtgctgcctgctgccaccagcatcctctgagagtccttccagtgtcctccccagcctcctgagactccggtgggctgccatgccctctttgtttccttatctccctcagacgcagagtttttagtttctctaga

SEQ ID NO: 156135 - DNA, 857 bp, Homo sapiens
  Payload ID: 10643
  Gene Symbol: MSH5
  Gene Name: mutS homolog 5
  ENST ID: ENST00000484309
  CDS Start-End: 1-501
ggctactcaaggccgcgttactccccacaagtccttggggtacgaatccagaatggcagacatcctctgatggaactctgtgcccgaacctttgtgcccaactccacagaatgtggtggggacaaagggagggtcaaagtcatcactggacccaactcatcagggaagagcatatacctcaaacaggtggcgaaagcagtgaacaatgccactgcacagtcgctggtccttattgatgaatttggaaagggaaccaacacggtggatgggctcgcgcttctggccgctgtgctccgacactggctggcacgtggacccacatgcccccacatctttgtggccaccaactttctgagccttgttcagctacaactgctgccacaagggcccctggtgcagtatttggattggccaagggtttcaggacaggaaggaggtttgcgaaggtgttgcgaaggccagccatgcctcccacacagctgcccaggctgggcttcctgacaagcttgtggctcgtggcaaggaggtctcagacttgatccgcagtggaaaacccatcaagcctgtcaaggatttgctaaagaagaaccaaatggaaaattgccagacattagtggataagtttatgaaactggatttggaagatcctaacctggacttgaacgttttcatgagccaggaagtgctgcctgctgccaccagcatcctctgagagtccttccagtgtcctccccagcctcctgagactccggtgggctgccatgccctctttgtttccttatctccctcagacgcagagtttttagtttctctagaaattttgtttcatattaggaataaagtttattttgaagaaa

SEQ ID NO: 156136 - DNA, 857 bp, Homo sapiens
  Payload ID: 10643
  Gene Symbol: MSH5
  Gene Name: mutS homolog 5
  ENST ID: ENST00000486024
  CDS Start-End: 1-501
ggctactcaaggccgcgttactccccacaagtccttggggtacgaatccagaatggcagacatcctctgatggaactctgtgcccgaacttttgtgcccaactccacagaatgtggtggggacaaagggagggtcaaagtcatcactggacccaactcatcagggaagagcatatacctcaaacaggtggcgaaagcagtgaacaatgccactgcacagtcgctggtccttattgatgaatttggaaagggaaccaacacggtggatgggctcgcgcttctggccgctgtgctccgacactggctggcacgtggacccacatgcccccacatctttgtggccaccaactttctgagccttgttcagctacagctgctgccacaagggcccctggtgcagtatttggattggccaagggtttcaggacaggaaggaggtttgcgaaggtgttgcgaaggccagccatgcctcccacacagctgcccaggctgggcttcctgacaagcttgtggctcgtggcaaggaggtctcagacttgatccgcagtggaaaacccatcaagcctgtcaaggatttgctaaagaagaaccaaatggaaaattgccagacattagtggataagtttatgaaactggatttggaagatcctaacctggacttgaacgttttcatgagccaggaagtgctgcctgctgccaccagcatcctctgagagtccttccagtgtcctccccagcctcctgagactccggtgggctgccatgccctctttgtttccttatctccctcagacgcagagtttttagtttctctagaaattttgtttcatattaggaataaagtttattttgaagaaa

SEQ ID NO: 156137 - DNA, 277 bp, Homo sapiens
  Payload ID: 10643
  Gene Symbol: MSH5
  Gene Name: mutS homolog 5
  ENST ID: ENST00000462922
  CDS Start-End: 1-144
actgtgtacagtgccctgggcctgagggatgcctgccgctccctgccgcagtccatccagctctttcgggacattgcccaagagttctctgatgacctgcaccatatcgccagcctcattgggaaagtaaaaagcgaagactgatgggacttcccagtttccttactgaggttgcccgcaaggagctggagaatctggactcccgtattccttcatgcagtgtcatctacatccctctgattggcttccttctttctattccccgcctgccttccat

SEQ ID NO: 156138 - DNA, 857 bp, Homo sapiens; identical to SEQ ID NO: 156135
  Payload ID: 10643
  Gene Symbol: MSH5
  Gene Name: mutS homolog 5
  ENST ID: ENST00000497253
  CDS Start-End: 1-501

SEQ ID NO: 156139 - DNA, 857 bp, Homo sapiens; identical to SEQ ID NO: 156135
  Payload ID: 10643
  Gene Symbol: MSH5
  Gene Name: mutS homolog 5
  ENST ID: ENST00000492052
  CDS Start-End: 206-355

SEQ ID NO: 156140 - DNA, 857 bp, Homo sapiens; identical to SEQ ID NO: 156135
  Payload ID: 10643
  Gene Symbol: MSH5
  Gene Name: mutS homolog 5
  ENST ID: ENST00000469938
  CDS Start-End: 1-501

SEQ ID NO: 156141 - DNA, 857 bp, Homo sapiens; identical to SEQ ID NO: 156135
  Payload ID: 10643
  Gene Symbol: MSH5
  Gene Name: mutS homolog 5
  ENST ID: ENST00000471854
  CDS Start-End: 1-501

SEQ ID NO: 156142 - DNA, 326 bp, Homo sapiens; identical to SEQ ID NO: 156081
  Payload ID: 10643
  Gene Symbol: MSH5
  Gene Name: mutS homolog 5
  ENST ID: ENST00000471718
  CDS Start-End: 56-326

SEQ ID NO: 156143 - DNA, 330 bp, Homo sapiens
  Payload ID: 10643
  Gene Symbol: MSH5
  Gene Name: mutS homolog 5
  ENST ID: ENST00000480377
  CDS Start-End: 60-330
cgtggcggtcggtcagcggggcgttctcccacctgtagcgactcagagcctccaagctcatggcctccttaggagcgaacccaaggaggacaccgcagggaccgagacctggggcggcctcctccggcttccccagcccggccccagtgccgggccccagggaggccgaggaggaggaagtcgaggaggaggaggagctggccgagatccatctgtgtgtgctgtggaattcaggatacttgggcattgcctactatgatactagtgactccactatccacttcatgccagatgccccagaccacgagagcctcaagcttctccagagag

SEQ ID NO: 156144 - DNA, 7476 bp, Homo sapiens
  Payload ID: 10644
  Gene Symbol: MSH6
  Gene Name: mutS homolog 6
  Uniprot ID: P52701
  ENST ID: ENST00000234420
  CDS Start-End: 153-4235
ggcgaggcgcctgttgattggccactggggcccgggttcctccggcggagcgcgcctccccccagatttcccgccagcaggagccgcgcggtagatgcggtgcttttaggagctccgtccgacagaacggttgggccttgccggctgtcggtatgtcgcgacagagcaccctgtacagcttcttccccaagtctccggcgctgagtgatgccaacaaggcctcggccagggcctcacgcgaaggcggccgtgccgccgctgcccccggggcctctccttccccaggcggggatgcggcctggagcgaggctgggcctgggcccaggcccttggcgcgctccgcgtcaccgcccaaggcgaagaacctcaacggagggctgcggagatcggtagcgcctgctgcccccaccagttgtgacttctcaccaggagatttggtttgggccaagatggagggttacccctggtggccttgtctggtttacaaccacccctttgatggaacattcatccgcgagaaagggaaatcagtccgtgttcatgtacagttttttgatgacagcccaacaaggggctgggttagcaaaaggcttttaaagccatatacaggttcaaaatcaaaggaagcccagaagggaggtcatttttacagtgcaaagcctgaaatactgagagcaatgcaacgtgcagatgaagccttaaataaagacaagattaagaggcttgaattggcagtttgtgatgagccctcagagccagaagaggaagaagagatggaggtaggcacaacttacgtaacagataagagtgaagaagataatgaaattgagagtgaagaggaagtacagcctaagacacaaggatctaggcgaagtagccgccaaataaaaaaacgaagggtcatatcagattctgagagtgacattggtggctctgatgtggaatttaagccagacactaaggaggaaggaagcagtgatgaaataagcagtggagtgggggatagtgagagtgaaggcctgaacagccctgtcaaagttgctcgaaagcggaagagaatggtgactggaaatggctctcttaaaaggaaaagctctaggaaggaaacgccctcagccaccaaacaagcaactagcatttcatcagaaaccaagaatactttgagagctttctctgcccctcaaaattctgaatcccaagcccacgttagtggaggtggtgatgacagtagtcgccctactgtttggtatcatgaaactttagaatggcttaaggaggaaaagagaagagatgagcacaggaggaggcctgatcaccccgattttgatgcatctacactctatgtgcctgaggatttcctcaattcttgtactcctgggatgaggaagtggtggcagattaagtctcagaactttgatcttgtcatctgttacaaggtggggaaattttatgagctgtaccacatggatgctcttattggagtcagtgaactggggctggtattcatgaaaggcaactgggcccattctggctttcctgaaattgcatttggccgttattcagattccctggtgcagaagggctataaagtagcacgagtggaacagactgagactccagaaatgatggaggcacgatgtagaaagatggcacatatatccaagtatgatagagtggtgaggagggagatctgtaggatcattaccaagggtacacagacttacagtgtgctggaaggtgatccctctgagaactacagtaagtatcttcttagcctcaaagaaaaagaggaagattcttctggccatactcgtgcatatggtgtgtgctttgttgatacttcactgggaaagtttttcataggtcagttttcagatgatcgccattgttcgagatttaggactctagtggcacactatcccccagtacaagttttatttgaaaaaggaaatctctcaaaggaaactaaaacaattctaaagagttcattgtcctgttctcttcaggaaggtctgatacccggctcccagttttgggatgcatccaaaactttgagaactctccttgaggaagaatattttagggaaaagctaagtgatggcattggggtgatgttaccccaggtgcttaaaggtatgacttcagagtctgattccattgggttgacaccaggagagaaaagtgaattggccctctctgctctaggtggttgtgtcttctacctcaaaaaatgccttattgatcaggagcttttatcaatggctaattttgaagaatatattcccttggattctgacacagtcagcactacaagatctggtgctatcttcaccaaagcctatcaacgaatggtgctagatgcagtgacattaaacaacttggagatttttctgaatggaacaaatggttctactgaaggaaccctactagagagggttgatacttgccatactccttttggtaagcggctcctaaagcaatggctttgtgccccactctgtaaccattatgctattaatgatcgtctagatgccatagaagacctcatggttgtgcctgacaaaatctccgaagttgtagagcttctaaagaagcttccagatcttgagaggctactcagtaaaattcataatgttgggtctcccctgaagagtcagaaccacccagacagcagggctataatgtatgaagaaactacatacagcaagaagaagattattgattttctttctgctctggaaggattcaaagtaatgtgtaaaattatagggatcatggaagaagttgctgatggttttaagtctaaaatccttaagcaggtcatctctctgcagacaaaaaatcctgaaggtcgttttcctgatttgactgtagaattgaaccgatgggatacagcctttgaccatgaaaaggctcgaaagactggacttattactcccaaagcaggctttgactctgattatgaccaagctcttgctgacataagagaaaatgaacagagcctcctggaatacctagagaaacagcgcaacagaattggctgtaggaccatagtctattgggggattggtaggaaccgttaccagctggaaattcctgagaatttcaccactcgcaatttgccagaagaatacgagttgaaatctaccaagaagggctgtaaacgatactggaccaaaactattgaaaagaagttggctaatctcataaatgctgaagaacggagggatgtatcattgaaggactgcatgcggcgactgttctataactttgataaaaattacaaggactggcagtctgctgtagagtgtatcgcagtgttggatgttttactgtgcctggctaactatagtcgagggggtgatggtcctatgtgtcgcccagtaattctgttgccggaagataccccccccttcttagagcttaaaggatcacgccatccttgcattacgaagactttttttggagatgattttattcctaatgacattctaataggctgtgaggaagaggagcaggaaaatggcaaagcctattgtgtgcttgttactggaccaaatatggggggcaagtctacgcttatgagacaggctggcttattagctgtaatggcccagatgggttgttacgtccctgctgaagtgtgcaggctcacaccaattgatagagtgtttactagacttggtgcctcagacagaataatgtcaggtgaaagtacattttttgttgaattaagtgaaactgccagcatactcatgcatgcaacagcacattctctggtgcttgtggatgaattaggaagaggtactgcaacatttgatgggacggcaatagcaaatgcagttgttaaagaacttgctgagactataaaatgtcgtacattattttcaactcactaccattcattagtagaagattattctcaaaatgttgctgtgcgcctaggacatatggcatgcatggtagaaaatgaatgtgaagaccccagccaggagactattacgttcctctataaattcattaagggagcttgtcctaaaagctatggctttaatgcagcaaggcttgctaatctcccagaggaagttattcaaaagggacatagaaaagcaagagaatttgagaagatgaatcagtcactacgattatttcgggaagtttgcctggctagtgaaaggtcaactgtagatgctgaagctgtccataaattgctgactttgattaaggaattatagactgactacattggaagctttgagttgacttctgacaaaggtggtaaattcagacaacattatgatctaataaactttattttttaaaaatgaccatttttccattttctttctaggaaattaaacccttttaattcttatctaccttctacataatggttattgaatactccacaatatattaagtctagatgttatggtacatgcatacactttcaggctgttttatacccactgtcaccaatacacataaatgggggaggaaaagctatgaaactgtatagggctgtatatatacttgtctcagcttaatgcaggaaattggtttaatttccagcagttttgtctaaactgttcaaaaaaaaactatgaacagagttcaaatacaggactgtttgttttgaagagactttctaaagtgtacttaaaacatagtagttttttacctttcacaaaactgagttacaagaatacttttgttttacagtgcatcccttcctaggaagtctcattaaaacactcactttttctaggggtgattttgaatgctgcacagggaagggaaggaaataatagtcttaacttttcttaaaggataccagaaacattgctggatataatttaagattagtgttttctctttcatagaaagaacgtacatactgggacatgagtacagttacagcaagtctaggtgtgctaacaaaacagggcacattcaagtacagtaagattttgcttgaaattaaaaacaaactacatgagattaaagcattaaaatcatatttctcaatctgaatacatgttaaaaaaaaaaaatcaaaaggaacgcagaagtgctagctcacatttttaccatattacaaaagcaattggtacccatgtccataaaggcagcaacaaagctgcttgtctattgaagattactactgcaaattggactgcattcaatgctagttgtaaaaacaccagcttttcagaagttggtatctgtacaaaattgcagcttattttcttcacttctgtcccttcaagtctttacacagtaatgctaaaacacccagctttgagatcctgagtcaatatattgccactttctttttggtagcttgagcttcatagtgtcaactgaccttgtgtatccatttttaatacagtctcttcctgtagcatgggcaaatattttaaatcttcttccaaaaaagtgttttaagttatgatgttacaatggcaggactttttctttagggaaggaattcagttgtgctgcaatgtattagattctataggtggagcagagtcatatagtgtatctgtatcatgtgtaggctcaccagctaatgtacaaggattagacagtgttccagcaccacagtcacagaaaaacctaaagcaaaatgaaacccaaatattagaaaagtgagggggaaagtaattgggtaatatatcaagcaagtgtgctacatacctatcatgtctaataaactctacatcatgtccctgatggcacttcttaatgcagttcacacatatggcatttcgatctgtggtgttacaagtatgacatctaaaaagcaaaagcttaaattacttttctcaaacatgtcattaatgcaaaacattccattctgtttatatattactatgacctttggctttaagaggaccaaaacaaaattctttgtggctccagcccagattaattctgaaaaggaactttaatggagtaagtgattttcctgtcatctgtgtcttcggagggaagagaaatgatttgtaaattgtataaaggcagttctttccactttaaaagcctctcaaatgtttctgggctgaaaacaatttttggaggcgtgaagagtcaaaactgtcacagtgactgggatatatcaaacacttaaccccgacatctttaccttgaaatttctaggaaaacattacacaacatgagttacatgaatgacatcagttactgtagcattaggtttttccatagttatggtctttgttttgttttgtagagacagggtctccctatgttgcccaggctggtttagaactcctgggctccagtgatcctcccacttcagcctcccaaagtgctaggattacaggcataagccaccacgcctacccacagttacagtcttaaacacgatcttcaagtagattgatgataaaattttcagttagttatagtctcaacaccggcaaatagccaaaaatgctaggcattgctaatttaaaaaggaaatcagtcttcctcttttcaggactcaaatatatttctaagttacctgtagaaatcatgcatgggatagctggtataacttgatattttatataaacattggcctctactaacagccttttctatggcatcttgattgttcattattttgttatctgtaataaaagaaagaataagtaaaaattcagaggaatgttaatattttaaaaaccaaagattataggattattctaacagaagagccactatttttaagagctttaaatgaagctaaccaatgaagtaattgtaagaaatcagctaagaatagaattttccttgtataagatactccaaccatttagaaccaaagctctgtttctttcaaaatctatcttaaactgttgctaacttggagagtgacataaggaatcaagttataaaacggcttctgattatctttcatggcatattgcatatatttataggtatagcagactccaacatacctttcattgtcacattaacaccagatgctaaaaataagcctccaaaccggttgttaaaaatctgattgccttctagtgttgcagttgcgtgatttgtaatttcaatacctgaagtaaaatttacaaacaagtagatacatcactttatactgcttcttaaaaacctgaaattagcaagcaaatgtaaactgcttcttttatagaagtacattaaccctcttaatgtctactgaataaaatgtagatacctatttcaaccaccaacagtaacattcacttatcaatgactatggtcaaaactgcaattaactttcgcaccaacctaactgtcttaaagtttaaatacatgatacttggatttcatttgcatccattttaacatctctttttctgttgcagatttaaactggtaaattcatctgaggaattgaatctatctgtattcctagtggtaatacaagcctgcatttattctatcccaataaatgtttcataatcacga

SEQ ID NO: 156145 - DNA, 491 bp, Homo sapiens
  Payload ID: 10644
  Gene Symbol: MSH6
  Gene Name: mutS homolog 6
  ENST ID: ENST00000420813
  CDS Start-End: 189-491
gagtccggtggtgtggggtgcgaaaggaggttcctcggccggcgcggagatagtgagttggggctccagtagtcgatcgaggtagacacttagaggtagttaagagccgcggtcgccgagacgccttggggacggtgggccttcggcctagttgtgacttctcaccaggagatttggtttgggccaagatggagggttacccctggtggccttgtctggtttacaaccacccctttgatggaacattcatccgcgagaaagggaaatcagtccgtgttcatgtacagttttttgatgacagcccaacaaggggctgggttagcaaaaggcttttaaagccatatacaggttcaaaatcaaaggaagcccagaagggaggtcatttttacagtgcaaagcctgaaatactgagagcaatgcaacgtgcagatgaagccttaaataaagacaagattaagaggcttgaattggcagtttgtgatgagccctca

SEQ ID NO: 156146 - DNA, 578 bp, Homo sapiens
  Payload ID: 10644
  Gene Symbol: MSH6
  Gene Name: mutS homolog 6
  ENST ID: ENST00000455383
  CDS Start-End: 232-578
gtgcacggcctggccctgggctcggaggaggcggggccgcagagttggcttgaatgagtgcaggggtcgagtctggagcatttgggggtgtagcttgtaaacagggtcggaggagagaggctgtgcaggaagagggctgcaggggagacgcggagagttcgggccttttggagggaggagacgcgtcccgccagttgtgacttctcaccaggagatttggtttgggccaagatggagggttacccctggtggccttgtctggtttacaaccacccctttgatggaacattcatccgcgagaaagggaaatcagtccgtgttcatgtacagttttttgatgacagcccaacaaggggctgggttagcaaaaggcttttaaagccatatacaggttcaaaatcaaaggaagcccagaagggaggtcatttttacagtgcaaagcctgaaatactgagagcaatgcaacgtgcagatgaagccttaaataaagacaagattaagaggcttgaattggcagtttgtgatgagccctcagagccagaagaggaagaagagatggaggtaggcacaacttacgt

SEQ ID NO: 156147 - DNA, 4158 bp, Homo sapiens
  Payload ID: 10644
  Gene Symbol: MSH6
  Gene Name: mutS homolog 6
  ENST ID: ENST00000445503
  CDS Start-End: 153-635
ggcgaggcgcctgttgattggccactggggcccgggttcctccggcggagcgcgcctccccccagatttcccgccagcaggagccgcgcggtagatgcggtgcttttaggagctccgtccgacagaacggttgggccttgccggctgtcggtatgtcgcgacagagcaccctgtacagcttcttccccaagtctccggcgctgagtgatgccaacaaggcctcggccagggcctcacgcgaaggcggccgtgccgccgctgcccccggggcctctccttccccaggcggggatgcggcctggagcgaggctgggcctgggcccaggcccttggcgcgctccgcgtcaccgcccaaggcgaagaacctcaacggagggctgcggagatcggtagcgcctgctgcccccaccagttgtgacttctcaccaggagatttggtttgggccaagatggagggttacccctggtggccttgtctggtttacaaccacccctttgatggaacattcatccgcgagaaagggaaatcagtccgtgttcatgtacagttttttgatgacagcccaacaaggggctgggttagcaaaaggcttttaaagccatatacaggtaggcacaacttacgtaacagataagagtgaagaagataatgaaattgagagtgaagaggaagtacagcctaagacacaaggatctaggcgaagtagccgccaaataaaaaaacgaagggtcatatcagattctgagagtgacattggtggctctgatgtggaatttaagccagacactaaggaggaaggaagcagtgatgaaataagcagtggagtgggggatagtgagagtgaaggcctgaacagccctgtcaaagttgctcgaaagcggaagagaatggtgactggaaatggctctcttaaaaggaaaagctctaggaaggaaacgccctcagccaccaaacaagcaactagcatttcatcagaaaccaagaatactttgagagctttctctgcccctcaaaattctgaatcccaagcccacgttagtggaggtggtgatgacagtagtcgccctactgtttggtatcatgaaactttagaatggcttaaggaggaaaagagaagagatgagcacaggaggaggcctgatcaccccgattttgatgcatctacactctatgtgcctgaggatttcctcaattcttgtactcctgggatgaggaagtggtggcagattaagtctcagaactttgatcttgtcatctgttacaaggtggggaaattttatgagctgtaccacatggatgctcttattggagtcagtgaactggggctggtattcatgaaaggcaactgggcccattctggctttcctgaaattgcatttggccgttattcagattccctggtgcagaagggctataaagtagcacgagtggaacagactgagactccagaaatgatggaggcacgatgtagaaagatggcacatatatccaagtatgatagagtggtgaggagggagatctgtaggatcattaccaagggtacacagacttacagtgtgctggaaggtgatccctctgagaactacagtaagtatcttcttagcctcaaagaaaaagaggaagattcttctggccatactcgtgcatatggtgtgtgctttgttgatacttcactgggaaagtttttcataggtcagttttcagatgatcgccattgttcgagatttaggactctagtggcacactatcccccagtacaagttttatttgaaaaaggaaatctctcaaaggaaactaaaacaattctaaagagttcattgtcctgttctcttcaggaaggtctgatacccggctcccagttttgggatgcatccaaaactttgagaactctccttgaggaagaatattttagggaaaagctaagtgatggcattggggtgatgttaccccaggtgcttaaaggtatgacttcagagtctgattccattgggttgacaccaggagagaaaagtgaattggccctctctgctctaggtggttgtgtcttctacctcaaaaaatgccttattgatcaggagcttttatcaatggctaattttgaagaatatattcccttggattctgacacagtcagcactacaagatctggtgctatcttcaccaaagcctatcaacgaatggtgctagatgcagtgacattaaacaacttggagatttttctgaatggaacaaatggttctactgaaggaaccctactagagagggttgatacttgccatactccttttggtaagcggctcctaaagcaatggctttgtgccccactctgtaaccattatgctattaatgatcgtctagatgccatagaagacctcatggttgtgcctgacaaaatctccgaagttgtagagcttctaaagaagcttccagatcttgagaggctactcagtaaaattcataatgttgggtctcccctgaagagtcagaaccacccagacagcagggctataatgtatgaagaaactacatacagcaagaagaagattattgattttctttctgctctggaaggattcaaagtaatgtgtaaaattatagggatcatggaagaagttgctgatggttttaagtctaaaatccttaagcaggtcatctctctgcagacaaaaaatcctgaaggtcgttttcctgatttgactgtagaattgaaccgatgggatacagcctttgaccatgaaaaggctcgaaagactggacttattactcccaaagcaggctttgactctgattatgaccaagctcttgctgacataagagaaaatgaacagagcctcctggaatacctagagaaacagcgcaacagaattggctgtaggaccatagtctattgggggattggtaggaaccgttaccagctggaaattcctgagaatttcaccactcgcaatttgccagaagaatacgagttgaaatctaccaagaagggctgtaaacgatactggaccaaaactattgaaaagaagttggctaatctcataaatgctgaagaacggagggatgtatcattgaaggactgcatgcggcgactgttctataactttgataaaaattacaaggactggcagtctgctgtagagtgtatcgcagtgttggatgttttactgtgcctggctaactatagtcgagggggtgatggtcctatgtgtcgcccagtaattctgttgccggaagataccccccccttcttagagcttaaaggatcacgccatccttgcattacgaagactttttttggagatgattttattcctaatgacattctaataggctgtgaggaagaggagcaggaaaatggcaaagcctattgtgtgcttgttactggaccaaatatggggggcaagtctacgcttatgagacaggctggcttattagctgtaatggcccagatgggttgttacgtccctgctgaagtgtgcaggctcacaccaattgatagagtgtttactagacttggtgcctcagacagaataatgtcaggtgaaagtacattttttgttgaattaagtgaaactgccagcatactcatgcatgcaacagcacattctctggtgcttgtggatgaattaggaagaggtactgcaacatttgatgggacggcaatagcaaatgcagttgttaaagaacttgctgagactataaaatgtcgtacattattttcaactcactaccattcattagtagaagattattctcaaaatgttgctgtgcgcctaggacatatggcatgcatggtagaaaatgaatgtgaagaccccagccaggagactattacgttcctctataaattcattaagggagcttgtcctaaaagctatggctttaatgcagcaaggcttgctaatctcccagaggaagttattcaaaagggacatagaaaagcaagagaatttgagaagatgaatcagtcactacgattatttcgggaagtttgcctggctagtgaaaggtcaactgtagatgctgaagctgtccataaattgctgactttgattaaggaattatagactgactacattggaagctttgagttgacttctgacaaaggtggtaaattcagacaacattatgatctaataaactttattttttaaaaatga

SEQ ID NO: 156148 - DNA, 548 bp, Homo sapiens
  Payload ID: 10644
  Gene Symbol: MSH6
  Gene Name: mutS homolog 6
  ENST ID: ENST00000411819
  CDS Start-End: 96-548
aattgggcggggcggggccgtggggagccgaagtgctgggatccggctgggtccttcgttgtgacttctcaccaggagatttggtttgggccaagatggagggttacccctggtggccttgtctggtttacaaccacccctttgatggaacattcatccgcgagaaagggaaatcagtccgtgttcatgtacagttttttgatgacagcccaacaaggggctgggttagcaaaaggcttttaaagccatatacaggttcaaaatcaaaggaagcccagaagggaggtcatttttacagtgcaaagcctgaaatactgagagcaatgcaacgtgcagatgaagccttaaataaagacaagattaagaggcttgaattggcagtttgtgatgagccctcagagccagaagaggaagaagagatggaggtaggcacaacttacgtaacagataagagtgaagaagataatgaaattgagagtgaagaggaagtacagcctaagacacaaggatctaggcgaagtagccgccaaataaaaaaacgaagggtc

SEQ ID NO: 156149 - DNA, 846 bp, Homo sapiens
  Payload ID: 10644
  Gene Symbol: MSH6
  Gene Name: mutS homolog 6
  ENST ID: ENST00000456246
  CDS Start-End: 107-421
ggagcgcgcctccccccagatttcccgccagcaggagccgcgcggtagatgcggtgcttttaggagctccgtccgacagaacggttgggccttgccggctgtcggtatgtcgcgacagagcaccctgtacagcttcttccccaagtctccggcgctgagtgatgccaacaaggcctcggccagggcctcacgcgaaggcggccgtgccgccgctgcccccggggcctctccttccccaggcggggatgcggcctggagcgaggctgggcctgggcccaggcccttggcgcgctccgcgtcaccgcccaaggcgaagaacctcaacggagggctgcggagatcggtagcgcctgctgcccccaccaggttcaaaatcaaaggaagcccagaagggaggtcatttttacagtgcaaagcctgaaatactgagagcaatgcaacgtgcagatgaagccttaaataaagacaagattaagaggcttgaattggcagtttgtgatgagccctcagagccagaagaggaagaagagatggaggtaggcacaacttacgtaacagataagagtgaagaagataatgaaattgagagtgaagaggaagtacagcctaagacacaaggatctaggcgaagtagccgccaaataaaaaaacgaagggtcatatcagattctgagagtgacattggtggctctgatgtggaatttaagccagacactaaggaggaaggaagcagtgatgaaataagcagtggagtgggggatagtgagagtgaaggcctgaacagccctgtcaaagttgctcgaaagcggaagagaatggtgactggaaatggctctcttaaaagga

SEQ ID NO: 156150 - DNA, 4055 bp, Homo sapiens
  Payload ID: 10644
  Gene Symbol: MSH6
  Gene Name: mutS homolog 6
  Uniprot ID: P52701
  ENST ID: ENST00000538136
  CDS Start-End: 794-3970
gagtccggtggtgtggggtgcgaaaggaggttcctcggccggcgcggagatagtgagttggggctccagtagtcgatcgaggtagacacttagaggtagttaagagccgcggtcgccgagacgccttggggacggtgggccttcggcctagttgtgacttctcaccaggagatttggtttgggccaagatggagggttacccctggtggccttgtctggtttacaaccacccctttgatggaacattcatccgcgagaaagggaaatcagtccgtgttcatgtacagttttttgatgacagcccaacaaggggctgggttagcaaaaggcttttaaagccatatacaggttcaaaatcaaaggaagcccagaagggaggtcatttttacagtgcaaagcctgaaatactgagagcaatgcaacgtgcagatgaagccttaaataaagacaagattaagaggcttgaattggcagtttgtgatgagccctcagagccagaagaggaagaagagatggaggcacaacttacgtaacagataagagtgaagaagataatgaaattgagagtgaagaggaagtacagcctaagacacaaggatctaggcgaagtagccgccaaataaaaaaacgaagggtcatatcagattctgagagtgacattggtggctctgatgtggaatttaagccagacactaaggaggaaggaagcagtgatgaaataagcagtggagtgggggatagtgagagtgaaggcctgaacagccctgtcaaagttgctcgaaagcggaagagaatggtgactggaaatggctctcttaaaaggaaaagctctaggaaggaaacgccctcagccaccaaacaagcaactagcatttcatcagaaaccaagaatactttgagagctttctctgcccctcaaaattctgaatcccaagcccacgttagtggaggtggtgatgacagtagtcgccctactgtttggtatcatgaaactttagaatggcttaaggaggaaaagagaagagatgagcacaggaggaggcctgatcaccccgattttgatgcatctacactctatgtgcctgaggatttcctcaattcttgtactcctgggatgaggaagtggtggcagattaagtctcagaactttgatcttgtcatctgttacaaggtggggaaattttatgagctgtaccacatggatgctcttattggagtcagtgaactggggctggtattcatgaaaggcaactgggcccattctggctttcctgaaattgcatttggccgttattcagattccctggtgcagaagggctataaagtagcacgagtggaacagactgagactccagaaatgatggaggcacgatgtagaaagatggcacatatatccaagtatgatagagtggtgaggagggagatctgtaggatcattaccaagggtacacagacttacagtgtgctggaaggtgatccctctgagaactacagtaagtatcttcttagcctcaaagaaaaagaggaagattcttctggccatactcgtgcatatggtgtgtgctttgttgatacttcactgggaaagtttttcataggtcagttttcagatgatcgccattgttcgagatttaggactctagtggcacactatcccccagtacaagttttatttgaaaaaggaaatctctcaaaggaaactaaaacaattctaaagagttcattgtcctgttctcttcaggaaggtctgatacccggctcccagttttgggatgcatccaaaactttgagaactctccttgaggaagaatattttagggaaaagctaagtgatggcattggggtgatgttaccccaggtgcttaaaggtatgacttcagagtctgattccattgggttgacaccaggagagaaaagtgaattggccctctctgctctaggtggttgtgtcttctacctcaaaaaatgccttattgatcaggagcttttatcaatggctaattttgaagaatatattcccttggattctgacacagtcagcactacaagatctggtgctatcttcaccaaagcctatcaacgaatggtgctagatgcagtgacattaaacaacttggagatttttctgaatggaacaaatggttctactgaaggaaccctactagagagggttgatacttgccatactccttttggtaagcggctcctaaagcaatggctttgtgccccactctgtaaccattatgctattaatgatcgtctagatgccatagaagacctcatggttgtgcctgacaaaatctccgaagttgtagagcttctaaagaagcttccagatcttgagaggctactcagtaaaattcataatgttgggtctcccctgaagagtcagaaccacccagacagcagggctataatgtatgaagaaactacatacagcaagaagaagattattgattttctttctgctctggaaggattcaaagtaatgtgtaaaattatagggatcatggaagaagttgctgatggttttaagtctaaaatccttaagcaggtcatctctctgcagacaaaaaatcctgaaggtcgttttcctgatttgactgtagaattgaaccgatgggatacagcctttgaccatgaaaaggctcgaaagactggacttattactcccaaagcaggctttgactctgattatgaccaagctcttgctgacataagagaaaatgaacagagcctcctggaatacctagagaaacagcgcaacagaattggctgtaggaccatagtctattgggggattggtaggaaccgttaccagctggaaattcctgagaatttcaccactcgcaatttgccagaagaatacgagttgaaatctaccaagaagggctgtaaacgatactggaccaaaactattgaaaagaagttggctaatctcataaatgctgaagaacggagggatgtatcattgaaggactgcatgcggcgactgttctataactttgataaaaattacaaggactggcagtctgctgtagagtgtatcgcagtgttggatgttttactgtgcctggctaactatagtcgagggggtgatggtcctatgtgtcgcccagtaattctgttgccggaagataccccccccttcttagagcttaaaggatcacgccatccttgcattacgaagactttttttggagatgattttattcctaatgacattctaataggctgtgaggaagaggagcaggaaaatggcaaagcctattgtgtgcttgttactggaccaaatatggggggcaagtctacgcttatgagacaggctggcttattagctgtaatggcccagatgggttgttacgtccctgctgaagtgtgcaggctcacaccaattgatagagtgtttactagacttggtgcctcagacagaataatgtcaggtgaaagtacattttttgttgaattaagtgaaactgccagcatactcatgcatgcaacagcacattctctggtgcttgtggatgaattaggaagaggtactgcaacatttgatgggacggcaatagcaaatgcagttgttaaagaacttgctgagactataaaatgtcgtacattattttcaactcactaccattcattagtagaagattattctcaaaatgttgctgtgcgcctaggacatatggcatgcatggtagaaaatgaatgtgaagaccccagccaggagactattacgttcctctataaattcattaagggagcttgtcctaaaagctatggctttaatgcagcaaggcttgctaatctcccagaggaagttattcaaaagggacatagaaaagcaagagaatttgagaagatgaatcagtcactacgattatttcgggaagtttgcctggctagtgaaaggtcaactgtagatgctgaagctgtccataaattgctgactttgattaaggaattatagactgactacattggaagctttgagttgacttctgacaaaggtggtaaattcagacaacattatgatctaataaactttatttttt

SEQ ID NO: 156151 - DNA, 3930 bp, Homo sapiens
  Payload ID: 10644
  Gene Symbol: MSH6
  Gene Name: mutS homolog 6
  Uniprot ID: P52701
  ENST ID: ENST00000540021
  CDS Start-End: 153-3845
ggcgaggcgcctgttgattggccactggggcccgggttcctccggcggagcgcgcctccccccagatttcccgccagcaggagccgcgcggtagatgcggtgcttttaggagctccgtccgacagaacggttgggccttgccggctgtcggtatgtcgcgacagagcaccctgtacagcttcttccccaagtctccggcgctgagtgatgccaacaaggcctcggccagggcctcacgcgaaggcggccgtgccgccgctgcccccggggcctctccttccccaggcggggatgcggcctggagcgaggctgggcctgggcccaggcccttggcgcgctccgcgtcaccgcccaaggcgaagaacctcaacggagggctgcggagatcggtaggcacaacttacgtaacagataagagtgaagaagataatgaaattgagagtgaagaggaagtacagcctaagacacaaggatctaggcgaagtagccgccaaataaaaaaacgaagggtcatatcagattctgagagtgacattggtggctctgatgtggaatttaagccagacactaaggaggaaggaagcagtgatgaaataagcagtggagtgggggatagtgagagtgaaggcctgaacagccctgtcaaagttgctcgaaagcggaagagaatggtgactggaaatggctctcttaaaaggaaaagctctaggaaggaaacgccctcagccaccaaacaagcaactagcatttcatcagaaaccaagaatactttgagagctttctctgcccctcaaaattctgaatcccaagcccacgttagtggaggtggtgatgacagtagtcgccctactgtttggtatcatgaaactttagaatggcttaaggaggaaaagagaagagatgagcacaggaggaggcctgatcaccccgattttgatgcatctacactctatgtgcctgaggatttcctcaattcttgtactcctgggatgaggaagtggtggcagattaagtctcagaactttgatcttgtcatctgttacaaggtggggaaattttatgagctgtaccacatggatgctcttattggagtcagtgaactggggctggtattcatgaaaggcaactgggcccattctggctttcctgaaattgcatttggccgttattcagattccctggtgcagaagggctataaagtagcacgagtggaacagactgagactccagaaatgatggaggcacgatgtagaaagatggcacatatatccaagtatgatagagtggtgaggagggagatctgtaggatcattaccaagggtacacagacttacagtgtgctggaaggtgatccctctgagaactacagtaagtatcttcttagcctcaaagaaaaagaggaagattcttctggccatactcgtgcatatggtgtgtgctttgttgatacttcactgggaaagtttttcataggtcagttttcagatgatcgccattgttcgagatttaggactctagtggcacactatcccccagtacaagttttatttgaaaaaggaaatctctcaaaggaaactaaaacaattctaaagagttcattgtcctgttctcttcaggaaggtctgatacccggctcccagttttgggatgcatccaaaactttgagaactctccttgaggaagaatattttagggaaaagctaagtgatggcattggggtgatgttaccccaggtgcttaaaggtatgacttcagagtctgattccattgggttgacaccaggagagaaaagtgaattggccctctctgctctaggtggttgtgtcttctacctcaaaaaatgccttattgatcaggagcttttatcaatggctaattttgaagaatatattcccttggattctgacacagtcagcactacaagatctggtgctatcttcaccaaagcctatcaacgaatggtgctagatgcagtgacattaaacaacttggagatttttctgaatggaacaaatggttctactgaaggaaccctactagagagggttgatacttgccatactccttttggtaagcggctcctaaagcaatggctttgtgccccactctgtaaccattatgctattaatgatcgtctagatgccatagaagacctcatggttgtgcctgacaaaatctccgaagttgtagagcttctaaagaagcttccagatcttgagaggctactcagtaaaattcataatgttgggtctcccctgaagagtcagaaccacccagacagcagggctataatgtatgaagaaactacatacagcaagaagaagattattgattttctttctgctctggaaggattcaaagtaatgtgtaaaattatagggatcatggaagaagttgctgatggttttaagtctaaaatccttaagcaggtcatctctctgcagacaaaaaatcctgaaggtcgttttcctgatttgactgtagaattgaaccgatgggatacagcctttgaccatgaaaaggctcgaaagactggacttattactcccaaagcaggctttgactctgattatgaccaagctcttgctgacataagagaaaatgaacagagcctcctggaatacctagagaaacagcgcaacagaattggctgtaggaccatagtctattgggggattggtaggaaccgttaccagctggaaattcctgagaatttcaccactcgcaatttgccagaagaatacgagttgaaatctaccaagaagggctgtaaacgatactggaccaaaactattgaaaagaagttggctaatctcataaatgctgaagaacggagggatgtatcattgaaggactgcatgcggcgactgttctataactttgataaaaattacaaggactggcagtctgctgtagagtgtatcgcagtgttggatgttttactgtgcctggctaactatagtcgagggggtgatggtcctatgtgtcgcccagtaattctgttgccggaagataccccccccttcttagagcttaaaggatcacgccatccttgcattacgaagactttttttggagatgattttattcctaatgacattctaataggctgtgaggaagaggagcaggaaaatggcaaagcctattgtgtgcttgttactggaccaaatatggggggcaagtctacgcttatgagacaggctggcttattagctgtaatggcccagatgggttgttacgtccctgctgaagtgtgcaggctcacaccaattgatagagtgtttactagacttggtgcctcagacagaataatgtcaggtgaaagtacattttttgttgaattaagtgaaactgccagcatactcatgcatgcaacagcacattctctggtgcttgtggatgaattaggaagaggtactgcaacatttgatgggacggcaatagcaaatgcagttgttaaagaacttgctgagactataaaatgtcgtacattattttcaactcactaccattcattagtagaagattattctcaaaatgttgctgtgcgcctaggacatatggcatgcatggtagaaaatgaatgtgaagaccccagccaggagactattacgttcctctataaattcattaagggagcttgtcctaaaagctatggctttaatgcagcaaggcttgctaatctcccagaggaagttattcaaaagggacatagaaaagcaagagaatttgagaagatgaatcagtcactacgattatttcgggaagtttgcctggctagtgaaaggtcaactgtagatgctgaagctgtccataaattgctgactttgattaaggaattatagactgactacattggaagctttgagttgacttctgacaaaggtggtaaattcagacaacattatgatctaataaactttatttttt

SEQ ID NO: 156152 - DNA, 833 bp, Homo sapiens
  Payload ID: 10644
  Gene Symbol: MSH6
  Gene Name: mutS homolog 6
  ENST ID: ENST00000606499
  CDS Start-End: 681-833
gttagccaggatggtctggatctcctgacctcgtgatccgcccgcctgtgcctcccaaagtgttgggattacaggcgtgagccactgtgcccagcctccagcatgatttttttaggccgttcttttgtttgaaagaattcaactaaggatccactctgcctgcctgaccggtttcttcctttcttctctctcatcgggtcccgagttcccatgactgcagcttccagaagagcagagctttggtatcctactcacagcgccaaaactgcaggggccaaggaaagatacaaaattcttgtgtgcagcctcttttggactccagctcttgttctctcgctgaatcccaccgccaccccttcaagtcatcggctgtgattcacctgtgggtttctgaaggctagaagcttccacaatgagccaggaaacaagttctgattggctgggaacagacctctgctccaagattcagggctggcagtattccttctgttctggtggctcgatcttcattgctttcctctggacttaaacaccctgttgcccaggctggagtgcagtgatgcaatcatagctcacaatggcctcgaactcctgggctcaagccatcctcccgtgtcagactcccaagtagctgggattacagttgtgacttctcaccaggagatttggtttgggccaagatggagggttacccctggtggccttgtctggtttacaaccacccctttgatggaacattcatccgcgagaaagggaaatcagtccgtgttcatgtacagttttttgatgacagcccaacaaggggctgggttagcaaaaggcttttaaagcca

SEQ ID NO: 156153 - DNA, 4150 bp, Homo sapiens
  Payload ID: 10644
  Gene Symbol: MSH6
  Gene Name: mutS homolog 6
  Uniprot ID: P52701
  ENST ID: ENST00000614496
  CDS Start-End: 889-4065
ggcgaggcgcctgttgattggccactggggcccgggttcctccggcggagcgcgcctccccccagatttcccgccagcaggagccgcgcggtagatgcggtgcttttaggagctccgtccgacagaacggttgggccttgccggctgtcggtatgtcgcgacagagcaccctgtacagcttcttccccaagtctccggcgctgagtgatgccaacaaggcctcggccagggcctcacgcgaaggcggccgtgccgccgctgcccccggggcctctccttccccaggcggggatgcggcctggagcgaggctgggcctgggcccaggcccttggcgcgctccgcgtcaccgcccaaggcgaagaacctcaacggagggctgcggagatcggtagcgcctgctgcccccaccagttgtgacttctcaccaggagatttggtttgggccaagatggagggttacccctggtggccttgtctggtttacaaccacccctttgatggaacattcatccgcgagaaagggaaatcagtccgtgttcatgtacagttttttgatgacagcccaacaaggggctgggttagcaaaaggcttttaaagccatatacaggtaggcacaacttacgtaacagataagagtgaagaagataatgaaattgagagtgaagaggaagtacagcctaagacacaaggatctaggcgaagtagccgccaaataaaaaaacgaagggtcatatcagattctgagagtgacattggtggctctgatgtggaatttaagccagacactaaggaggaaggaagcagtgatgaaataagcagtggagtgggggatagtgagagtgaaggcctgaacagccctgtcaaagttgctcgaaagcggaagagaatggtgactggaaatggctctcttaaaaggaaaagctctaggaaggaaacgccctcagccaccaaacaagcaactagcatttcatcagaaaccaagaatactttgagagctttctctgcccctcaaaattctgaatcccaagcccacgttagtggaggtggtgatgacagtagtcgccctactgtttggtatcatgaaactttagaatggcttaaggaggaaaagagaagagatgagcacaggaggaggcctgatcaccccgattttgatgcatctacactctatgtgcctgaggatttcctcaattcttgtactcctgggatgaggaagtggtggcagattaagtctcagaactttgatcttgtcatctgttacaaggtggggaaattttatgagctgtaccacatggatgctcttattggagtcagtgaactggggctggtattcatgaaaggcaactgggcccattctggctttcctgaaattgcatttggccgttattcagattccctggtgcagaagggctataaagtagcacgagtggaacagactgagactccagaaatgatggaggcacgatgtagaaagatggcacatatatccaagtatgatagagtggtgaggagggagatctgtaggatcattaccaagggtacacagacttacagtgtgctggaaggtgatccctctgagaactacagtaagtatcttcttagcctcaaagaaaaagaggaagattcttctggccatactcgtgcatatggtgtgtgctttgttgatacttcactgggaaagtttttcataggtcagttttcagatgatcgccattgttcgagatttaggactctagtggcacactatcccccagtacaagttttatttgaaaaaggaaatctctcaaaggaaactaaaacaattctaaagagttcattgtcctgttctcttcaggaaggtctgatacccggctcccagttttgggatgcatccaaaactttgagaactctccttgaggaagaatattttagggaaaagctaagtgatggcattggggtgatgttaccccaggtgcttaaaggtatgacttcagagtctgattccattgggttgacaccaggagagaaaagtgaattggccctctctgctctaggtggttgtgtcttctacctcaaaaaatgccttattgatcaggagcttttatcaatggctaattttgaagaatatattcccttggattctgacacagtcagcactacaagatctggtgctatcttcaccaaagcctatcaacgaatggtgctagatgcagtgacattaaacaacttggagatttttctgaatggaacaaatggttctactgaaggaaccctactagagagggttgatacttgccatactccttttggtaagcggctcctaaagcaatggctttgtgccccactctgtaaccattatgctattaatgatcgtctagatgccatagaagacctcatggttgtgcctgacaaaatctccgaagttgtagagcttctaaagaagcttccagatcttgagaggctactcagtaaaattcataatgttgggtctcccctgaagagtcagaaccacccagacagcagggctataatgtatgaagaaactacatacagcaagaagaagattattgattttctttctgctctggaaggattcaaagtaatgtgtaaaattatagggatcatggaagaagttgctgatggttttaagtctaaaatccttaagcaggtcatctctctgcagacaaaaaatcctgaaggtcgttttcctgatttgactgtagaattgaaccgatgggatacagcctttgaccatgaaaaggctcgaaagactggacttattactcccaaagcaggctttgactctgattatgaccaagctcttgctgacataagagaaaatgaacagagcctcctggaatacctagagaaacagcgcaacagaattggctgtaggaccatagtctattgggggattggtaggaaccgttaccagctggaaattcctgagaatttcaccactcgcaatttgccagaagaatacgagttgaaatctaccaagaagggctgtaaacgatactggaccaaaactattgaaaagaagttggctaatctcataaatgctgaagaacggagggatgtatcattgaaggactgcatgcggcgactgttctataactttgataaaaattacaaggactggcagtctgctgtagagtgtatcgcagtgttggatgttttactgtgcctggctaactatagtcgagggggtgatggtcctatgtgtcgcccagtaattctgttgccggaagataccccccccttcttagagcttaaaggatcacgccatccttgcattacgaagactttttttggagatgattttattcctaatgacattctaataggctgtgaggaagaggagcaggaaaatggcaaagcctattgtgtgcttgttactggaccaaatatggggggcaagtctacgcttatgagacaggctggcttattagctgtaatggcccagatgggttgttacgtccctgctgaagtgtgcaggctcacaccaattgatagagtgtttactagacttggtgcctcagacagaataatgtcaggtgaaagtacattttttgttgaattaagtgaaactgccagcatactcatgcatgcaacagcacattctctggtgcttgtggatgaattaggaagaggtactgcaacatttgatgggacggcaatagcaaatgcagttgttaaagaacttgctgagactataaaatgtcgtacattattttcaactcactaccattcattagtagaagattattctcaaaatgttgctgtgcgcctaggacatatggcatgcatggtagaaaatgaatgtgaagaccccagccaggagactattacgttcctctataaattcattaagggagcttgtcctaaaagctatggctttaatgcagcaaggcttgctaatctcccagaggaagttattcaaaagggacatagaaaagcaagagaatttgagaagatgaatcagtcactacgattatttcgggaagtttgcctggctagtgaaaggtcaactgtagatgctgaagctgtccataaattgctgactttgattaaggaattatagactgactacattggaagctttgagttgacttctgacaaaggtggtaaattcagacaacattatgatctaataaactttatttttt

SEQ ID NO: 156154 - DNA, 3429 bp, Homo sapiens
  Payload ID: 10644
  Gene Symbol: MSH6
  Gene Name: mutS homolog 6
  ENST ID: ENST00000616033
  CDS Start-End: 84-3287
cccgccagcaggagccgcgcggtagatgcggtgcttttaggagctccgtccgacagaacggttgggccttgccggctgtcggtatgtcgcgacagagcaccctgtacagcttcttccccaagtctccggcgctgagtgatgccaacaaggcctcggccagggcctcacgcgaaggcggccgtgcccgctgcccccggggcctctccttccccaggcggggatgcggcctggagcgaggctgggcctgggccaggcccttggcgcgctccgcgtcaccgcccaaggcgaagaacctcaacggagggctgcggagatcggtagcgcctgctgcccccaccagttgtgacttctcaccaggagatttggtttgggccaagatggagggttacccctggtggccttgtctggtttacaaccacccctttgatggaacattcatccgcgagaaagggaaatcagtccgtgttcatgtacagttttttgatgacagcccaacaaggggctgggttagcaaaaggcttttaaagccatatacaggttcaaaatcaaaggaagcccagaagggaggtcatttttacagtgcaaagcctgaaatactgagagcaatgcaacgtgcagatgaagccttaaataaagacaagattaagaggcttgaattggcagtttgtgatgagccctcagagccagaagaggaagaagagatggaggtaggcacaacttacgtaacagataagagtgaagaagataatgaaattgagagtgaagaggaagtacagcctaagacacaaggatctaggcgaagtagccgccaaataaaaaaacgaagggtcatatcagattctgagagtgacattggtggctctgatgtggaatttaagccagacactaaggaggaaggaagcagtgatgaaataagcagtggagtgggggatagtgagagtgaaggcctgaacagccctgtcaaagttgctcgaaagcggaagagaatggtgactggaaatggctctcttaaaaggaaaagctctaggaaggaaacgccctcagccaccaaacaagcaactagcatttcatcagaaaccaagaatactttgagagctttctctgcccctcaaaattctgaatcccaagcccacgttagtggaggtggtgatgacagtagtcgccctactgtttggtatcatgaaactttagaatggcttaaggaggaaaagagaagagatgagcacaggaggaggcctgatcaccccgattttgatgcatctacactctatgtgcctgaggatttcctcaattcttgtactcctgggatgaggaagtggtggcagattaagtctcagaactttgatcttgtcatctgttacaaggtggggaaattttatgagctgtaccacatggatgctcttattggagtcagtgaactggggctggtattcatgaaaggcaactgggcccattctggctttcctgaaattgcatttggccgttattcagattccctggtgcagaagggctataaagtagcacgagtggaacagactgagactccagaaatgatggaggcacgatgtagaaagatggcacatatatccaagtatgatagagtggtgaggagggagatctgtaggatcattaccaagggtacacagacttacagtgtgctggaaggtgatccctctgagaactacagtaagtatcttcttagcctcaaagaaaaagaggaagattcttctggccatactcgtgcatatggtgtgtgctttgttgatacttcactgggaaagtttttcataggtcagttttcagatgatcgccattgttcgagatttaggactctagtggcacactatcccccagtacaagttttatttgaaaaaggaaatctctcaaaggaaactaaaacaattctaaagagttcattgtcctgttctcttcaggaaggtctgatacccggctcccagttttgggatgcatccaaaactttgagaactctccttgaggaagaatattttagggaaaagctaagtgatggcattggggtgatgttaccccaggtgcttaaaggtatgacttcagagtctgattccattgggttgacaccaggagagaaaagtgaattggccctctctgctctaggtggttgtgtcttctacctcaaaaaatgccttattgatcaggagcttttatcaatggctaattttgaagaatatattcccttggattctgacacagtcagcactacaagatctggtgctatcttcaccaaagcctatcaacgaatggtgctagatgcagtgacattaaacaacttggagatttttctgaatggaacaaatggttctactgaaggaaccctactagagagggttgatacttgccatactccttttggtaagcggctcctaaagcaatggctttgtgccccactctgtaaccattatgctattaatgatcgtctagatgccatagaagacctcatggttgtgcctgacaaaatctccgaagttgtagagcttctaaagaagcttccagatcttgagaggctactcagtaaaattcataatgttgggtctcccctgaagagtcagaaccacccagacagcagggctataatgtatgaagaaactacatacagcaagaagaagattattgattttctttctgctctggaaggattcaaagtaatgtgtaaaattatagggatcatggaagaagttgctgatggttttaagtctaaaatccttaagcaggtcatctctctgcagacaaaaaatcctgaaggtcgttttcctgatttgactgtagaattgaaccgatgggatacagcctttgaccatgaaaaggctcgaaagactggacttattactcccaaagcaggctttgactctgattatgaccaagctcttgctgacataagagaaaatgaacagagcctcctggaatacctagagaaacagcgcaacagaattggctgtaggaccatagtctattgggggattggtaggaaccgttaccagctggaaattcctgagaatttcaccactcgcaatttgccagaagaatacgagttgaaatctaccaagaagggctgtaaacgatactggaccaaaactattgaaaagaagttggctaatctcataaatgctgaagaacggagggatgtatcattgaaggactgcatgcggcgactgttctataactttgataaaaattacaaggactggcagtctgctgtagagtgtatcgcagtgttgggtaagactttgaacaagcttgttctcaggctttgataagtagtgctgtttgccagctgtatattatccctaaaaataagtaataaggtatatatggtacatattttgacatgcatatacatatttgcatcctgactaggctgcccacagcaatttaagttacttgaaactcgctttt

SEQ ID NO: 156155 - DNA, 4324 bp, Homo sapiens
  Payload ID: 10644
  Gene Symbol: MSH6
  Gene Name: mutS homolog 6
  ENST ID: ENST00000622629
  CDS Start-End: 3249-4232
ggcgaggcgcctgttgattggccactggggcccgggttcctccggcggagcgcgcctccccccagatttcccgccagcaggagccgcgcggtagatgcggtgcttttaggagctccgtccgacagaacggttgggccttgccggctgtcggtatgtcgcgacagagcaccctgtacagcttcttccccaagtctccggcgctgagtgatgccaacaaggcctcggccagggcctcacgcgaaggcggccgtgccgccgctgcccccggggcctctccttccccaggcggggatgcggcctggagcgaggctgggcctgggcccaggcccttggcgcgctccgcgtcaccgcccaaggcgaagaacctcaacggagggctgcggagatcggtagcgcctgctgcccccaccagttgtgacttctcaccaggagatttggtttgggccaagatggagggttacccctggtggccttgtctggtttacaaccacccctttgatggaacattcatccgcgagaaagggaaatcagtccgtgttcatgtacagttttttgatgacagcccaacaaggggctgggttagcaaaaggcttttaaagccatatacaggttcaaaatcaaaggaagcccagaagggaggtcatttttacagtgcaaagcctgaaatactgagagcaatgcaacgtgcagatgaagccttaaataaagacaagattaagaggcttgaattggcagtttgtgatgagccctcagagccagaagaggaagaagagatggaggtaggcacaacttacgtaacagataagagtgaagaagataatgaaattgagagtgaagaggaagtacagcctaagacacaaggatctaggcgaagtagccgccaaataaaaaaacgaagggtcatatcagattctgagagtgacattggtggctctgatgtggaatttaagccagacactaaggaggaaggaagcagtgatgaaataagcagtggagtgggggatagtgagagtgaaggcctgaacagccctgtcaaagttgctcgaaagcggaagagaatggtgactggaaatggctctcttaaaaggaaaagctctaggaaggaaacgccctcagccaccaaacaagcaactagcatttcatcagaaaccaagaatactttgagagctttctctgcccctcaaaattctgaatcccaagcccacgttagtggaggtggtgatgacagtagtcgccctactgtttggtatcatgaaactttagaatggcttaaggaggaaaagagaagagatgagcacaggaggaggcctgatcaccccgattttgatgcatctacactctatgtgcctgaggatttcctcaattcttgtactcctgggatgaggaagtggtggcagattaagtctcagaactttgatcttgtcatctgttacaaggtggggaaattttatgagctgtaccacatggatgctcttattggagtcagtgaactggggctggtattcatgaaaggcaactgggcccattctggctttcctgaaattgcatttggccgttattcagattccctggtgcagaagggctataaagtagcacgagtggaacagactgagactccagaaatgatggaggcacgatgtagaaagatggcacatatatccaagtatgatagagtggtgaggagggagatctgtaggatcattaccaagggtacacagacttacagtgtgctggaaggtgatccctctgagaactacagtaagtatcttcttagcctcaaagaaaaagaggaagattcttctggccatactcgtgcatatggtgtgtgctttgttgatacttcactgggaaagtttttcataggtcagttttcagatgatcgccattgttcgagatttaggactctagtggcacactatcccccagtacaagttttatttgaaaaaggaaatctctcaaaggaaactaaaacaattctaaagagttcattgtcctgttctcttcaggaaggtctgatacccggctcccagttttgggatgcatccaaaactttgagaactctccttgaggaagaatattttagggaaaagctaagtgatggcattggggtgatgttaccccaggtgcttaaaggtatgacttcagagtctgattccattgggttgacaccaggagagaaaagtgaattggccctctctgctctaggtggttgtgtcttctacctcaaaaaatgccttattgatcaggagcttttatcaatggctaattttgaagaatatattcccttggattctgacacagtcagcactacaagatctggtgctatcttcaccaaagcctatcaacgaatggtgctagatgcagtgacattaaacaacttggagatttttctgaatggaacaaatggttctactgaaggaaccctactagagagggttgatacttgccatactccttttggtaagcggctcctaaagcaatggctttgtgccccactctgtaaccattatgctattaatgatcgtctagatgccatagaagacctcatggttgtgcctgacaaaatctccgaagttgtagagcttctaaagaagcttccagatcttgagaggctactcagtaaaattcataatgttgggtctcccctgaagagtcagaaccacccagacagcagggctataatgtatgaagaaactacatacagcaagaagaagattattgattttctttctgctctggaaggattcaaagtaatgtgtaaaattatagggatcatggaagaagttgctgatggttttaagtctaaaatccttaagcaggtcatctctctgcagacaaaaaatcctgaaggtcgttttcctgatttgactgtagaattgaaccgatgggatacagcctttgaccatgaaaaggctcgaaagactggacttattactcccaaagcaggctttgactctgattatgaccaagctcttgctgacataagagaaaatgaacagagcctcctggaatacctagagaaacagcgcaacagaattggctgtaggaccatagtctattgggggattggtaggaaccgttaccagctggaaattcctgagaatttcaccactcgcaatttgccagaagaatacgagttgaaatctaccaagaagggctgtaaacgatactggaccaaaactattgaaaagaagttggctaatctcataaatgctgaagaacggagggatgtatcattgaaggactgcatgcggcgactgttctataactttgataaaaattacaaggactggcagtctgctgtagagtgtatcgcagtgttggatgttttactgtgcctggctaactatagtcgagggggtgatggtcctatgtgtcgcccagtaattctgttgccggaagataccccccccttcttagagcttaaaggatcacgccatccttgcattacgaagactttttttggagatgattttattcctaatgacattctaataggctgtgaggaagaggagcaggaaaatggcaaagccattgtgtgcttgttactggaccaaatatggggggcaagtctacgcttatattcacaggctggcttattagctgtaatggcccagatgggttgttacgtccctgctgaagtgtgcaggctcacaccaattgatagagtgtttactagacttggtgcctcagacagaataatgtcaggtgaaagtacattttttgttgaattaagtgaaactgccagcatactcatgcatgcaacagcacattctctggtgcttgtggatgaattaggaagaggtactgcaacatttgatgggacggcaatagcaaatgcagttgttaaagaacttgctgagactataaaatgtcgtacattattttcaactcactaccatattagtagaagattattctcaaaatgttgctgtgcgctaggacatatggcatgcatggtagaaaatgaatgtgaagaccccagccaggagactattacgttcctctataaattcattaagggagcttgtcctaaaagctatggctttaatgcagcaaggcttgctaatctcccagaggaagttattcaaaagggacatagaaaagcaagagaatttgagaagatgaatcagtcactacgattatttcgggaagtttgcctggctagtgaaaggtcaactgtagatgctgaagctgtccataaattgctgactttgattaaggaattatagactgactacattggaagctttgagttgacttctgacaaaggtggtaaattcagacaacattatgatctaataaactttattttttaaaaatg

SEQ ID NO: 156156 - DNA, 1744 bp, Homo sapiens
  Payload ID: 10645
  Gene Symbol: MUTYH
  Gene Name: mutY DNA glycosylase
  Uniprot ID: Q9UIF7
  ENST ID: ENST00000354383
  CDS Start-End: 112-1680
cgctaattgcctattggcctgtgctgccggctcgcagcccgggtggacccgagccacgccccctggagtgcgccggaaagccgggcgcgctagagctcgcgggaggccatcatgaggaagccacgagcagccgtgggaagtggtcacaggaagcaggcagccagccaggaagggaggcagaagcatgctaagaacaacagtcaggccaagccttctgcctgtgatgcaggcctggccaggcagccggaagaggtggtattgcaggcctctgtctcctcataccatctattcagagacgtagctgaagtcacagccttccgagggagcctgctaagctggtacgaccaagagaaacgggacctaccatggagaagacgggcagaagatgagatggacctggacaggcgggcatatgctgtgtgggtctcagaggtcatgctgcagcagacccaggttgccactgtgatcaactactataccggatggatgcagaagtggcctacactgcaggacctggccagtgcttccctggaggaggtgaatcaactctgggctggcctgggctactattctcgtggccggcggctgcaggagggagctcggaaggtggtagaggagctagggggccacatgccacgtacagcagagaccctgcagcagctcctgcctggcgtggggcgctacacagctggggccattgcctctatcgcctttggccaggcaaccggtgtggtggatggcaacgtagcacgggtgctgtgccgtgtccgagccattggtgctgatcccagcagcacccttgtttcccagcagctctggggtctagcccagcagctggtggacccagcccggccaggagatttcaaccaagcagccatggagctaggggccacagtgtgtaccccacagcgcccactgtgcagccagtgccctgtggagagcctgtgccgggcacgccagagagtggagcaggaacagctcttagcctcagggagcctgtcgggcagtcctgacgtggaggagtgtgctcccaacactggacagtgccacctgtgcctgcctccctcggagccctgggaccagaccctgggagtggtcaacttccccagaaaggccagccgcaagccccccagggaggagagctctgccacctgtgttctggaacagcctggggcccttggggcccaaattctgctggtgcagaggcccaactcaggtctgctggcaggactgtgggagttcccgtccgtgacctgggagccctcagagcagcttcagcgcaaggccctgctgcaggaactacagcgttgggctgggcccctcccagccacgcacctccggcaccttggggaggttgtccacaccttctctcacatcaagctgacatatcaagtatatgggctggccttggaagggcagaccccagtgaccaccgtaccaccaggtgctcgctggctgacgcaggaggaatttcacaccgcagctgtttccaccgccatgaaaaaggttttccgtgtgtatcagggccaacagccagggacctgtatgggttccaaaaggtcccaggtgtcctctccgtgcagtcggaaaaagccccgcatgggccagcaagtcctggataatttctttcggtctcacatctccactgatgcacacagcctcaacagtgcagcccagtgacacctctgaaagcccccattccctgagaatcctgttgttagtaaagtgcttatttttgtagtta

SEQ ID NO: 156157 - DNA, 1776 bp, Homo sapiens
  Payload ID: 10645
  Gene Symbol: MUTYH
  Gene Name: mutY DNA glycosylase
  Uniprot ID: Q9UIF7
  ENST ID: ENST00000355498
  CDS Start-End: 147-1712
tcccgggtccggcgcggggaaggcagcctggcgcgcgctaattgcctattggcctgtgctgccggctcgcagcccgggtggacccgagccacgccccctggagtgcgccggaaagccgggcgcgctagagctcgcgggaggccatcatgaggaagccacgagcagccgtgggaagtggtcacaggaagcaggcagccagccaggaagggaggcagaagcatgctaagaacaacagtcaggccaagccttctgcctgtgatggcctggccaggcagccggaagaggtggtattgcaggcctctgtctcctcataccatctattcagagacgtagctgaagtcacagccttccgagggagcctgctaagctggtacgaccaagagaaacgggacctaccatggagaagacgggcagaagatgagatggacctggacaggcgggcatatgctgtgtgggtctcagaggtcatgctgcagcagacccaggttgccactgtgatcaactactataccggatggatgcagaagtggcctacactgcaggacctggccagtgcttccctggaggaggtgaatcaactctgggctggcctgggctactattctcgtggccggcggctgcaggagggagctcggaaggtggtagaggagctagggggccacatgccacgtacagcagagaccctgcagcagctcctgcctggcgtggggcgctacacagctggggccattgcctctatcgcctttggccaggcaaccggtgtggtggatggcaacgtagcacgggtgctgtgccgtgtccgagccattggtgctgatcccagcagcacccttgtttcccagcagctctggggtctagcccagcagctggtggacccagcccggccaggagatttcaaccaagcagccatggagctaggggccacagtgtgtaccccacagcgcccactgtgcagccagtgccctgtggagagcctgtgccgggcacgccagagagtggagcaggaacagctcttagcctcagggagcctgtcgggcagtcctgacgtggaggagtgtgctcccaacactggacagtgccacctgtgcctgcctccctcggagccctgggaccagaccctgggagtggtcaacttccccagaaaggccagccgcaagccccccagggaggagagctctgccacctgtgttctggaacagcctggggcccttggggcccaaattctgctggtgcagaggcccaactcaggtctgctggcaggactgtgggagttcccgtccgtgacctgggagccctcagagcagcttcagcgcaaggccctgctgcaggaactacagcgttgggctgggcccctcccagccacgcacctccggcaccttggggaggttgtccacaccttctctcacatcaagctgacatatcaagtatatgggctggccttggaagggcagaccccagtgaccaccgtaccaccaggtgctcgctggctgacgcaggaggaatttcacaccgcagctgtttccaccgccatgaaaaaggttttccgtgtgtatcagggccaacagccagggacctgtatgggttccaaaaggtcccaggtgtcctctccgtgcagtcggaaaaagccccgcatgggccagcaagtcctggataatttctttcggtctcacatctccactgatgcacacagcctcaacagtgcagcccagtgacacctctgaaagcccccattccctgagaatcctgttgttagtaaagtgcttatttttgtagtta

SEQ ID NO: 156158 - DNA, 1839 bp, Homo sapiens
  Payload ID: 10645
  Gene Symbol: MUTYH
  Gene Name: mutY DNA glycosylase
  Uniprot ID: Q9UIF7
  ENST ID: ENST00000372098
  CDS Start-End: 135-1775
ggagcctctagaactatgagcccgaggccttcccctctcccagagcgcagaggctttgaaggctacctctgggaagccgctcaccgtcggaagctgcgggagctgaaactgcgccatcgtcactgtcggcggccatgacaccgctcgtctcccgcctgagtcgtctgtgggccatcatgaggaagccacgagcagccgtgggaagtggtcacaggaagcaggcagccagccaggaagggaggcagaagcatgctaagaacaacagtcaggccaagccttctgcctgtgatgggatgattgctgagtgtcctggggccccagcaggcctggccaggcagccggaagaggtggtattgcaggcctctgtctcctcataccatctattcagagacgtagctgaagtcacagccttccgagggagcctgctaagctggtacgaccaagagaaacgggacctaccatggagaagacgggcagaagatgagatggacctggacaggcgggcatatgctgtgtgggtctcagaggtcatgctgcagcagacccaggttgccactgtgatcaactactataccggatggatgcagaagtggcctacactgcaggacctggccagtgcttccctggaggaggtgaatcaactctgggctggcctgggctactattctcgtggccggcggctgcaggagggagctcggaaggtggtagaggagctagggggccacatgccacgtacagcagagaccctgcagcagctcctgcctggcgtggggcgctacacagctggggccattgcctctatcgcctttggccaggcaaccggtgtggtggatggcaacgtagcacgggtgctgtgccgtgtccgagccattggtgctgatcccagcagcacccttgtttcccagcagctctggggtctagcccagcagctggtggacccagcccggccaggagatttcaaccaagcagccatggagctaggggccacagtgtgtaccccacagcgcccactgtgcagccagtgccctgtggagagcctgtgccgggcacgccagagagtggagcaggaacagctcttagcctcagggagcctgtcgggcagtcctgacgtggaggagtgtgctcccaacactggacagtgccacctgtgcctgcctccctcggagccctgggaccagaccctgggagtggtcaacttccccagaaaggccagccgcaagccccccagggaggagagctctgccacctgtgttctggaacagcctggggcccttggggcccaaattctgctggtgcagaggcccaactcaggtctgctggcaggactgtgggagttcccgtccgtgacctgggagccctcagagcagcttcagcgcaaggccctgctgcaggaactacagcgttgggctgggcccctcccagccacgcacctccggcaccttggggaggttgtccacaccttctctcacatcaagctgacatatcaagtatatgggctggccttggaagggcagaccccagtgaccaccgtaccaccaggtgctcgctggctgacgcaggaggaatttcacaccgcagctgtttccaccgccatgaaaaaggttttccgtgtgtatcagggccaacagccagggacctgtatgggttccaaaaggtcccaggtgtcctctccgtgcagtcggaaaaagccccgcatgggccagcaagtcctggataatttctttcggtctcacatctccactgatgcacacagcctcaacagtgcagcccagtgacacctctgaaagcccccattccctgagaatcctgttgttagtaaagtgcttatttttgtagtta

SEQ ID NO: 156159 - DNA, 1823 bp, Homo sapiens
  Payload ID: 10645
  Gene Symbol: MUTYH
  Gene Name: mutY DNA glycosylase
  Uniprot ID: Q9UIF7
  ENST ID: ENST00000372104
  CDS Start-End: 194-1759
ctccgtgttctgctgtcttcatcagcgtgggccgcgggtatctattgtgtacagtttacctggcactgactttggacacacaccaatcaacaagagaatcagtccttgcactcaagtcgttttttacagtcaaattcaggaagtacacactgatggaaagaatcaaagtaatgtaaaattacattaggccatcatgaggaagccacgagcagccgtgggaagtggtcacaggaagcaggcagccagccaggaagggaggcagaagcatgctaagaacaacagtcaggccaagccttctgcctgtgatggcctggccaggcagccggaagaggtggtattgcaggcctctgtctcctcataccatctattcagagacgtagctgaagtcacagccttccgagggagcctgctaagctggtacgaccaagagaaacgggacctaccatggagaagacgggcagaagatgagatggacctggacaggcgggcatatgctgtgtgggtctcagaggtcatgctgcagcagacccaggttgccactgtgatcaactactataccggatggatgcagaagtggcctacactgcaggacctggccagtgcttccctggaggaggtgaatcaactctgggctggcctgggctactattctcgtggccggcggctgcaggagggagctcggaaggtggtagaggagctagggggccacatgccacgtacagcagagaccctgcagcagctcctgcctggcgtggggcgctacacagctggggccattgcctctatcgcctttggccaggcaaccggtgtggtggatggcaacgtagcacgggtgctgtgccgtgtccgagccattggtgctgatcccagcagcacccttgtttcccagcagctctggggtctagcccagcagctggtggacccagcccggccaggagatttcaaccaagcagccatggagctaggggccacagtgtgtaccccacagcgcccactgtgcagccagtgccctgtggagagcctgtgccgggcacgccagagagtggagcaggaacagctcttagcctcagggagcctgtcgggcagtcctgacgtggaggagtgtgctcccaacactggacagtgccacctgtgcctgcctccctcggagccctgggaccagaccctgggagtggtcaacttccccagaaaggccagccgcaagccccccagggaggagagctctgccacctgtgttctggaacagcctggggcccttggggcccaaattctgctggtgcagaggcccaactcaggtctgctggcaggactgtgggagttcccgtccgtgacctgggagccctcagagcagcttcagcgcaaggccctgctgcaggaactacagcgttgggctgggcccctcccagccacgcacctccggcaccttggggaggttgtccacaccttctctcacatcaagctgacatatcaagtatatgggctggccttggaagggcagaccccagtgaccaccgtaccaccaggtgctcgctggctgacgcaggaggaatttcacaccgcagctgtttccaccgccatgaaaaaggttttccgtgtgtatcagggccaacagccagggacctgtatgggttccaaaaggtcccaggtgtcctctccgtgcagtcggaaaaagccccgcatgggccagcaagtcctggataatttctttcggtctcacatctccactgatgcacacagcctcaacagtgcagcccagtgacacctctgaaagcccccattccctgagaatcctgttgttagtaaagtgcttatttttgtagtta

SEQ ID NO: 156160 - DNA, 1809 bp, Homo sapiens
  Payload ID: 10645
  Gene Symbol: MUTYH
  Gene Name: mutY DNA glycosylase
  Uniprot ID: Q9UIF7
  ENST ID: ENST00000372110
  CDS Start-End: 135-1745
ggagcctctagaactatgagcccgaggccttcccctctcccagagcgcagaggctttgaaggctacctctgggaagccgctcaccgtcggaagctgcgggagctgaaactgcgccatcgtcactgtcggcggccatgacaccgctcgtctcccgcctgagtcgtctgtgggccatcatgaggaagccacgagcagccgtgggaagtggtcacaggaagcaggcagccagccaggaagggaggcagaagcatgctaagaacaacagtcaggccaagccttctgcctgtgatgcaggcctggccaggcagccggaagaggtggtattgcaggcctctgtctcctcataccatctattcagagacgtagctgaagtcacagccttccgagggagcctgctaagctggtacgaccaagagaaacgggacctaccatggagaagacgggcagaagatgagatggacctggacaggcgggcatatgctgtgtgggtctcagaggtcatgctgcagcagacccaggttgccactgtgatcaactactataccggatggatgcagaagtggcctacactgcaggacctggccagtgcttccctggaggaggtgaatcaactctgggctggcctgggctactattctcgtggccggcggctgcaggagggagctcggaaggtggtagaggagctagggggccacatgccacgtacagcagagaccctgcagcagctcctgcctggcgtggggcgctacacagctggggccattgcctctatcgcctttggccaggcaaccggtgtggtggatggcaacgtagcacgggtgctgtgccgtgtccgagccattggtgctgatcccagcagcacccttgtttcccagcagctctggggtctagcccagcagctggtggacccagcccggccaggagatttcaaccaagcagccatggagctaggggccacagtgtgtaccccacagcgcccactgtgcagccagtgccctgtggagagcctgtgccgggcacgccagagagtggagcaggaacagctcttagcctcagggagcctgtcgggcagtcctgacgtggaggagtgtgctcccaacactggacagtgccacctgtgcctgcctccctcggagccctgggaccagaccctgggagtggtcaacttccccagaaaggccagccgcaagccccccagggaggagagctctgccacctgtgttctggaacagcctggggcccttggggcccaaattctgctggtgcagaggcccaactcaggtctgctggcaggactgtgggagttcccgtccgtgacctgggagccctcagagcagcttcagcgcaaggccctgctgcaggaactacagcgttgggctgggcccctcccagccacgcacctccggcaccttggggaggttgtccacaccttctctcacatcaagctgacatatcaagtatatgggctggccttggaagggcagaccccagtgaccaccgtaccaccaggtgctcgctggctgacgcaggaggaatttcacaccgcagctgtttccaccgccatgaaaaaggttttccgtgtgtatcagggccaacagccagggacctgtatgggttccaaaaggtcccaggtgtcctctccgtgcagtcggaaaaagccccgcatgggccagcaagtcctggataatttctttcggtctcacatctccactgatgcacacagcctcaacagtgcagcccagtgacacctctgaaagcccccattccctgagaatcctgttgttagtaaagtgcttatttttgtagtta

SEQ ID NO: 156161 - DNA, 1888 bp, Homo sapiens
  Payload ID: 10645
  Gene Symbol: MUTYH
  Gene Name: mutY DNA glycosylase
  Uniprot ID: Q9UIF7
  ENST ID: ENST00000372115
  CDS Start-End: 217-1824
cagccggagccgcggtgtacaacggaacttgtagtctcctcgtggctagttcaggcggaaggagcagtcctctgaagcttgaggagcctctagaactatgagcccgaggccttcccctctcccagagcgcagaggctttgaaggctacctctgggaagccgctcaccgtcggaagctgcgggagctgaaactgcgccatcgtcactgtcggcggccatgacaccgctcgtctcccgcctgagtcgtctgtgggccatcatgaggaagccacgagcagccgtgggaagtggtcacaggaagcaggcagccagccaggaagggaggcagaagcatgctaagaacaacagtcaggccaagccttctgcctgtgatggcctggccaggcagccggaagaggtggtattgcaggcctctgtctcctcataccatctattcagagacgtagctgaagtcacagccttccgagggagcctgctaagctggtacgaccaagagaaacgggacctaccatggagaagacgggcagaagatgagatggacctggacaggcgggcatatgctgtgtgggtctcagaggtcatgctgcagcagacccaggttgccactgtgatcaactactataccggatggatgcagaagtggcctacactgcaggacctggccagtgcttccctggaggaggtgaatcaactctgggctggcctgggctactattctcgtggccggcggctgcaggagggagctcggaaggtggtagaggagctagggggccacatgccacgtacagcagagaccctgcagcagctcctgcctggcgtggggcgctacacagctggggccattgcctctatcgcctttggccaggcaaccggtgtggtggatggcaacgtagcacgggtgctgtgccgtgtccgagccattggtgctgatcccagcagcacccttgtttcccagcagctctggggtctagcccagcagctggtggacccagcccggccaggagatttcaaccaagcagccatggagctaggggccacagtgtgtaccccacagcgcccactgtgcagccagtgccctgtggagagcctgtgccgggcacgccagagagtggagcaggaacagctcttagcctcagggagcctgtcgggcagtcctgacgtggaggagtgtgctcccaacactggacagtgccacctgtgcctgcctccctcggagccctgggaccagaccctgggagtggtcaacttccccagaaaggccagccgcaagccccccagggaggagagctctgccacctgtgttctggaacagcctggggcccttggggcccaaattctgctggtgcagaggcccaactcaggtctgctggcaggactgtgggagttcccgtccgtgacctgggagccctcagagcagcttcagcgcaaggccctgctgcaggaactacagcgttgggctgggcccctcccagccacgcacctccggcaccttggggaggttgtccacaccttctctcacatcaagctgacatatcaagtatatgggctggccttggaagggcagaccccagtgaccaccgtaccaccaggtgctcgctggctgacgcaggaggaatttcacaccgcagctgtttccaccgccatgaaaaaggttttccgtgtgtatcagggccaacagccagggacctgtatgggttccaaaaggtcccaggtgtcctctccgtgcagtcggaaaaagccccgcatgggccagcaagtcctggataatttctttcggtctcacatctccactgatgcacacagcctcaacagtgcagcccagtgacacctctgaaagcccccattccctgagaatcctgttgttagtaaagtgcttatttttgtagtta

SEQ ID NO: 156162 - DNA, 904 bp, Homo sapiens
  Payload ID: 10645
  Gene Symbol: MUTYH
  Gene Name: mutY DNA glycosylase
  ENST ID: ENST00000435155
  CDS Start-End: 32-904
ccgggcgcgctagagctcgcgggaggccatcatgaggaagccacgagcagccgtgggaagtggtcacaggaagcaggcagccagccaggaagggaggcagaagcatgctaagaacaacagtcaggccaagccttctgcctgtgatgggatgattgctgagtgtcctggggccccagcaggcctggccaggcagccggaagaggtggtattgcaggcctctgtctcctcataccatctattcagagacgtagctgaagtcacagccttccgagggagcctgctaagctggtacgaccaagagaaacgggacctaccatggagaagacgggcagaagatgagatggacctggacaggcgggcatatgctgtgtgggtctcagaggtcatgctgcagcagacccaggttgccactgtgatcaactactataccggatggatgcagaagtggcctacactgcaggacctggccagtgcttccctggaggaggtgaatcaactctgggctggcctgggctactattctcgtggccggcggctgcaggagggagctcggaaggtggtagaggagctagggggccacatgccacgtacagcagagaccctgcagcagctcctgcctggcgtggggcgctacacagctggggccattgcctctatcgcctttggccaggcaaccggtgtggtggatggcaacgtagcacgggtgctgtgccgtgtccgagccattggtgctgatcccagcagcacccttgtttcccagcagctctggggtctagcccagcagctggtggacccagcccggccaggagatttcaaccaagcagccatggagctaggggccacagtgtgtaccccacagcgcccactgtgcagccagtgccctgtggagagcctgtgccgggca

SEQ ID NO: 156163 - DNA, 1692 bp, Homo sapiens
  Payload ID: 10645
  Gene Symbol: MUTYH
  Gene Name: mutY DNA glycosylase
  Uniprot ID: Q9UIF7
  ENST ID: ENST00000456914
  CDS Start-End: 63-1628
cgcggcgggaacgcggggcctccgtgttctgctgtcttcatcagcgtgggccgcgggccatcatgaggaagccacgagcagccgtgggaagtggtcacaggaagcaggcagccagccaggaagggaggcagaagcatgctaagaacaacagtcaggccaagccttctgcctgtgatggcctggccaggcagccggaagaggtggtattgcaggcctctgtctcctcataccatctattcagagacgtagctgaagtcacagccttccgagggagcctgctaagctggtacgaccaagagaaacgggacctaccatggagaagacgggcagaagatgagatggacctggacaggcgggcatatgctgtgtgggtctcagaggtcatgctgcagcagacccaggttgccactgtgatcaactactataccggatggatgcagaagtggcctacactgcaggacctggccagtgcttccctggaggaggtgaatcaactctgggctggcctgggctactattctcgtggccggcggctgcaggagggagctcggaaggtggtagaggagctagggggccacatgccacgtacagcagagaccctgcagcagctcctgcctggcgtggggcgctacacagctggggccattgcctctatcgcctttggccaggcaaccggtgtggtggatggcaacgtagcacgggtgctgtgccgtgtccgagccattggtgctgatcccagcagcacccttgtttcccagcagctctggggtctagcccagcagctggtggacccagcccggccaggagatttcaaccaagcagccatggagctaggggccacagtgtgtaccccacagcgcccactgtgcagccagtgccctgtggagagcctgtgccgggcacgccagagagtggagcaggaacagctcttagcctcagggagcctgtcgggcagtcctgacgtggaggagtgtgctcccaacactggacagtgccacctgtgcctgcctccctcggagccctgggaccagaccctgggagtggtcaacttccccagaaaggccagccgcaagccccccagggaggagagctctgccacctgtgttctggaacagcctggggcccttggggcccaaattctgctggtgcagaggcccaactcaggtctgctggcaggactgtgggagttcccgtccgtgacctgggagccctcagagcagcttcagcgcaaggccctgctgcaggaactacagcgttgggctgggcccctcccagccacgcacctccggcaccttggggaggttgtccacaccttctctcacatcaagctgacatatcaagtatatgggctggccttggaagggcagaccccagtgaccaccgtaccaccaggtgctcgctggctgacgcaggaggaatttcacaccgcagctgtttccaccgccatgaaaaaggttttccgtgtgtatcagggccaacagccagggacctgtatgggttccaaaaggtcccaggtgtcctctccgtgcagtcggaaaaagccccgcatgggccagcaagtcctggataatttctttcggtctcacatctccactgatgcacacagcctcaacagtgcagcccagtgacacctctgaaagcccccattccctgagaatcctgttgttagtaaagtgcttatttttgtagtta

SEQ ID NO: 156164 - DNA, 1929 bp, Homo sapiens
  Payload ID: 10645
  Gene Symbol: MUTYH
  Gene Name: mutY DNA glycosylase
  ENST ID: ENST00000450313
  CDS Start-End: 217-1866
cagccggagccgcggtgtacaacggaacttgtagtctcctcgtggctagttcaggcggaaggagcagtcctctgaagcttgaggagcctctagaactatgagcccgaggccttcccctctcccagagcgcagaggctttgaaggctacctctgggaagccgctcaccgtcggaagctgcgggagctgaaactgcgccatcgtcactgtcggcggccatgacaccgctcgtctcccgcctgagtcgtctgtgggccatcatgaggaagccacgagcagccgtgggaagtggtcacaggaagcaggcagccagccaggaagggaggcagaagcatgctaagaacaacagtcaggccaagccttctgcctgtgatgcctgtgcagggatgattgctgagtgtcctggggccccagcaggcctggccaggcagccggaagaggtggtattgcaggcctctgtctcctcataccatctattcagagacgtagctgaagtcacagccttccgagggagcctgctaagctggtacgaccaagagaaacgggacctaccatggagaagacgggcagaagatgagatggacctggacaggcgggcatatgctgtgtgggtctcagaggtcatgctgcagcagacccaggttgccactgtgatcaactactataccggatggatgcagaagtggcctacactgcaggacctggccagtgcttccctggaggaggtgaatcaactctgggctggcctgggctactattctcgtggccggcggctgcaggagggagctcggaaggtggtagaggagctagggggccacatgccacgtacagcagagaccctgcagcagctcctgcctggcgtggggcgctacacagctggggccattgcctctatcgcctttggccaggcaaccggtgtggtggatggcaacgtagcacgggtgctgtgccgtgtccgagccattggtgctgatcccagcagcacccttgtttcccagcagctctggggtctagcccagcagctggtggacccagcccggccaggagatttcaaccaagcagccatggagctaggggccacagtgtgtaccccacagcgcccactgtgcagccagtgccctgtggagagcctgtgccgggcacgccagagagtggagcaggaacagctcttagcctcagggagcctgtcgggcagtcctgacgtggaggagtgtgctcccaacactggacagtgccacctgtgcctgcctccctcggagccctgggaccagaccctgggagtggtcaacttccccagaaaggccagccgcaagccccccagggaggagagctctgccacctgtgttctggaacagcctggggcccttggggcccaaattctgctggtgcagaggcccaactcaggtctgctggcaggactgtgggagttcccgtccgtgacctgggagccctcagagcagcttcagcgcaaggccctgctgcaggaactacagcgttgggctgggcccctcccagccacgcacctccggcaccttggggaggttgtccacaccttctctcacatcaagctgacatatcaagtatatgggctggccttggaagggcagaccccagtgaccaccgtaccaccaggtgctcgctggctgacgcaggaggaatttcacaccgcagctgtttccaccgccatgaaaaaggttttccgtgtgtatcagggccaacagccagggacctgtatgggttccaaaaggtcccaggtgtcctctccgtgcagtcggaaaaagccccgcatgggccagcaagtcctggataatttctttcggtctcacatctccactgatgcacacagcctcaacagtgcagcccagtgacacctctgaaagcccccattccctgagaatcctgttgttagtaaagtgcttatttttgtagtt

SEQ ID NO: 156165 - DNA, 1706 bp, Homo sapiens
  Payload ID: 10645
  Gene Symbol: MUTYH
  Gene Name: mutY DNA glycosylase
  Uniprot ID: Q9UIF7
  ENST ID: ENST00000448481
  CDS Start-End: 44-1642
ctccgtgttctgctgtcttcatcagcgtgggccgcgggccatcatgaggaagccacgagcagccgtgggaagtggtcacaggaagcaggcagccagccaggaagggaggcagaagcatgctaagaacaacagtcaggccaagccttctgcctgtgatgggatgattgctgagtgtcctggggccccagcaggcctggccaggcagccggaagaggtggtattgcaggcctctgtctcctcataccatctattcagagacgtagctgaagtcacagccttccgagggagcctgctaagctggtacgaccaagagaaacgggacctaccatggagaagacgggcagaagatgagatggacctggacaggcgggcatatgctgtgtgggtctcagaggtcatgctgcagcagacccaggttgccactgtgatcaactactataccggatggatgcagaagtggcctacactgcaggacctggccagtgcttccctggaggaggtgaatcaactctgggctggcctgggctactattctcgtggccggcggctgcaggagggagctcggaaggtggtagaggagctagggggccacatgccacgtacagcagagaccctgcagcagctcctgcctggcgtggggcgctacacagctggggccattgcctctatcgcctttggccaggcaaccggtgtggtggatggcaacgtagcacgggtgctgtgccgtgtccgagccattggtgctgatcccagcagcacccttgtttcccagcagctctggggtctagcccagcagctggtggacccagcccggccaggagatttcaaccaagcagccatggagctaggggccacagtgtgtaccccacagcgcccactgtgcagccagtgccctgtggagagcctgtgccgggcacgccagagagtggagcaggaacagctcttagcctcagggagcctgtcgggcagtcctgacgtggaggagtgtgctcccaacactggacagtgccacctgtgcctgcctccctcggagccctgggaccagaccctgggagtggtcaacttccccagaaaggccagccgcaagccccccagggaggagagctctgccacctgtgttctggaacagcctggggcccttggggcccaaattctgctggtgcagaggcccaactcaggtctgctggcaggactgtgggagttcccgtccgtgacctgggagccctcagagcagcttcagcgcaaggccctgctgcaggaactacagcgttgggctgggcccctcccagccacgcacctccggcaccttggggaggttgtccacaccttctctcacatcaagctgacatatcaagtatatgggctggccttggaagggcagaccccagtgaccaccgtaccaccaggtgctcgctggctgacgcaggaggaatttcacaccgcagctgtttccaccgccatgaaaaaggttttccgtgtgtatcagggccaacagccagggacctgtatgggttccaaaaggtcccaggtgtcctctccgtgcagtcggaaaaagccccgcatgggccagcaagtcctggataatttctttcggtctcacatctccactgatgcacacagcctcaacagtgcagcccagtgacacctctgaaagcccccattccctgagaatcctgttgttagtaaagtgcttatttttgtagtta

SEQ ID NO: 156166 - DNA, 772 bp, Homo sapiens
  Payload ID: 10645
  Gene Symbol: MUTYH
  Gene Name: mutY DNA glycosylase
  ENST ID: ENST00000412971
  CDS Start-End: 128-772
ctagaactatgagcccgaggccttcccctctcccagagcgcagaggctttgaaggctacctctgggaagccgctcaccgtcggaagctgcgggagctgaaactgcgccatcgtcactgtcggcggccatgacaccgctcgtctcccgcctgagtcgtctgtgggaggtgaatcaactctgggctggcctgggctactattctcgtggccggcggctgcaggagggagctcggaaggtggtagaggagctagggggccacatgccacgtacagcagagaccctgcagcagctcctgcctggcgtggggcgctacacagctggggccattgcctctatcgcctttggccaggcaaccggtgtggtggatggcaacgtagcacgggtgctgtgccgtgtccgagccattggtgctgatcccagcagcacccttgtttcccagcagctctggggtctagcccagcagctggtggacccagcccggccaggagatttcaaccaagcagccatggagctaggggccacagtgtgtaccccacagcgcccactgtgcagccagtgccctgtggagagcctgtgccgggcacgccagagagtggagcaggaacagctcttagcctcagggagcctgtcgggcagtcctgacgtggaggagtgtgctcccaacactggacagtgccacctgtgcctgcctccctcggagccctgggaccagaccctgggagtggtcaacttccccagaaaggccagccgcaagccccccagggaggagagc

SEQ ID NO: 156167 - DNA, 507 bp, Homo sapiens
  Payload ID: 10645
  Gene Symbol: MUTYH
  Gene Name: mutY DNA glycosylase
  ENST ID: ENST00000485271
  CDS Start-End: 1-134
agaccccagtgaccaccgtaccaccaggtgctcgctggctgacgcaggaggaatttcacaccgcagctgtttccaccgccatgaaaaaggttttccgtgtgtatcagggccaacagccagggacctgtatgtagagacagggtttcaccatgttgactaggctggtctcgaactcctgacctcaagtgatctgcccatcttggcctcccaaagtgctgggattacaggcgtgagccaccacacccatccatgggagctatcagttctaattgggagacggatcaggaaaggctgtttggaggaagcagctgggttccaaaaggtcccaggtgtcctctccgtgcagtcggaaaaagccccgcatgggccagcaagtcctggataatttctttcggtctcacatctccactgatgcacacagcctcaacagtgcagcccagtgacacctctgaaagcccccattccctgagaatcctgttgttagtaaagtgcttatttttgtagtta

SEQ ID NO: 156168 - DNA, 501 bp, Homo sapiens
  Payload ID: 10645
  Gene Symbol: MUTYH
  Gene Name: mutY DNA glycosylase
  ENST ID: ENST00000531105
  CDS Start-End: 195-383
cggggtctcgccgtcgggtcgccgatgggtcgaacttccgttcagacgtcccgggtccggcgcggggaaggcagcctggcgcgcgctaattgcctattggcctgtgctgccggctcgcagcccgggtggacccgagccacgccccctggagtgcgccggaaagccgggcgcgctagagctcgcgggaggccatcatgaggaagccacgagcagccgtgggaagtggtcacaggaagcaggcagccagccaggaagggaggcagaagcatgctaagaacaacagtcaggccaagccttctgcctgtgatgggttccaaaaggtcccaggtgtcctctccgtgcagtcggaaaaagccccgcatgggccagcaagtcctggataatttctttcggtctcacatctccactgatgcacacagcctcaacagtgcagcccagtgacacctctgaaagcccccattccctgagaatcctgttgttagtaaagtgcttatttttgta

SEQ ID NO: 156169 - DNA, 670 bp, Homo sapiens
  Payload ID: 10645
  Gene Symbol: MUTYH
  Gene Name: mutY DNA glycosylase
  ENST ID: ENST00000525160
  CDS Start-End: 161-328
ggaaggagcagtcctctgaagcttgaggagcctctagaactatgagcccgaggccttcccctctcccagagcgcagaggctttgaaggctacctctgggaagccgctcaccgtcggaagctgcgggagctgaaactgcgccatcgtcactgtcggcggccatgacaccgctcgtctcccgcctgagtcgtctgtgggccatcatgaggaagccacgagcagccgtgggaagtggtcacaggaagcaggcagccagccaggaagggaggcagaagcatgctaagaacaacagtcaggccaagccttctgcctgtgatggcagaagatgagatggacctggacaggcgggcatatgctgaagtggcctacactgcaggacctggccagtgcttccctggaggaggtgaatcaactctgggctggcctgggctactattctcgtggccggcggctgcaggagggagctcggaaggtggtagaggagctagggggccacatgccacgtacagcagagaccctgcagcagctcctgcctggcgtggggcgctacacagctggggccattgcctctatcgcctttggccaggcaaccggtgtggtggatggcaacgtagcacgggtgctgtgccgtgtccgagccattggtgctgatcccagcagcacccttgttt

SEQ ID NO: 156170 - DNA, 740 bp, Homo sapiens
  Payload ID: 10645
  Gene Symbol: MUTYH
  Gene Name: mutY DNA glycosylase
  ENST ID: ENST00000488731
  CDS Start-End: 27-677
cgcgctagagctcgcgggaggccatcatgaggaagccacgagcagccgtgggaagtggtcacaggaagcaggcagccagccaggaagggaggcagaagcatgctaagaacaacagtcaggccaagccttctgcctgtgatggaggtgaatcaactctgggctggcctgggctactattctcgtggccggcggctgcaggagggagctcggaaggtctgctggcaggactgtgggagttcccgtccgtgacctgggagccctcagagcagcttcagcgcaaggccctgctgcaggaactacagcgttgggctgggcccctcccagccacgcacctccggcaccttggggaggttgtccacaccttctctcacatcaagctgacatatcaagtatatgggctggccttggaagggcagaccccagtgaccaccgtaccaccaggtgctcgctggctgacgcaggaggaatttcacaccgcagctgtttccaccgccatgaaaaaggttttccgtgtgtatcagggccaacagccagggacctgtatgggttccaaaaggtcccaggtgtcctctccgtgcagtcggaaaaagccccgcatgggccagcaagtcctggataatttctttcggtctcacatctccactgatgcacacagcctcaacagtgcagcccagtgacacctctgaaagcccccattccctgagaatcctgttgttagtaaagtgcttatttttgtagtt

SEQ ID NO: 156171 - DNA, 673 bp, Homo sapiens
  Payload ID: 10645
  Gene Symbol: MUTYH
  Gene Name: mutY DNA glycosylase
  ENST ID: ENST00000529892
  CDS Start-End: 1-641
ggccaggagatttcaaccaagcagccatggagctaggggccacagtgtgtaccccacagcgcccactgtgcagccagtgccctgtggagagcctgtgccgggcacgccagagagtggagcaggaacagctcttagcctcagggagcctgtcgggcagtcctgacgtggaggagtgtggtctgctggcaggactgtgggagttcccgtccgtgacctgggagccctcagagcagcttcagcgcaaggccctgctgcaggaactacagcgttgggctgggcccctcccagccacgcacctccggcaccttggggaggttgtccacaccttctctcacatcaagctgacatatcaagtatatgggctggccttggaagggcagaccccagtgaccaccgtaccaccaggtgctcgctggctgacgcaggaggaatttcacaccgcagctgtttccaccgccatgaaaaaggttttccgtgtgtatcagggccaacagccagggacctgtatgggttccaaaaggtcccaggtgtcctctccgtgcagtcggaaaaagccccgcatgggccagcaagtcctggataatttctttcggtctcacatctccactgatgcacacagcctcaacagtgcagcccagtgacacctctgaaagcccccattccctgagaatcc

SEQ ID NO: 156172 - DNA, 1662 bp, Homo sapiens
  Payload ID: 10645
  Gene Symbol: MUTYH
  Gene Name: mutY DNA glycosylase
  ENST ID: ENST00000528013
  CDS Start-End: 55-1662
gaacgcggggcctccgtgttctgctgtcttcatcagcgtgggccgcgggccatcatgaggaagccacgagcagccgtgggaagtggtcacaggaagcaggcagccagccaggaagggaggcagaagcatgctaagaacaacagtcaggccaagccttctgcctgtgatgcctgtgcagggatgattgctgagtgtcctggggccccagcaggcctggccaggcagccggaagaggtggtattgcaggcctctgtctcctcataccatctattcagagacgtagctgaagtcacagccttccgagggagcctgctaagctggtacgaccaagagaaacgggacctaccatggagaagacgggcagaagatgagatggacctggacaggcgggcatatgctgtgtgggtctcagaggtcatgctgcagcagacccaggttgccactgtgatcaactactataccggatggatgcagaagtggcctacactgcaggacctggccagtgcttccctggaggaggtgaatcaactctgggctggcctgggctactattctcgtggccggcggctgcaggagggagctcggaaggtggtagaggagctagggggccacatgccacgtacagcagagaccctgcagcagctcctgcctggcgtggggcgctacacagctggggccattgcctctatcgcctttggccaggcaaccggtgtggtggatggcaacgtagcacgggtgctgtgccgtgtccgagccattggtgctgatcccagcagcacccttgtttcccagcagctctggggtctagcccagcagctggtggacccagcccggccaggagatttcaaccaagcagccatggagctaggggccacagtgtgtaccccacagcgcccactgtgcagccagtgccctgtggagagcctgtgccgggcacgccagagagtggagcaggaacagctcttagcctcagggagcctgtcgggcagtcctgacgtggaggagtgtgctcccaacactggacagtgccacctgtgcctgcctccctcggagccctgggaccagaccctgggagtggtcaacttccccagaaaggccagccgcaagccccccagggaggagagctctgccacctgtgttctggaacagcctggggcccttggggcccaaattctgctggtgcagaggcccaactcaggtctgctggcaggactgtgggagttcccgtccgtgacctgggagccctcagagcagcttcagcgcaaggccctgctgcaggaactacagcgttgggctgggcccctcccagccacgcacctccggcaccttggggaggttgtccacaccttctctcacatcaagctgacatatcaagtatatgggctggccttggaagggcagaccccagtgaccaccgtaccaccaggtgctcgctggctgacgcaggaggaatttcacaccgcagctgtttccaccgccatgaaaaaggttttccgtgtgtatcagggccaacagccagggacctgtatgggttccaaaaggtcccaggtgtcctctccgtgcagtcggaaaaagccccgcatgggccagcaagtcctggataatttctttcggtctcacatctccactgatgcacacagcctcaacagtgcagcccagtga

SEQ ID NO: 156173 - DNA, 1677 bp, Homo sapiens
  Payload ID: 10645
  Gene Symbol: MUTYH
  Gene Name: mutY DNA glycosylase
  ENST ID: ENST00000475516
  CDS Start-End: 112-234
cgctaattgcctattggcctgtgctgccggctcgcagcccgggtggacccgagccacgccccctggagtgcgccggaaagccgggcgcgctagagctcgcgggaggccatcatgaggaagccacgagcagccgtgggaagtggtcacaggaagcaggcagccagccaggaagggaggcagaagcatgctaagaacaacagtcaggccaagccttctgcctgtgatgagacgtagctgaagtcacagccttccgagggagcctgctaagctggtacgaccaagagaaacgggacctaccatggagaagacgggcagaagatgagatggacctggacaggcgggcatatgctgtgtgggtctcagaggtcatgctgcagcagacccaggttgccactgtgatcaactactataccggatggatgcagaagtggcctacactgcaggacctggccagtgcttccctggaggaggtgaatcaactctgggctggcctgggctactattctcgtggccggcggctgcaggagggagctcggaaggtggtagaggagctagggggccacatgccacgtacagcagagaccctgcagcagctcctgcctggcgtggggcgctacacagctggggccattgcctctatcgcctttggccaggcaaccggtgtggtggatggcaacgtagcacgggtgctgtgccgtgtccgagccattggtgctgatcccagcagcacccttgtttcccagcagctctggggtctagcccagcagctggtggacccagcccggccaggagatttcaaccaagcagccatggagctaggggccacagtgtgtaccccacagcgcccactgtgcagccagtgccctgtggagagcctgtgccgggcacgccagagagtggagcaggaacagctcttagcctcagggagcctgtcgggcagtcctgacgtggaggagtgtgctcccaacactggacagtgccacctgtgcctgcctccctcggagccctgggaccagaccctgggagtggtcaacttccccagaaaggccagccgcaagccccccagggaggagagctctgccacctgtgttctggaacagcctggggcccttggggcccaaattctgctggtgcagaggcccaactcaggtctgctggcaggactgtgggagttcccgtccgtgacctgggagccctcagagcagcttcagcgcaaggccctgctgcaggaactacagcgttgggctgggcccctcccagccacgcacctccggcaccttggggaggttgtccacaccttctctcacatcaagctgacatatcaagtatatgggctggccttggaagggcagaccccagtgaccaccgtaccaccaggtgctcgctggctgacgcaggaggaatttcacaccgcagctgtttccaccgccatgaaaaaggttttccgtgtgtatcagggccaacagccagggacctgtatgggttccaaaaggtcccaggtgtcctctccgtgcagtcggaaaaagccccgcatgggccagcaagtcctggataatttctttcggtctcacatctccactgatgcacacagcctcaacagtgcagcccagtgacacctctgaaagcccccattccctgagaatcctgttgttagtaaagtgcttatttttgtagtta

SEQ ID NO: 156174 - DNA, 839 bp, Homo sapiens
  Payload ID: 10645
  Gene Symbol: MUTYH
  Gene Name: mutY DNA glycosylase
  ENST ID: ENST00000470256
  CDS Start-End: 42-599
cgccggaaagccgggcgcgctagagctcgcgggaggccatcatgaggaagccacgagcagccgtgggaagtggtcacaggaagcaggcagccagccaggaagggaggcagaagcatgctaagaacaacagtcaggccaagccttctgcctgtgatgcaggcctggccaggcagccggaagaggtggtattgcaggcctctgtctcctcataccatctattcagagacgtagctgaagtcacagccttccgagggagcctgctaagctggtacgaccaagagaaacgggacctaccatggagaagacgggcagaagatgagatggacctggacaggcgggcatatgctggaggtgaatcaactctgggctggcctgggctactattctcgtggccggcggctgcaggagggagctcggaaggtggtagaggagctagggggccacatgccacgtacagcagagaccctgcagcagctcctgcctggcgtggggcgctacacagctggggccattgcctctatcgcctttggccaggcaaccggtgtggtggatggcaacgtagcacgggtgctgtgccgtgtccgagccattggtgctgatcccagcagcacccttgtttcccagcagctctggggtctagcccagcagctggtggacccagcccggccaggagatttcaaccaagcagccatggagctaggggccacagtgtgtaccccacagcgcccactgtgcagccagtgccctgtggagagcctgtgccgggcacgccagagagtggagcaggaacagctcttagcctcagggagcctgtcgggcagtcctgacgtggaggagtg

SEQ ID NO: 156175 - DNA, 1017 bp, Homo sapiens
  Payload ID: 10645
  Gene Symbol: MUTYH
  Gene Name: mutY DNA glycosylase
  ENST ID: ENST00000467459
  CDS Start-End: 1-555
gcaaccggtgtggtggatggcaacgtagcacgggtgctgtgccgtgtccgagccattggtgctgatcccagcagcacccttgtttcccagcagctctggggtctagcccagcagctggtggacccagcccggccaggagatttcaaccaagcagccatggagctaggggccacagtgtgtaccccacagcgcccactgtgcagccagtgccctgtggagagcctgtgccgggcacgccagagagtggagcaggaacagctcttagcctcagggagcctgtcgggcagtcctgacgtggaggagtgtgggttcggggatctccgttcccagctcccaacactggacagtgccacctgtgcctgcctccctcggagccctgggaccagaccctgggagtggtcaacttccccagaaaggccagccgcaagccccccagggaggagagctctgccacctgtgttctggaacagcctggggcccttggggcccaaattctgctggtgcagaggcccaactcaggtctgctggcaggactgtgggagttcccgtccgtgacctgggagccctcagagcagcttcagcgcaaggccctgctgcaggaactacagcgttgggctgggcccctcccagccacgcacctccggcaccttggggaggttgtccacaccttctctcacatcaagctgacatatcaagtatatgggctggccttggaagggcagaccccagtgaccaccgtaccaccaggtgctcgctggctgacgcaggaggaatttcacaccgcagctgtttccaccgccatgaaaaaggttttccgtgtgtatcagggccaacagccagggacctgtatgggttccaaaaggtcccaggtgtcctctccgtgcagtcggaaaaagccccgcatgggccagcaagtcctggataatttctttcggtctcacatctccactgatgcacacagcctcaacagtgcagcccagtgacacctctgaaagcccccattccctgagaatcctg

SEQ ID NO: 156176 - DNA, 1225 bp, Homo sapiens
  Payload ID: 10645
  Gene Symbol: MUTYH
  Gene Name: mutY DNA glycosylase
  ENST ID: ENST00000533178
  CDS Start-End: 1-300
gccatcatgaggaagccacgagcagccgtgggaagtggtcacaggaagcaggcagccagccaggaagggaggcagaagcatgctaagaacaacagtcaggccaagccttctgcctgtgatggtggtagaggagctagggggccacatgccacgtacagcagagaccctgcagcagctcctgcctggcgtggggcgctacacagctggggccattgcctctatcgcctttggccaggcaaccggtgtggtggatggcaacgtagcacgggtgctgtgccgtgtccgagccattggtgctgatcccagcagcacccttgtttcccagcagctctggggtctagcccagcagctggtggacccagcccggccaggagatttcaaccaagcagccatggagctaggggccacagtgtgtaccccacagcgcccactgtgcagccagtgccctgtggagagcctgtgccgggcacgccagagagtggagcaggaacagctcttagcctcagggagcctgtcgggcagtcctgacgtggaggagtgtgctcccaacactggacagtgccacctgtgcctgcctccctcggagccctgggaccagaccctgggagtggtcaacttccccagaaaggccagccgcaagccccccagggaggagagctctgccacctgtgttctggaacagcctggggcccttggggcccaaattctgctggtgcagaggcccaactcaggtctgctggcaggactgtgggagttcccgtccgtgacctgggagccctcagagcagcttcagcgcaaggccctgctgcaggaactacagcgttgggctgggcccctcccagccacgcacctccggcaccttggggaggttgtccacaccttctctcacatcaagctgacatatcaagtatatgggctggccttggaagggcagaccccagtgaccaccgtaccaccaggtgctcgctggctgacgcaggaggaatttcacaccgcagctgtttccaccgccatgaaaaaggttttccgtgtgtatcagggccaacagccagggacctgtatgggttccaaaaggtcccaggtgtcctctccgtgcagtcggaaaaagccccgcatgggccagcaagtcctggataatttctttcggtctcacatctccactgatgcacacagcctcaacagtgcagcccagtgacacctctgaaagcccccattccctgagaat

SEQ ID NO: 156177 - DNA, 788 bp, Homo sapiens
  Payload ID: 10645
  Gene Symbol: MUTYH
  Gene Name: mutY DNA glycosylase
  ENST ID: ENST00000483127
  CDS Start-End: 507-788
aacgcggggcctccgtgttctgctgtcttcatcagcgtgggccgcgggtatctattgtgtacagtttacctggcactgactttggacacacaccaatcaacaagagaatcagtccttgcactcaagtcgttttttacagtcaaattcaggaagtacacactgatggaaagaatcaaagtaatgtaaaattacattaggtaagagctacaaggcagaaatatgtgataggataagatgaggggacctgatttggacatttcagtcaagacttgaaaaatgataaggtgttaggtaaaagcataaaagagtccaaacagaggaaatggattgtgtgaggccccaaggtgggcagacacacttgaggtgtttaagcaactaaattcagtcaaccttggctagagcatagtgaggggatgaggcggatggtgcccggatcactggacctgcaaggctgtagtaagaggactgccttctaagagcaagggtgtggcagccaaatccctccaatggcctataaggccatcatgaggaagccacgagcagccgtgggaagtggtcacaggaagcaggcagccagccaggaagggaggcagaagcatgctaagaacaacagtcaggccaagccttctgcctgtgatggcctggccaggcagccggaagaggtggtattgcaggcctctgtctcctcataccatctattcagagacgtagctgaagtcacagccttccgagggagcctgctaagctggtacgaccaagagaaacgggacctaccatggagaagacgg

SEQ ID NO: 156178 - DNA, 989 bp, Homo sapiens
  Payload ID: 10645
  Gene Symbol: MUTYH
  Gene Name: mutY DNA glycosylase
  ENST ID: ENST00000467940
  CDS Start-End: 134-271
gagcctctagaactatgagcccgaggccttcccctctcccagagcgcagaggctttgaaggctacctctgggaagccgctcaccgtcggaagctgcgggagctgaaactgcgccatcgtcactgtcggcggccatgacaccgctcgtctcccgcctgagtcgtctgtgggtacgctggacttgcggccatcatgaggaagccacgagcagccgtgggaagtggtcacaggaagcaggcagccagccaggaagggaggcagaagcatgctaagaacaacagtcaggccaagccttctgcctgtgatgcaggcctggccaggcagccggaagaggtggtattgcaggcctctgtctcctcataccatctattcagagacgtagctgaagtcacagccttccgagggagcctgctaagctggtacgaccaagagaaacgggacctaccatggagaagacgggcagaagatgagatggacctggacaggcgggcatatgctgtgtgggtctcagaggtcatgctgcagcagacccaggttgccactgtgatcaactactataccggatggatgcagaagtggcctacactgcaggacctggccagtgcttccctggaggaggtgaatcaactctgggctggcctgggctactattctcgtggccggcggctgcaggagggagctcggaaggtggtagaggagctagggggccacatgccacgtacagcagagaccctgcagcagctcctgcctggcgtggggcgctacacagctggggccattgcctctatcgcctttggccaggcaaccggtgtggtggatggcaacgtagcacgggtgctgtgccgtgtccgagccattggtgctgatcccagcagcacccttgtttcccagcagctctggggtctagcccagcagctggtggacccagcccggccaggagatttcaaccaagcagccatggagctaggggccacagtgtgtaccccacag

SEQ ID NO: 156179 - DNA, 1742 bp, Homo sapiens
  Payload ID: 10645
  Gene Symbol: MUTYH
  Gene Name: mutY DNA glycosylase
  ENST ID: ENST00000481571
  CDS Start-End: 135-299
ggagcctctagaactatgagcccgaggccttcccctctcccagagcgcagaggctttgaaggctacctctgggaagccgctcaccgtcggaagctgcgggagctgaaactgcgccatcgtcactgtcggcggccatgacaccgctcgtctcccgcctgagtcgtctgtgggccatcatgaggaagccacgagcagccgtgggaagtggtcacaggaagcaggcagccagccaggaagggaggcagaagcatgctaagaacaacagtcaggccaagccttctgcctgtgatgagacgtagctgaagtcacagccttccgagggagcctgctaagctggtacgaccaagagaaacgggacctaccatggagaagacgggcagaagatgagatggacctggacaggcgggcatatgctgtgtgggtctcagaggtcatgctgcagcagacccaggttgccactgtgatcaactactataccggatggatgcagaagtggcctacactgcaggacctggccagtgcttccctggaggaggtgaatcaactctgggctggcctgggctactattctcgtggccggcggctgcaggagggagctcggaaggtggtagaggagctagggggccacatgccacgtacagcagagaccctgcagcagctcctgcctggcgtggggcgctacacagctggggccattgcctctatcgcctttggccaggcaaccggtgtggtggatggcaacgtagcacgggtgctgtgccgtgtccgagccattggtgctgatcccagcagcacccttgtttcccagcagctctggggtctagcccagcagctggtggacccagcccggccaggagatttcaaccaagcagccatggagctaggggccacagtgtgtaccccacagcgcccactgtgcagccagtgccctgtggagagcctgtgccgggcacgccagagagtggagcaggaacagctcttagcctcagggagcctgtcgggcagtcctgacgtggaggagtgtgctcccaacactggacagtgccacctgtgcctgcctccctcggagccctgggaccagaccctgggagtggtcaacttccccagaaaggccagccgcaagccccccagggaggagagctctgccacctgtgttctggaacagcctggggcccttggggcccaaattctgctggtgcagaggcccaactcaggtctgctggcaggactgtgggagttcccgtccgtgacctgggagccctcagagcagcttcagcgcaaggccctgctgcaggaactacagcgttgggctgggcccctcccagccacgcacctccggcaccttggggaggttgtccacaccttctctcacatcaagctgacatatcaagtatatgggctggccttggaagggcagaccccagtgaccaccgtaccaccaggtgctcgctggctgacgcaggaggaatttcacaccgcagctgtttccaccgccatgaaaaaggttttccgtgtgtatcagggccaacagccagggacctgtatgggttccaaaaggtcccaggtgtcctctccgtgcagtcggaaaaagccccgcatgggccagcaagtcctggataatttctttcggtctcacatctccactgatgcacacagcctcaacagtgcagcccagtgacacctctgaaagcccccattccctgagaatcctgttgttagtaaagtgcttatttttgtagtta

SEQ ID NO: 156180 - DNA, 1029 bp, Homo sapiens
  Payload ID: 10645
  Gene Symbol: MUTYH
  Gene Name: mutY DNA glycosylase
  ENST ID: ENST00000529984
  CDS Start-End: 236-886
ggaacttgtagtctcctcgtggctagttcaggcggaaggagcagtcctctgaagcttgaggagcctctagaactatgagcccgaggccttcccctctcccagagcgcagaggctttgaaggctacctctgggaagccgctcaccgtcggaagctgcgggagctgaaactgcgccatcgtcactgtcggcggccatgacaccgctcgtctcccgcctgagtcgtctgtgggccatcatgaggaagccacgagcagccgtgggaagtggtcacaggaagcaggcagccagccaggaagggaggcagaagcatgctaagaacaacagtcaggccaagccttctgcctgtgatggaggtgaatcaactctgggctggcctgggctactattctcgtggccggcggctgcaggagggagctcggaaggtctgctggcaggactgtgggagttcccgtccgtgacctgggagccctcagagcagcttcagcgcaaggccctgctgcaggaactacagcgttgggctgggcccctcccagccacgcacctccggcaccttggggaggttgtccacaccttctctcacatcaagctgacatatcaagtatatgggctggccttggaagggcagaccccagtgaccaccgtaccaccaggtgctcgctggctgacgcaggaggaatttcacaccgcagctgtttccaccgccatgaaaaaggttttccgtgtgtatcagggccaacagccagggacctgtatgggttccaaaaggtcccaggtgtcctctccgtgcagtcggaaaaagccccgcatgggccagcaagtcctggataatttctttcggtctcacatctccactgatgcacacagcctcaacagtgcagcccagtgacacctctgaaagcccccattccctgagaatcctgttgttagtaaagtgcttatttttgtagttattttatgttgtatttttttgagatgggggtctcgctatgttgctcagactggtttcgaactcaggtgattctggcctca

SEQ ID NO: 156181 - DNA, 965 bp, Homo sapiens
  Payload ID: 10645
  Gene Symbol: MUTYH
  Gene Name: mutY DNA glycosylase
  ENST ID: ENST00000461495
  CDS Start-End: 162-326
cggaaggagcagtcctctgaagcttgaggagcctctagaactatgagcccgaggccttcccctctcccagagcgcagaggctttgaaggctacctctgggaagccgctcaccgtcggaagctgcgggagctgaaactgcgccatcgtcactgtcggcggccatgacaccgctcgtctcccgcctgagtcgtctgtgggccatcatgaggaagccacgagcagccgtgggaagtggtcacaggaagcaggcagccagccaggaagggaggcagaagcatgctaagaacaacagtcaggccaagccttctgcctgtgatgagacgtagctgaagtcacagccttccgagggagcctgctaagctggtacgaccaagagaaacgggacctaccatggagaagacgggcagaagatgagatggacctggacaggcgggcatatgctgaagtggcctacactgcaggacctggccagtgcttccctggaggaggtgaatcaactctgggctggcctgggctactattctcgtggccggcggctgcaggagggagctcggaaggtggtagaggagctagggggccacatgccacgtacagcagagaccctgcagcagctcctgcctggcgtggggcgctacacagctggggccattgcctctatcgcctttggccaggcaaccggtgtggtggatggcaacgtagcacgggtgctgtgccgtgtccgagccattggtgctgatcccagcagcacccttgtttcccagcagctctggggtctagcccagcagctggtggacccagcccggccaggagatttcaaccaagcagccatggagctaggggccacagtgtgtaccccacagcgcccactgtgcagccagtgccctgtggagagcctgtgccgggcacgccagagagtggagcaggaacagctcttagcctcagggagcctgtcgggcagtcctgac

SEQ ID NO: 156182 - DNA, 2733 bp, Homo sapiens
  Payload ID: 10646
  Gene Symbol: MX1
  Gene Name: MX dynamin-like GTPase 1
  ENST ID: ENST00000288383
  CDS Start-End: 358-2277
tctacctgcctcagcctcccaaagtgctgagattacaggcgtgagccccggggcccggcctggagggatattcttgaagcgccttgagcagggaggcagcgtttgtctttatctgaccttggcttctttgggtcactctgtttctctttccgtgaataaaaagccagtgagcacacactgtgtcccaggcactcttctacgctctggggacatcaccatgaacaactagtcagagtccccacctccaggggccttccgttctggtggtgggtttggttccatggttgaatgcacccagctgcttatctgttcaataggcatctgctttattttaagcttactttgcaaagaaggaagatggttgtttccgaagtggacatcgcaaaagctgatccagctgctgcatcccaccctctattactgaatggagatgctactgtggcccagaaaaatccaggctcggtggctgagaacaacctgtgcagccagtatgaggagaaggtgcgcccctgcatcgacctcattgactccctgcgggctctaggtgtggagcaggacctggccctgccagccatcgccgtcatcgggatcgtgaccagatgcccgctggtgctgaaactgaagaaacttgtgaacgaagataagtggagaggcaaggtcagttaccaggactacgagattgagatttcggatgcttcagaggtagaaaaggaaattaataaagcccagaatgccatcgccggggaaggaatgggaatcagtcatgagctaatcaccctggagatcagctcccgagatgtcccggatctgactctaatagaccttcctggcataaccagagtggctgtgggcaatcagcctgctgacattgggtataagatcaagacactcatcaagaagtacatccagaggcaggagacaatcagcctggtggtggtccccagtaatgtggacatcgccaccacagaggctctcagcatggcccaggaggtggaccccgagggagacaggaccatcggaatcttgacgaagcctgatctggtggacaaaggaactgaagacaaggttgtggacgtggtgcggaacctcgtgttccacctgaagaagggttacatgattgtcaagtgccggggccagcaggagatccaggaccagctgagcctgtccgaagccctgcagagagagaagatcttctttgagaaccacccatatttcagggatctgctggaggaaggaaaggccacggttccctgcctggcagaaaaacttaccagcgagctcatcacacatatctgtaaatctctgcccctgttagaaaatcaaatcaaggagactcaccagagaataacagaggagctacaaaagtatggtgtcgacataccggaagacgaaaatgaaaaaatgttcttcctgatagataaagttaatgcctttaatcaggacatcactgctctcatgcaaggagaggaaactgtaggggaggaagacattcggctgtttaccagactccgacacgagttccacaaatggagtacaataattgaaaacaattttcaagaaggccataaaattttgagtagaaaaatccagaaatttgaaaatcagtatcgtggtagagagctgccaggctttgtgaattacaggacatttgagacaatcgtgaaacagcaaatcaaggcactggaagagccggctgtggatatgctacacaccgtgacggatatggtccggcttgctttcacagatgtttcgataaaaaattttgaagagttttttaacctccacagaaccgccaagtccaaaattgaagacattagagcagaacaagagagagaaggtgagaagctgatccgcctccacttccagatggaacagattgtctactgccaggaccaggtatacaggggtgcattgcagaaggtcagagagaaggagctggaagaagaaaagaagaagaaatcctgggattttggggctttccagtccagctcggcaacagactcttccatggaggagatctttcagcacctgatggcctatcaccaggaggccagcaagcgcatctccagccacatccctttgatcatccagttcttcatgctccagacgtacggccagcagcttcagaaggccatgctgcagctcctgcaggacaaggacacctacagctggctcctgaaggagcggagcgacaccagcgacaagcggaagttcctgaaggagcggcttgcacggctgacgcaggctcggcgccggcttgcccagttccccggttaaccacactctgtccagccccgtagacgtgcacgcacactgtctgcccccgttcccgggtagccactggactgacgacttgagtgctcagtagtcagactggatagtccgtctctgcttatccgttagccgtggtgatttagcaggaagctgtgagagcagtttggtttctagcatgaagacagagccccaccctcagatgcacatgagctggcgggattgaaggatgctgtcttcgtactgggaaagggattttcagccctcagaatcgctccaccttgcagctctccccttctctgtattcctagaaactgacacatgctgaacatcacagcttatttcctcatttttataatgtcccttcacaaacccagtgttttaggagcatgagtgccgtgtgtgtgcgtcctgtcggagccctgtctcctctctctgtaataaactcatttctagcagaca

SEQ ID NO: 156183 - DNA, 2850 bp, Homo sapiens
  Payload ID: 10646
  Gene Symbol: MX1
  Gene Name: MX dynamin-like GTPase 1
  Uniprot ID: P20591
  ENST ID: ENST00000398598
  CDS Start-End: 406-2394
tgagtttcatttcttcgcggcgcggggcggggctgggcgcggggtgaaagaggcgaagcgagagcggaggccgcactccagcactgcgcagggaccgccttggaccgcagttgccggccaggaatcccagtgtcacggtggacacgcctccctcgcgcccttgccgcccacctgctcacccagctcaggggctttggaattctgtggccacactgcgaggagatcggttctgggtcggaggctacaggaagactcccactccctgaaatctggagtgaagaacgccgccatccagccaccattccaaggaggtgcaggagaacagctctgtgataccatttaacttgttgacattacttttatttgaaggaacgtatattagagcttactttgcaaagaaggaagatggttgtttccgaagtggacatcgcaaaagctgatccagctgctgcatcccaccctctattactgaatggagatgctactgtggcccagaaaaatccaggctcggtggctgagaacaacctgtgcagccagtatgaggagaaggtgcgcccctgcatcgacctcattgactccctgcgggctctaggtgtggagcaggacctggccctgccagccatcgccgtcatcggggaccagagctcgggcaagagctccgtgttggaggcactgtcaggagttgcccttcccagaggcagcgggatcgtgaccagatgcccgctggtgctgaaactgaagaaacttgtgaacgaagataagtggagaggcaaggtcagttaccaggactacgagattgagatttcggatgcttcagaggtagaaaaggaaattaataaagcccagaatgccatcgccggggaaggaatgggaatcagtcatgagctaatcaccctggagatcagctcccgagatgtcccggatctgactctaatagaccttcctggcataaccagagtggctgtgggcaatcagcctgctgacattgggtataagatcaagacactcatcaagaagtacatccagaggcaggagacaatcagcctggtggtggtccccagtaatgtggacatcgccaccacagaggctctcagcatggcccaggaggtggaccccgagggagacaggaccatcggaatcttgacgaagcctgatctggtggacaaaggaactgaagacaaggttgtggacgtggtgcggaacctcgtgttccacctgaagaagggttacatgattgtcaagtgccggggccagcaggagatccaggaccagctgagcctgtccgaagccctgcagagagagaagatcttctttgagaaccacccatatttcagggatctgctggaggaaggaaaggccacggttccctgcctggcagaaaaacttaccagcgagctcatcacacatatctgtaaatctctgcccctgttagaaaatcaaatcaaggagactcaccagagaataacagaggagctacaaaagtatggtgtcgacataccggaagacgaaaatgaaaaaatgttcttcctgatagataaagttaatgcctttaatcaggacatcactgctctcatgcaaggagaggaaactgtaggggaggaagacattcggctgtttaccagactccgacacgagttccacaaatggagtacaataattgaaaacaattttcaagaaggccataaaattttgagtagaaaaatccagaaatttgaaaatcagtatcgtggtagagagctgccaggctttgtgaattacaggacatttgagacaatcgtgaaacagcaaatcaaggcactggaagagccggctgtggatatgctacacaccgtgacggatatggtccggcttgctttcacagatgtttcgataaaaaattttgaagagttttttaacctccacagaaccgccaagtccaaaattgaagacattagagcagaacaagagagagaaggtgagaagctgatccgcctccacttccagatggaacagattgtctactgccaggaccaggtatacaggggtgcattgcagaaggtcagagagaaggagctggaagaagaaaagaagaagaaatcctgggattttggggctttccagtccagctcggcaacagactcttccatggaggagatctttcagcacctgatggcctatcaccaggaggccagcaagcgcatctccagccacatccctttgatcatccagttcttcatgctccagacgtacggccagcagcttcagaaggccatgctgcagctcctgcaggacaaggacacctacagctggctcctgaaggagcggagcgacaccagcgacaagcggaagttcctgaaggagcggcttgcacggctgacgcaggctcggcgccggcttgcccagttccccggttaaccacactctgtccagccccgtagacgtgcacgcacactgtctgcccccgttcccgggtagccactggactgacgacttgagtgctcagtagtcagactggatagtccgtctctgcttatccgttagccgtggtgatttagcaggaagctgtgagagcagtttggtttctagcatgaagacagagccccaccctcagatgcacatgagctggcgggattgaaggatgctgtcttcgtactgggaaagggattttcagccctcagaatcgctccaccttgcagctctccccttctctgtattcctagaaactgacacatgctgaacatcacagcttatttcctcatttttataatgtcccttcacaaacccagtgttttaggagcatgagtgccgtgtgtgtgcgtcctgtcggagccctgtctcctctctctgtaataaactcatttctagcagaca

SEQ ID NO: 156184 - DNA, 3470 bp, Homo sapiens
  Payload ID: 10646
  Gene Symbol: MX1
  Gene Name: MX dynamin-like GTPase 1
  Uniprot ID: P20591
  ENST ID: ENST00000398600
  CDS Start-End: 1026-3014
agtctgaagtcatgcaatttgacttttcctttctggaaaccagcgagcagaaatgaaaccgaaactgaattgtccgggaaattcgcggtgggggcggagagcgcagggagaagtaagcccagtgcaggatcctgaggcccgtgtttgcaggaccagggccggccttccgattccccattcattccagaagcaccgaaccacgctgtgcccggatcccaagtgcagcggcacccagcgtgggcctggggttgccggttgacccggtcctcagcctggtagcagaggccaggccagtgccacaaggcacctaagtccacctgggcctggagcaggacaggttgcaaaagaaaatatctcgggacccccaaactccttatgctaagggaaacatcgagcctgggaactgagccatcaacgctgccattctttttcccaaacagaaccctgttgtcagaggtacacccagagcaactccacaccgggtgcatgccacagcaactccatcttaaataggagctggtaaaacgaggctgatacctactgggctgcattcccagacggcatagcgaggaggtgctgaagagcgcaggtttggagaatgatcacctggattggaaccatagctctaccaatatggaacccagctccttaggcctcggtcttctcatggagaacatggtgtgataatcctactcctctgggagggtggctgttaagccttggaccgcagttgccggccaggaatcccagtgtcacggtggacacgcctccctcgcgcccttgccgcccacctgctcacccagctcaggggctttggaattctgtggccacactgcgaggagatcggttctgggtcggaggctacaggaagactcccactccctgaaatctggagtgaagaacgccgccatccagccaccattccaaggaggtgcaggagaacagctctgtgataccatttaacttgttgacattacttttatttgaaggaacgtatattagagcttactttgcaaagaaggaagatggttgtttccgaagtggacatcgcaaaagctgatccagctgctgcatcccaccctctattactgaatggagatgctactgtggcccagaaaaatccaggctcggtggctgagaacaacctgtgcagccagtatgaggagaaggtgcgcccctgcatcgacctcattgactccctgcgggctctaggtgtggagcaggacctggccctgccagccatcgccgtcatcggggaccagagctcgggcaagagctccgtgttggaggcactgtcaggagttgcccttcccagaggcagcgggatcgtgaccagatgcccgctggtgctgaaactgaagaaacttgtgaacgaagataagtggagaggcaaggtcagttaccaggactacgagattgagatttcggatgcttcagaggtagaaaaggaaattaataaagcccagaatgccatcgccggggaaggaatgggaatcagtcatgagctaatcaccctggagatcagctcccgagatgtcccggatctgactctaatagaccttcctggcataaccagagtggctgtgggcaatcagcctgctgacattgggtataagatcaagacactcatcaagaagtacatccagaggcaggagacaatcagcctggtggtggtccccagtaatgtggacatcgccaccacagaggctctcagcatggcccaggaggtggaccccgagggagacaggaccatcggaatcttgacgaagcctgatctggtggacaaaggaactgaagacaaggttgtggacgtggtgcggaacctcgtgttccacctgaagaagggttacatgattgtcaagtgccggggccagcaggagatccaggaccagctgagcctgtccgaagccctgcagagagagaagatcttctttgagaaccacccatatttcagggatctgctggaggaaggaaaggccacggttccctgcctggcagaaaaacttaccagcgagctcatcacacatatctgtaaatctctgcccctgttagaaaatcaaatcaaggagactcaccagagaataacagaggagctacaaaagtatggtgtcgacataccggaagacgaaaatgaaaaaatgttcttcctgatagataaagttaatgcctttaatcaggacatcactgctctcatgcaaggagaggaaactgtaggggaggaagacattcggctgtttaccagactccgacacgagttccacaaatggagtacaataattgaaaacaattttcaagaaggccataaaattttgagtagaaaaatccagaaatttgaaaatcagtatcgtggtagagagctgccaggctttgtgaattacaggacatttgagacaatcgtgaaacagcaaatcaaggcactggaagagccggctgtggatatgctacacaccgtgacggatatggtccggcttgctttcacagatgtttcgataaaaaattttgaagagttttttaacctccacagaaccgccaagtccaaaattgaagacattagagcagaacaagagagagaaggtgagaagctgatccgcctccacttccagatggaacagattgtctactgccaggaccaggtatacaggggtgcattgcagaaggtcagagagaaggagctggaagaagaaaagaagaagaaatcctgggattttggggctttccagtccagctcggcaacagactcttccatggaggagatctttcagcacctgatggcctatcaccaggaggccagcaagcgcatctccagccacatccctttgatcatccagttcttcatgctccagacgtacggccagcagcttcagaaggccatgctgcagctcctgcaggacaaggacacctacagctggctcctgaaggagcggagcgacaccagcgacaagcggaagttcctgaaggagcggcttgcacggctgacgcaggctcggcgccggcttgcccagttccccggttaaccacactctgtccagccccgtagacgtgcacgcacactgtctgcccccgttcccgggtagccactggactgacgacttgagtgctcagtagtcagactggatagtccgtctctgcttatccgttagccgtggtgatttagcaggaagctgtgagagcagtttggtttctagcatgaagacagagccccaccctcagatgcacatgagctggcgggattgaaggatgctgtcttcgtactgggaaagggattttcagccctcagaatcgctccaccttgcagctctccccttctctgtattcctagaaactgacacatgctgaacatcacagcttatttcctcatttttataatgtcccttcacaaacccagtgttttaggagcatgagtgccgtgtgtgtgcgtcctgtcggagccctgtctcctctctctgtaataaactcatttctagcagaca

SEQ ID NO: 156185 - DNA, 516 bp, Homo sapiens
  Payload ID: 10646
  Gene Symbol: MX1
  Gene Name: MX dynamin-like GTPase 1
  ENST ID: ENST00000419044
  CDS Start-End: 440-516
atctgattcagcaggcctgggttcgggcccgagaacctgcgtctcccgcgagttcccgcgaggcaagtgctgcaggtgcggggccaggagctaggtttcgtttctgcgcccggagccgccctcagcacaggccttggaccgcagttgccggccaggaatcccagtgtcacggtggacacgcctccctcgcgcccttgccgcccacctgctcacccagctcaggggctttggaattctgtggccacactgcgaggagatcggttctgggtcggaggctacaggaagactcccactccctgaaatctggagtgaagaacgccgccatccagccaccattccaaggaggtgcaggagaacagctctgtgataccatttaacttgttgacattacttttatttgaaggaacgtatattagagcttactttgcaaagaaggaagatggttgtttccgaagtggacatcgcaaaagctgatccagctgctgcatcccaccctctattactgaatggagatgc

SEQ ID NO: 156186 - DNA, 583 bp, Homo sapiens
  Payload ID: 10646
  Gene Symbol: MX1
  Gene Name: MX dynamin-like GTPase 1
  ENST ID: ENST00000441677
  CDS Start-End: 351-583
actccagcactgcgcagggaccgccttggaccgcagttgccggccaggaatcccagtgtcacggtggacacgcctccctcgcgcccttgccgcccacctgctcacccagctcaggggctttggaattctgtggccacactgcgaggagatcggttctgggtcggaggctacaggaagactcccactccctgaaatctggagtgaagaacgccgccatccagccaccattccaaggaggtgcaggagaacagctctgtgataccatttaacttgttgacattacttttatttgaaggaacgtatattagaggcatctgctttattttaagcttactttgcaaagaaggaagatggttgtttccgaagtggacatcgcaaaagctgatccagctgctgcatcccaccctctattactgaatggagatgctactgtggcccagaaaaatccaggctcggtggctgagaacaacctgtgcagccagtatgaggagaaggtgcgcccctgcatcgacctcattgactccctgcgggctctaggtgtggagcaggacctggccctgccagccatcgccgtcatcgggga

SEQ ID NO: 156187 - DNA, 905 bp, Homo sapiens
  Payload ID: 10646
  Gene Symbol: MX1
  Gene Name: MX dynamin-like GTPase 1
  ENST ID: ENST00000424365
  CDS Start-End: 315-905
tcttcgcggcgcggggcggggctgggcgcggggtgaaagaggcgaagcgagagcggaggccgcactccagcactgcgcagggaccggaattctgtggccacactgcgaggagatcggttctgggtcggaggctacaggaagactcccactccctgaaatctggagtgaagaacgccgccatccagccaccattccaaggaggtgcaggagaacagctctgtgataccatttaacttgttgacattacttttatttgaaggaacgtatattagaggcatctgctttattttaagcttactttgcaaagaaggaagatggttgtttccgaagtggacatcgcaaaagctgatccagctgctgcatcccaccctctattactgaatggagatgctactgtggcccagaaaaatccaggctcggtggctgagaacaacctgtgcagccagtatgaggagaaggtgcgcccctgcatcgacctcattgactccctgcgggctctaggtgtggagcaggacctggccctgccagccatcgccgtcatcggggaccagagctcgggcaagagctccgtgttggaggcactgtcaggagttgcccttcccagaggcagcgggatcgtgaccagatgcccgctggtgctgaaactgaagaaacttgtgaacgaagataagtggagaggcaaggtcagttaccaggactacgagattgagatttcggatgcttcagaggtagaaaaggaaattaataaagcccagaatgccatcgccggggaaggaatgggaatcagtcatgagctaatcaccctggagatcagctcccgagatgtcccggatctgactctaatagaccttcctggcataaccagagtggctgtgggcaatcagcctgctgacattgggtataag

SEQ ID NO: 156188 - DNA, 872 bp, Homo sapiens
  Payload ID: 10646
  Gene Symbol: MX1
  Gene Name: MX dynamin-like GTPase 1
  ENST ID: ENST00000417963
  CDS Start-End: 269-872
gcggggtgaaagaggcgaagcgagagcggaggccgcactccagcactgcgcagggaccggaattctgtggccacactgcgaggagatcggttctgggtcggaggctacaggaagactcccactccctgaaatctggagtgaagaacgccgccatccagccaccattccaaggaggtgcaggagaacagctctgtgataccatttaacttgttgacattacttttatttgaaggaacgtatattagagcttactttgcaaagaaggaagatggttgtttccgaagtggacatcgcaaaagctgatccagctgctgcatcccaccctctattactgaatggagatgctactgtggcccagaaaaatccaggctcggtggctgagaacaacctgtgcagccagtatgaggagaaggtgcgcccctgcatcgacctcattgactccctgcgggctctaggtgtggagcaggacctggccctgccagccatcgccgtcatcggggaccagagctcgggcaagagctccgtgttggaggcactgtcaggagttgcccttcccagaggcagcgggatcgtgaccagatgcccgctggtgctgaaactgaagaaacttgtgaacgaagataagtggagaggcaaggtcagttaccaggactacgagattgagatttcggatgcttcagaggtagaaaaggaaattaataaagcccagaatgccatcgccggggaaggaatgggaatcagtcatgagctaatcaccctggagatcagctcccgagatgtcccggatctgactctaatagaccttcctggcataaccagagtggctgtgggcaatcagcctgctgacattgggtataagatcaagacactca

SEQ ID NO: 156189 - DNA, 887 bp, Homo sapiens
  Payload ID: 10646
  Gene Symbol: MX1
  Gene Name: MX dynamin-like GTPase 1
  ENST ID: ENST00000413778
  CDS Start-End: 684-887
gacgggcaggagacagatgccttcctcttgtctcaactgcaagaggcacctaagtccacctgggcctggagcaggacagaaccctgttgtcagaggtacacccagagcaactccacaccgggtgcatgccacagcaactccatcttaaataggagctggtaaaacgaggctgatacctactgggctgcattcccagacggcatagcgaggaggtgctgaagagcgcaggtttggagaatgatcacctggattggaaccatagctctaccaatatggaacccagctccttaggcctcggtcttctcatggagaacatggtgtgataatcctactcctctgggagggtggctgttaagccttggaccgcagttgccggccaggaatcccagtgtcacggtggacacgcctccctcgcgcccttgccgcccacctgctcacccagctcaggggctttggaattctgtggccacactgcgaggagatcggttctgggtcggaggctacaggaagactcccactccctgaaatctggagtgaagaacgccgccatccagccaccattccaaggaggtgcaggagaacagctctgtgataccatttaacttgttgacattacttttatttgaaggaacgtatattagaggcatctgctttattttaagcttactttgcaaagaaggaagatggttgtttccgaagtggacatcgcaaaagctgatccagctgctgcatcccaccctctattactgaatggagatgctactgtggcccagaaaaatccaggctcggtggctgagaacaacctgtgcagccagtatgaggagaaggtgcgcccctgcatcgacctcattgactccctgcgggctctaggtgtggagcaggacctg

SEQ ID NO: 156190 - DNA, 2810 bp, Homo sapiens
  Payload ID: 10646
  Gene Symbol: MX1
  Gene Name: MX dynamin-like GTPase 1
  Uniprot ID: P20591
  ENST ID: ENST00000455164
  CDS Start-End: 367-2355
atctgattcagcaggcctgggttcgggcccgagaacctgcgtctcccgcgagttcccgcgaggcaagtgctgcaggtgcggggccaggagctaggtttcgtttctgcgcccggagccgccctcagcacagggtctgtgagtttcatttcttcgcggcgcggggcggggctgggcgcggggtgaaagaggcgaagcgagagcggaggccgcactccagcactgcgcagggaccggaattctgtggccacactgcgaggagatcggttctgggtcggaggctacaggaagactcccactccctgaaatctggagtgaagaacgccgccatccagccaccattccaagcttactttgcaaagaaggaagatggttgtttccgaagtggacatcgcaaaagctgatccagctgctgcatcccaccctctattactgaatggagatgctactgtggcccagaaaaatccaggctcggtggctgagaacaacctgtgcagccagtatgaggagaaggtgcgcccctgcatcgacctcattgactccctgcgggctctaggtgtggagcaggacctggccctgccagccatcgccgtcatcggggaccagagctcgggcaagagctccgtgttggaggcactgtcaggagttgcccttcccagaggcagcgggatcgtgaccagatgcccgctggtgctgaaactgaagaaacttgtgaacgaagataagtggagaggcaaggtcagttaccaggactacgagattgagatttcggatgcttcagaggtagaaaaggaaattaataaagcccagaatgccatcgccggggaaggaatgggaatcagtcatgagctaatcaccctggagatcagctcccgagatgtcccggatctgactctaatagaccttcctggcataaccagagtggctgtgggcaatcagcctgctgacattgggtataagatcaagacactcatcaagaagtacatccagaggcaggagacaatcagcctggtggtggtccccagtaatgtggacatcgccaccacagaggctctcagcatggcccaggaggtggaccccgagggagacaggaccatcggaatcttgacgaagcctgatctggtggacaaaggaactgaagacaaggttgtggacgtggtgcggaacctcgtgttccacctgaagaagggttacatgattgtcaagtgccggggccagcaggagatccaggaccagctgagcctgtccgaagccctgcagagagagaagatcttctttgagaaccacccatatttcagggatctgctggaggaaggaaaggccacggttccctgcctggcagaaaaacttaccagcgagctcatcacacatatctgtaaatctctgcccctgttagaaaatcaaatcaaggagactcaccagagaataacagaggagctacaaaagtatggtgtcgacataccggaagacgaaaatgaaaaaatgttcttcctgatagataaagttaatgcctttaatcaggacatcactgctctcatgcaaggagaggaaactgtaggggaggaagacattcggctgtttaccagactccgacacgagttccacaaatggagtacaataattgaaaacaattttcaagaaggccataaaattttgagtagaaaaatccagaaatttgaaaatcagtatcgtggtagagagctgccaggctttgtgaattacaggacatttgagacaatcgtgaaacagcaaatcaaggcactggaagagccggctgtggatatgctacacaccgtgacggatatggtccggcttgctttcacagatgtttcgataaaaaattttgaagagttttttaacctccacagaaccgccaagtccaaaattgaagacattagagcagaacaagagagagaaggtgagaagctgatccgcctccacttccagatggaacagattgtctactgccaggaccaggtatacaggggtgcattgcagaaggtcagagagaaggagctggaagaagaaaagaagaagaaatcctgggattttggggctttccagtccagctcggcaacagactcttccatggaggagatctttcagcacctgatggcctatcaccaggaggccagcaagcgcatctccagccacatccctttgatcatccagttcttcatgctccagacgtacggccagcagcttcagaaggccatgctgcagctcctgcaggacaaggacacctacagctggctcctgaaggagcggagcgacaccagcgacaagcggaagttcctgaaggagcggcttgcacggctgacgcaggctcggcgccggcttgcccagttccccggttaaccacactctgtccagccccgtagacgtgcacgcacactgtctgcccccgttcccgggtagccactggactgacgacttgagtgctcagtagtcagactggatagtccgtctctgcttatccgttagccgtggtgatttagcaggaagctgtgagagcagtttggtttctagcatgaagacagagccccaccctcagatgcacatgagctggcgggattgaaggatgctgtcttcgtactgggaaagggattttcagccctcagaatcgctccaccttgcagctctccccttctctgtattcctagaaactgacacatgctgaacatcacagcttatttcctcatttttataatgtcccttcacaaacccagtgttttaggagcatgagtgccgtgtgtgtgcgtcctgtcggagccctgtctcctctctctgtaataaactcatttctagcagac

SEQ ID NO: 156191 - DNA, 281 bp, Homo sapiens
  Payload ID: 10646
  Gene Symbol: MX1
  Gene Name: MX dynamin-like GTPase 1
  ENST ID: ENST00000427464
  CDS Start-End: 177-281
cccagaagactggtactcctgagaggcagatgaagtggtggtctttgatatcgagcctgggatgccctgggcacatgaggaggtgcaggagaacagctctgtgataccatttaacttgttgacattacttttatttgaaggaacgtatattagagcttactttgcaaagaaggaagatggttgtttccgaagtggacatcgcaaaagctgatccagctgctgcatcccaccctctattactgaatggagatgctactgtggcccagaaaaatccaggctcg

SEQ ID NO: 156192 - DNA, 1980 bp, Homo sapiens
  Payload ID: 10646
  Gene Symbol: MX1
  Gene Name: MX dynamin-like GTPase 1
  Uniprot ID: P20591
  ENST ID: ENST00000619682
  CDS Start-End: 22-1548
cttactttgcaaagaaggaagatggttgtttccgaagtggacatcgcaaaagctgatccagctgctgcatcccaccctctattactgaatggagatgctactgtggcccagaaaaatccaggctcggtggctgagaacaacctgtgcagccagtatgaggagaaggtgcgcccctgcatcgacctcattgactccctgcgggctctaggtgtggagcaggacctggccctgccagccatcgccgtcatcggggaccagagctcgggcaagagctccgtgttggaggcactgtcaggagttgcccttcccagaggcagcgggatcgtgaccagatgcccgctggtgctgaaactgaagaaacttgtgaacgaagataagtggagaggcaaggtcagttaccaggactacgagattgagatttcggatgcttcagaggtagaaaaggaaattaataaagcccagaatgccatcgccggggaaggaatgggaatcagtcatgagctaatcaccctggagatcagctcccgagatgtcccggatctgactctaatagaccttcctggcataaccagagtggctgtgggcaatcagcctgctgacattgggtataagatcaagacactcatcaagaagtacatccagaggcaggagacaatcagcctggtggtggtccccagtaatgtggacatcgccaccacagaggctctcagcatggcccaggaggtggaccccgagggagacaggaccatcggaatcttgacgaagcctgatctggtggacaaaggaactgaagacaaggttgtggacgtggtgcggaacctcgtgttccacctgaagaagggttacatgattgtcaagtgccggggccagcaggagatccaggaccagctgagcctgtccgaagccctgcagagagagaagatcttctttgagaaccacccatatttcagggatctgctggaggaaggaaaggccacggttccctgcctggcagaaaaacttaccagcgagctcatcacacatatctgtaaatctctgcccctgttagaaaatcaaatcaaggagactcaccagagaataacagaggagctacaaaagtatggtgtcgacataccggaagacgaaaatgaaaaaatgttcttcctgatagataaagttaatgcctttaatcaggacatcactgctctcatgcaaggagaggaaactgtaggggaggaagacattcggctgtttaccagactccgacacgagttccacaaatggagtacaataattgaaaacaattttcaagaaggaggccagcaagcgcatctccagccacatccctttgatcatccagttcttcatgctccagacgtacggccagcagcttcagaaggccatgctgcagctcctgcaggacaaggacacctacagctggctcctgaaggagcggagcgacaccagcgacaagcggaagttcctgaaggagcggcttgcacggctgacgcaggctcggcgccggcttgcccagttccccggttaaccacactctgtccagccccgtagacgtgcacgcacactgtctgcccccgttcccgggtagccactggactgacgacttgagtgctcagtagtcagactggatagtccgtctctgcttatccgttagccgtggtgatttagcaggaagctgtgagagcagtttggtttctagcatgaagacagagccccaccctcagatgcacatgagctggcgggattgaaggatgctgtcttcgtactgggaaagggattttcagccctcagaatcgctccaccttgcagctctccccttctctgtattcctagaaactgacacatgctgaacatcacagcttatttcctcatttttataatgtcccttcacaaacccagtgttttaggagcatgagtgccgtgtgtgtgcgtcctgtcggagccctgtctcctctctctgtaataaactcatttctagcagac

SEQ ID NO: 156193 - DNA, 3042 bp, Homo sapiens
  Payload ID: 10647
  Gene Symbol: MX2
  Gene Name: MX dynamin-like GTPase 2
  Uniprot ID: P20592
  ENST ID: ENST00000330714
  CDS Start-End: 185-2332
atttctctccctgtttgttgatgacggagcaggggagggagtggttcatatgccacataaaagtgaagtggaggaaagggaagagatgatttctccatcctgaacgtgcagcgagcttgtcaggaagatcggaggtgccaagtagcagagaaagcatcccccagctctgacagggagacagcacatgtctaaggcccacaagccttggccctaccggaggagaagtcaattttcttctcgaaaatacctgaaaaaagaaatgaattccttccagcaacagccaccgccattcggcacagtgccaccacaaatgatgtttcctccaaactggcagggggcagagaaggacgctgctttcctcgccaaggacttcaactttctcactttgaacaatcagccaccaccaggaaacaggagccaaccaagggcaatggggcccgagaacaacctgtacagccagtacgagcagaaggtgcgcccctgcattgacctcatcgactccctgcgggctctgggtgtggagcaggacctggccctgccagccatcgccgtcatcggggaccagagctcgggcaagagctctgtgctggaggcactgtcaggagtcgcgcttcccagaggcagcggaatcgtaaccaggtgtccgctggtgctgaaactgaaaaagcagccctgtgaggcatgggccggaaggatcagctaccggaacaccgagctagagcttcaggaccctggccaggtggagaaagagatacacaaagcccagaacgtcatggccgggaatggccggggcatcagccatgagctcatcagcctggagatcacctcccctgaggttccagacctgaccatcattgaccttcccggcatcaccagggtggctgtggacaaccagccccgagacatcggactgcagatcaaggctctcatcaagaagtacatccagaggcagcagacgatcaacttggtggtggttccctgtaacgtggacattgccaccacggaggcgctgagcatggcccatgaggtggacccggaaggggacaggaccatcggtatcctgaccaaaccagatctaatggacaggggcactgagaaaagcgtcatgaatgtggtgcggaacctcacgtaccccctcaagaagggctacatgattgtgaagtgccggggccagcaggagatcacaaacaggctgagcttggcagaggcaaccaagaaagaaattacattctttcaaacacatccatatttcagagttctcctggaggaggggtcagccacggttccccgactggcagaaagacttaccactgaactcatcatgcatatccaaaaatcgctcccgttgttagaaggacaaataagggagagccaccagaaggcgaccgaggagctgcggcgttgcggggctgacatccccagccaggaggccgacaagatgttctttctaattgagaaaatcaagatgtttaatcaggacatcgaaaagttagtagaaggagaagaagttgtaagggagaatgagacccgtttatacaacaaaatcagagaggattttaaaaactgggtaggcatacttgcaactaatacccaaaaagttaaaaatattatccacgaagaagttgaaaaatatgaaaagcagtatcgaggcaaggagcttctgggatttgtcaactacaagacatttgagatcatcgtgcatcagtacatccagcagctggtggagcccgcccttagcatgctccagaaagccatggaaattatccagcaagctttcattaacgtggccaaaaaacattttggcgaatttttcaaccttaaccaaactgttcagagcacgattgaagacataaaagtgaaacacacagcaaaggcagaaaacatgatccaacttcagttcagaatggagcagatggttttttgtcaagatcagatttacagtgttgttctgaagaaagtccgagaagagatttttaaccctctggggacgccttcacagaatatgaagttgaactctcattttcccagtaatgagtcttcggtttcctcctttactgaaataggcatccacctgaatgcctacttcttggaaaccagcaaacgtctcgccaaccagatcccatttataattcagtattttatgctccgagagaatggtgactccttgcagaaagccatgatgcagatactacaggaaaaaaatcgctattcctggctgcttcaagagcagagtgagaccgctaccaagagaagaatccttaaggagagaatttaccggctcactcaggcgcgacacgcactctgtcaattctccagcaaagagatccactgaagggcggcgatgcctgtggttgttttcttgtgcgtactcattcattctaaggggagtcggtgcaggatgccgcttctgctttggggccaaactcttctgtcactatcagtgtccatctctactgtactccctcagcatcagagcatgcatcaggggtccacacaggctcagctctctccaccacccagctcttccctgaccttcacgaagggatggctctccagtccttgggtcccgtagcacacagttacagtgtcctaagatactgctatcattcttcgctaatttgtatttgtattcccttccccctacaagattatgagaccccagagggggaaggtctgggtcaaattcttcttttgtatgtccagtctcctgcacagcacctgcagcattgtaactgcttaataaatgacatctcactgaacgaatgagtgctgtgtaagtgatggagatacctgaggctattgctcaagcccaggccttggacatttagtgactgttagccggtccctttcagatccagtggccatgccccctgcttcccatggttcactgtcattgtgtttcccagcctctccactcccccgccagaaaggagcctgagtgattctcttttcttcttgtttccctgattatgatgagcttccattgttctgttaagtcttgaagaggaatttaataaagcaaagaaactttttaaaaacgta

SEQ ID NO: 156194 - DNA, 618 bp, Homo sapiens
  Payload ID: 10647
  Gene Symbol: MX2
  Gene Name: MX dynamin-like GTPase 2
  ENST ID: ENST00000435611
  CDS Start-End: 242-618
gaagtggaggaaagggaagagatgatttctccatcctgaacgtgcagcgggtcttcctgctctgtttcccaggctggagtgcaatggtaccatcatagctcactgcagccttaaacttccgggctcaagtgatcctcctgcctcggcctcccaatgcattgggattacagagcttgtcaggaagatcggaggtgccaagtagcagagaaagcatcccccagctctgacagggagacagcacatgtctaaggcccacaagccttggccctaccggaggagaagtcaattttcttctcgaaaatacctgaaaaaagaaatgaattccttccagcaacagccaccgccattcggcacagtgccaccacaaatgatgtttcctccaaactggcagggggcagagaaggacgctgctttcctcgccaaggacttcaactttctcactttgaacaatcagccaccaccaggaaacaggagccaaccaagggcaatggggcccgagaacaacctgtacagccagtacgagcagaaggtgcgcccctgcattgacctcatcgactccctgcgggctctgggtgtggagcaggacctggccctgccagccatcgccgtcatcgggga

SEQ ID NO: 156195 - DNA, 582 bp, Homo sapiens
  Payload ID: 10647
  Gene Symbol: MX2
  Gene Name: MX dynamin-like GTPase 2
  ENST ID: ENST00000436410
  CDS Start-End: 195-582
ataaaagtgaagtggaggaaagggaagagatgatttctccatcctgaacgtgcagcgcctttattaagctcctactgtatgccaggtactttgggctgcaggtacagctgtgaaaaaaaacagagcttgtcaggaagatcggaggtgccaagtagcagagaaagcatcccccagctctgacagggagacagcacatgtctaaggcccacaagccttggccctaccggaggagaagtcaattttcttctcgaaaatacctgaaaaaagaaatgaattccttccagcaacagccaccgccattcggcacagtgccaccacaaatgatgtttcctccaaactggcagggggcagagaaggacgctgctttcctcgccaaggacttcaactttctcactttgaacaatcagccaccaccaggaaacaggagccaaccaagggcaatggggcccgagaacaacctgtacagccagtacgagcagaaggtgcgcccctgcattgacctcatcgactccctgcgggctctgggtgtggagcaggacctggccctgccagccatcgccgtcatcggggaccagagctcgg

SEQ ID NO: 156196 - DNA, 604 bp, Homo sapiens
  Payload ID: 10647
  Gene Symbol: MX2
  Gene Name: MX dynamin-like GTPase 2
  ENST ID: ENST00000418103
  CDS Start-End: 204-604
taaacagtcttgccttcctgcacgtggacatttttcttcatgcatatttctcttgcaaatggttctattgtttgtataacagtatttcatgagcggagaagagttggaagcaaaaatctgttcatgagaaatagcttgtcaggaagatcggaggtgccaagtagcagagaaagcatcccccagctctgacagggagacagcacatgtctaaggcccacaagccttggccctaccggaggagaagtcaattttcttctcgaaaatacctgaaaaaagaaatgaattccttccagcaacagccaccgccattcggcacagtgccaccacaaatgatgtttcctccaaactggcagggggcagagaaggacgctgctttcctcgccaaggacttcaactttctcactttgaacaatcagccaccaccaggaaacaggagccaaccaagggcaatggggcccgagaacaacctgtacagccagtacgagcagaaggtgcgcccctgcattgacctcatcgactccctgcgggctctgggtgtggagcaggacctggccctgccagccatcgccgtcatcggggaccagagctcgggcaagagctctgt

SEQ ID NO: 156197 - DNA, 843 bp, Homo sapiens
  Payload ID: 10647
  Gene Symbol: MX2
  Gene Name: MX dynamin-like GTPase 2
  ENST ID: ENST00000416447
  CDS Start-End: 801-843
agaccttcaagttaattgttggaacctgcggctctaacacttccagcaaagctacttctgtgaaagctgtgacgagcagaggaaatgggacaggagaggagctgaatcctgagattgtatcgctaggagcccccaaagtacgatgacggtcctcgggccagcatgggggtgcattggcaccatgtaaggaaaggggccctcccgtggcaccgttggagtggggcggtgtggggttgttcggagagaaaagtttcccatgagctctgtttcagcaaacggcgatgaccacttccgtggcaactaaacagtcttgccttcctgcacgtggacatttttcttcatgcatatttctcttgcaaatggttctattgtttgtataacagtatttcatgagcggagaagagttggaagcaaaaatctgttcatgagaaatcctttattaagctcctactgtatgccaggtactttgggctgcaggtacagctgtgaaaaaaaacagcaggcgggaaccagccctgggacaggctccacacactcactgagcaccgcctcctgcacagcgcagtccctgctctcagcctgagcaggcgcagcagccctgccctcccaagaaaggggatggtgagaagcctagtgtcccctccacagagaccagcgccacacatgacagccacacatgacagtgttggtaccagcactcagtctttgagccacaagtgcttataagatagcttgtcaggaagatcggaggtgccaagtagcagagaaagcatcccccagctctgacagggagacagcacatgtctaaggcccacaagccttggccctaccggaggagaagtc

SEQ ID NO: 156198 - DNA, 4807 bp, Homo sapiens
  Payload ID: 10648
  Gene Symbol: MYBBP1A
  Gene Name: MYB binding protein (P160) 1a
  Uniprot ID: Q9BQG0
  ENST ID: ENST00000254718
  CDS Start-End: 308-4294
tccgagatgggcccttagaaatgcccccctggggctccaaaggggcagatgccacagccgccagggcggagcgggtgtgagcagaaggctgggaaagatgggacgccgctaggcgagggacttccgctcagagctacggcggaaatgccgctcttttaactctgggccggtctctcttggttcccccgcccctccgggttcttccgcctccgagccgacacaaaccggtgcgcatgcgccgtgccctgacctggaagcggctggggccggagcacacgtgtttcgtgtttcggtgagtgtggcggagatggagagccgggatcccgcccagccgatgtcgcctggagaagcgacgcagagtggcgcccggcctgccgaccgctatggcctattgaagcacagtcgcgagttcttggacttcttctgggacattgcgaagcctgagcaggagacgcgacttgcggccacggagaagctgctggagtatctgcgtggcaggccgaaggggtccgagatgaaatatgccctgaagcgtctaatcacgggactcggggtcgggcgagaaacagcccggccctgctacagtttggccctggcacagctgttacagtcttttgaagacctccccttgtgcagcatcctgcagcagatacaagaaaaatatgacctgcatcaggtgaagaaggcaatgctgagacctgctctctttgcaaacctgtttggagtgctcgccctctttcagtcaggtcggctggtgaaggaccaggaggcactgatgaagtcggtgaagctgctgcaggccctggcccagtaccaaaaccacttgcaggagcagccccggaaggccctggtggacatcctctccgaggtctcgaaggccacattgcaggagatcctgccggaggtcctcaaagccgacttgaatataatactcagctcccctgaacagctagagctcttcctcctggcccagcagaaggtgccctccaagctcaagaagctggtgggatccgtgaacctattctcagatgagaatgtccccaggctggtgaatgtgctgaagatggccgcctcctctgtgaagaaggaccgcaagctgcccgccattgctctggacctgctccgcctggcactcaaggaagacaagttcccacggttctggaaggaggtggtggaacaagggctgctgaagatgcagttctggccagccagctacctgtgtttccgcctgctgggcgcggccctgcccctgctgaccaaggagcagctgcacctggtgatgcagggagacgtgatccgccattacggggagcacgtgtgcactgctaagctcccaaagcagttcaagtttgccccagagatggacgattacgtgggcaccttcctagaggggtgccaggatgaccctgagcggcagctggccgtgctagtggccttctcatctgtcaccaaccaaggcctccctgtcacgcctactttctggcgggtcgtgcggttcctgagccctccggccctgcagggctatgtggcctggctgcgggccatgtttctccagccagacctggactccttggttgacttcagcaccaacaaccagaagaaagcccaggattcatcgctccacatgcctgagcgagctgtgttccggctgaggaaatggatcatctttcgattggtgagcattgtggacagcctgcacctggagatggaggaggccttgactgagcaggtggccaggttttgtttgttccactcgttctttgtcacaaagaagcccacatcccagatccctgagacaaagcacccgttctccttccctttggaaaaccaggcccgagaggctgtcagcagtgccttcttcagtctgttgcagaccctcagcacgcagttcaagcaggcaccgggccagacccagggtgggcagccctggacctaccacctggtgcagttcgcagacctcctgttgaatcacagccacaacgtgaccaccgtgacacccttcactgcgcagcagcgccaggcctgggaccggatgctgcagactctgaaggagctggaggcccactccgcagaggccagggctgctgccttccagcaccttctgctcctcgtgggcatccacctcctcaagtcccctgcagagagctgtgacctgctgggtgacatccagacctgcatcaggaaaagtctgggagagaagccccgccggagccgcaccaagaccatcgacccccaggaacccccgtgggtagaggtgctggtggagatcttgctggccctgttggcccagcccagccacctcatgcgccaggtggcccggagcgtgtttggccacatctgctcccacctgaccccgcgtgccctgcagctaattctggatgtgctgaaccccgagaccagtgaggatgagaatgaccgtgtggtggtgacggacgattctgatgagcggcggctgaagggtgcagaggacaagagcgaggaaggtgaggacaacagaagctcagagagtgaagaggagagcgagggggaggagagcgaggaggaggagcgcgacggggacgtggatcagggcttccgggaacagctgatgaccgtgctgcaggctgggaaggcgctgggtggagaggacagtgagaacgaggaggagctgggggatgaggccatgatggccctggaccagagcctcgccagcctctttgccgagcagaagctgcgtatccaggcccggcgagacgagaagaacaagctgcagaaggagaaggctctgcggcgcgacttccagatccgggtgctggacctggtggaggtgctagtgaccaagcagcccgagaatgccctggtcctggagctgctggagccgctgctgagcatcatccggcgcagcctgcgcagcagcagctccaaacaggagcaggaccttctgcacaagacggcgcgcatcttcacgcaccacctgtgccgtgcccggcgctactgccacgacttgggtgagcgcgcaggggccctgcacgcccaggtggagcggttggtgcagcaggctggccgccagcccgactcccccaccgccctctaccacttcaacgcctctctctacctgctccgggtcttgaagggcaacactgctgagggctgcgtgcatgagacacaggagaagcagaaagctggcactgaccccagccacatgcccacgggcccgcaggctgccagctgcttggacttgaacctggtgacccgggtgtactcgacagcactgagctccttcctgaccaagcgcaacagccccctcacagttcccatgttcctcagcctcttctcccggcacccggtgctctgtcagagcctgctccccatcctggtccagcatatcacgggcccggtgcggccccgtcatcaggcctgcctgctgctccagaagaccctgtccatgcgggaggtgaggtcgtgctttgaggaccccgagtggaagcagctgatgggccaggtcctagcaaaggtcaccgagaacttgcgcgtgctgggggaggcgcagaccaaggcgcagcatcagcaggcactgtcctccctggagctgctcaacgttctcttcaggacctgcaaacatgagaagctgaccttggacctgacggtgctcctgggtgtgctgcaggggcaacagcagagcctacagcagggggcacactccaccggctccagccgcctgcacgacctctactggcaggccatgaaaaccctgggagtccagcgccccaagttggagaagaaggatgccaaggagatccccagtgccacccagagccccatcagtaagaagcggaagaaaaagggattcttgccagagacgaagaagcgcaagaaacgcaagtcagaggatggcacgccagcggaggatggcacacctgcagccaccggcgggagccagccccccagcatgggcaggaagaagaggaacaggacaaaggctaaggtcccagcccaggcaaacgggacgccaaccaccaagagtccagcccctggcgcccccacccggagccccagcacccctgccaaatccccaaaactgcagaagaaaaaccagaagccgtcccaggtgaatggagctcccgggtcccccacggaacctgcaggccaaaagcagcatcagaaggctcttcccaaaaagggggtcttgggcaaatcaccactgtccgcgctggcacggaaaaaggcaaggctgtctttggtcatcaggagtcccagcctgcttcagagtggggccaagaagaaagcacaggtgaggaaggcagggaagccctgagcacaggtacgggcccccctcagcccctgcctccatctgcctgagacgcctattttttttttttttttttaaaccatgattttaatacgcaagctgtttctaaggcgctgccactggggagggtggctgttgccgcctgcccgggcatcctgctctggcaagcacagcctgagccattcctgcaggggtcccagggtgcagagacctccccacccccggttctgggctgggaccctggctccagggccatgtccagggctctggtgtttgcctgggttggtgcaggttgatgtgctggctgcaggcaggtgtgaccatctctcgtgcctgccacctctttgcccccaggcttttttgctgtgagggagccaccagggggtgatttaaataggtttatttcttcatttacaagaggaatatatttggcttctctcttaagactctgagattcacaatcagcagctctaaaaaataaaggagcagtttggcttccggaaggaagaggaggcaaca

SEQ ID NO: 156199 - DNA, 4104 bp, Homo sapiens
  Payload ID: 10648
  Gene Symbol: MYBBP1A
  Gene Name: MYB binding protein (P160) 1a
  Uniprot ID: Q9BQG0
  ENST ID: ENST00000381556
  CDS Start-End: 63-4061
ctgacctggaagcggctggggccggagcacacgtgtttcgtgtttcggtgagtgtggcggagatggagagccgggatcccgcccagccgatgtcgcctggagaagcgacgcagagtggcgcccggcctgccgaccgctatggcctattgaagcacagtcgcgagttcttggacttcttctgggacattgcgaagcctgagcaggagacgcgacttgcggccacggagaagctgctggagtatctgcgtggcaggccgaaggggtccgagatgaaatatgccctgaagcgtctaatcacgggactcggggtcgggcgagaaacagcccggccctgctacagtttggccctggcacagctgttacagtcttttgaagacctccccttgtgcagcatcctgcagcagatacaagaaaaatatgacctgcatcaggtgaagaaggcaatgctgagacctgctctctttgcaaacctgtttggagtgctcgccctctttcagtcaggtcggctggtgaaggaccaggaggcactgatgaagtcggtgaagctgctgcaggccctggcccagtaccaaaaccacttgcaggagcagccccggaaggccctggtggacatcctctccgaggtctcgaaggccacattgcaggagatcctgccggaggtcctcaaagccgacttgaatataatactcagctcccctgaacagctagagctcttcctcctggcccagcagaaggtgccctccaagctcaagaagctggtgggatccgtgaacctattctcagatgagaatgtccccaggctggtgaatgtgctgaagatggccgcctcctctgtgaagaaggaccgcaagctgcccgccattgctctggacctgctccgcctggcactcaaggaagacaagttcccacggttctggaaggaggtggtggaacaagggctgctgaagatgcagttctggccagccagctacctgtgtttccgcctgctgggcgcggccctgcccctgctgaccaaggagcagctgcacctggtgatgcagggagacgtgatccgccattacggggagcacgtgtgcactgctaagctcccaaagcagttcaagtttgccccagagatggacgattacgtgggcaccttcctagaggggtgccaggatgaccctgagcggcagctggccgtgctagtggccttctcatctgtcaccaaccaaggcctccctgtcacgcctactttctggcgggtcgtgcggttcctgagccctccggccctgcagggctatgtggcctggctgcgggccatgtttctccagccagacctggactccttggttgacttcagcaccaacaaccagaagaaagcccaggattcatcgctccacatgcctgagcgagctgtgttccggctgaggaaatggatcatctttcgattggtgagcattgtggacagcctgcacctggagatggaggaggccttgactgagcaggtggccaggttttgtttgttccactcgttctttgtcacaaagaagcccacatcccagatccctgagacaaagcacccgttctccttccctttggaaaaccaggcccgagaggctgtcagcagtgccttcttcagtctgttgcagaccctcagcacgcagttcaagcaggcaccgggccagacccagggtgggcagccctggacctaccacctggtgcagttcgcagacctcctgttgaatcacagccacaacgtgaccaccgtgacacccttcactgcgcagcagcgccaggcctgggaccggatgctgcagactctgaaggagctggaggcccactccgcagaggccagggctgctgccttccagcaccttctgctcctcgtgggcatccacctcctcaagtcccctgcagagagctgtgacctgctgggtgacatccagacctgcatcaggaaaagtctgggagagaagccccgccggagccgcaccaagaccatcgacccccaggaacccccgtgggtagaggtgctggtggagatcttgctggccctgttggcccagcccagccacctcatgcgccaggtggcccggagcgtgtttggccacatctgctcccacctgaccccgcgtgccctgcagctaattctggatgtgctgaaccccgagaccagtgaggatgagaatgaccgtgtggtggtgacggacgattctgatgagcggcggctgaagggtgcagaggacaagagcgaggaaggtgaggacaacagaagctcagagagtgaagaggagagcgagggggaggagagcgaggaggaggagcgcgacggggacgtggatcagggcttccgggaacagctgatgaccgtgctgcaggctgggaaggcgctgggtggagaggacagtgagaacgaggaggagctgggggatgaggccatgatggccctggaccagagcctcgccagcctctttgccgagcagaagctgcgtatccaggcccggcgagacgagaagaacaagctgcagaaggagaaggctctgcggcgcgacttccagatccgggtgctggacctggtggaggtgctagtgaccaagcagcccgagaatgccctggtcctggagctgctggagccgctgctgagcatcatccggcgcagcctgcgcagcagcagctccaaacaggagcaggaccttctgcacaagacggcgcgcatcttcacgcaccacctgtgccgtgcccggcgctactgccacgacttgggtgagcgcgcaggggccctgcacgcccaggtggagcggttggtgcagcaggctggccgccagcccgactcccccaccgccctctaccacttcaacgcctctctctacctgctccgggtcttgaagggcaacactgctgagggctgcgtgcatgagacacaggagaagcagaaagctggcactgaccccagccacatgcccacgggcccgcaggctgccagctgcttggacttgaacctggtgacccgggtgtactcgacagcactgagctccttcctgaccaagcgcaacagccccctcacagttcccatgttcctcagcctcttctcccggcacccggtgctctgtcagagcctgctccccatcctggtccagcatatcacgggcccggtgcggccccgtcatcaggcctgcctgctgctccagaagaccctgtccatgcgggaggtgaggtcgtgctttgaggaccccgagtggaagcagctgatgggccaggtcctagcaaaggtcaccgagaacttgcgcgtgctgggggaggcgcagaccaaggcgcagcatcagcaggcactgtcctccctggagctgctcaacgttctcttcaggacctgcaaacatgagaagctgaccttggacctgacggtgctcctgggtgtgctgcaggggcaacagcagagcctacagcagggggcacactccaccggctccagccgcctgcacgacctctactggcaggccatgaaaaccctgggagtccagcgccccaagttggagaagaaggatgccaaggagatccccagtgccacccagagccccatcagtaagaagcggaagaaaaagggattcttgccagagacgaagaagcgcaagaaacgcaagtcagaggatggcacgccagcggaggatggcacacctgcagccaccggcgggagccagccccccagcatgggcaggaagaagaggaacaggacaaaggctaaggtcccagcccaggcaaacgggacgccaaccaccaagagtccagcccctggcgcccccacccggagccccagcacccctgccaaatccccaaaactgcagaagaaaaaccagaagccgtcccaggtgaatggagctcccgggtcccccacggaacctgcaggccaaaagcagcatcagaaggctcttcccaaaaagggggtcttgggcaaatcaccactgtccgcgctggcacggaaaaaggcaaggctgtctttggtcatcaggagtcccagcctgcttcagagtggggccaagaagaaagcacagactctgagattcacaatcagcagctctaaaaaataaaggagcagtttggcttccggaaggaagaggaggcaacactcgg

SEQ ID NO: 156200 - DNA, 3795 bp, Homo sapiens
  Payload ID: 10648
  Gene Symbol: MYBBP1A
  Gene Name: MYB binding protein (P160) 1a
  ENST ID: ENST00000573116
  CDS Start-End: 1-3757
cggggtcgggcgagaaacagcccggccctgctacagtttggccctggcacagctgttacagtcttttgaagacctccccttgtgcagcatcctgcagcagatacaagaaaaatatgacctgcatcaggtgaagaaggcaatgctgagacctgctctctttgcaaacctgtttggagtgctcgccctctttcagtcaggtcggctggtgaaggaccaggaggcactgatgaagtcggtgaagctgctgcaggccctggcccagtaccaaaaccacttgcaggagcagccccggaaggccctggtggacatcctctccgaggtctcgaaggccacattgcaggagatcctgccggaggtcctcaaagccgacttgaatataatactcagctcccctgaacagctagagctcttcctcctggcccagcagaaggtgccctccaagctcaagaagctggtgggatccgtgaacctattctcagatgagaatgtccccaggctggtgaatgtgctgaagatggccgcctcctctgtgaagaaggaccgcaagctgcccgccattgctctggacctgctccgcctggcactcaaggaagacaagttcccacggttctggaaggaggtggtggaacaagggctgctgaagatgcagttctggccagccagctacctgtgtttccgcctgctgggcgcggccctgcccctgctgaccaaggagcagctgcacctggtgatgcagggagacgtgatccgccattacggggagcacgtgtgcactgctaagctcccaaagcagttcaagtttgccccagagatggacgattacgtgggcaccttcctagaggggtgccaggatgaccctgagcggcagctggccgtgctagtggccttctcatctgtcaccaaccaaggcctccctgtcacgcctactttctggcgggtcgtgcggttcctgagccctccggccctgcagggctatgtggcctggctgcgggccatgtttctccagccagacctggactccttggttgacttcagcaccaacaaccagaagaaagcccaggattcatcgctccacatgcctgagcgagctgtgttccggctgaggaaatggatcatctttcgattggtgagcattgtggacagcctgcacctggagatggaggaggccttgactgagcaggtggccaggttttgtttgttccactcgttctttgtcacaaagaagcccacatcccagatccctgagacaaagcacccgttctccttccctttggaaaaccaggcccgagaggctgtcagcagtgccttcttcagtctgttgcagaccctcagcacgcagttcaagcaggcaccgggccagacccagggtgggcagccctggacctaccacctggtgcagttcgcagacctcctgttgaatcacagccacaacgtgaccaccgtgacacccttcactgcgcagcagcgccaggcctgggaccggatgctgcagactctgaaggagctggaggcccactccgcagaggccagggctgctgccttccagcaccttctgctcctcgtgggcatccacctcctcaagtcccctgcagagagctgtgacctgctgggtgacatccagacctgcatcaggaaaagtctgggagagaagccccgccggagccgcaccaagaccatcgacccccaggaacccccgtgggtagaggtgctggtggagatcttgctggccctgttggcccagcccagccacctcatgcgccaggtggcccggagcgtgtttggccacatctgctcccacctgaccccgcgtgccctgcagctaattctggatgtgctgaaccccgagaccagtgaggatgagaatgaccgtgtggtggtgacggacgattctgatgagcggcggctgaagggtgcagaggacaagagcgaggaaggtgaggacaacagaagctcagagagtgaagaggagagcgagggggaggagagcgaggaggaggagcgcgacggggacgtggatcagggcttccgggaacagctgatgaccgtgctgcaggctgggaaggcgctgggtggagaggacagtgagaacgaggaggagctgggggatgaggccatgatggccctggaccagagcctcgccagcctctttgccgagcagaagctgcgtatccaggcccggcgagacgagaagaacaagctgcagaaggagaaggctctgcggcgcgacttccagatccgggtgctggacctggtggaggtgctagtgaccaagcagcccgagaatgccctggtcctggagctgctggagccgctgctgagcatcatccggcgcagcctgcgcagcagcagctccaaacaggagcaggaccttctgcacaagacggcgcgcatcttcacgcaccacctgtgccgtgcccggcgctactgccacgacttgggtgagcgcgcaggggccctgcacgcccaggtggagcggttggtgcagcaggctggccgccagcccgactcccccaccgccctctaccacttcaacgcctctctctacctgctccgggtcttgaagggcaacactgctgagggctgcgtgcatgagacacaggagaagcagaaagctggcactgaccccagccacatgcccacgggcccgcaggctgccagctgcttggacttgaacctggtgacccgggtgtactcgacagcactgagctccttcctgaccaagcgcaacagccccctcacagttcccatgttcctcagcctcttctcccggcacccggtgctctgtcagagcctgctccccatcctggtccagcatatcacgggcccggtgcggccccgtcatcaggcctgcctgctgctccagaagaccctgtccatgcgggaggtgaggtcgtgctttgaggaccccgagtggaagcagctgatgggccaggtcctagcaaaggtcaccgagaacttgcgcgtgctgggggaggcgcagaccaaggcgcagcatcagcaggcactgtcctccctggagctgctcaacgttctcttcaggacctgcaaacatgagaagctgaccttggacctgacggtgctcctgggtgtgctgcaggggcaacagcagagcctacagcagggggcacactccaccggctccagccgcctgcacgacctctactggcaggccatgaaaaccctgggagtccagcgccccaagttggagaagaaggatgccaaggagatccccagtgccacccagagccccatcagtaagaagcggaagaaaaagggattcttgccagagacgaagaagcgcaagaaacgcaagtcagaggatggcacgccagcggaggatggcacacctgcagccaccggcgggagccagccccccagcatgggcaggaagaagaggaacaggacaaaggctaaggtcccagcccaggcaaacgggacgccaaccaccaagagtccagcccctggcgcccccacccggagccccagcacccctgccaaatccccaaaactgcagaagaaaaaccagaagccgtcccaggtgaatggagctcccgggtcccccacggaacctgcaggccaaaagcagcatcagaaggctcttcccaaaaagggggtcttgggcaaatcaccactgtccgcgctggcacggaaaaaggcaaggctgtctttggtcatcaggagtcccagcctgcttcagagtggggccaagaagaaagcacagactctgagattcacaatcagcagctctaaaaaataaaggagcagtttggcttccggaaggaagaggaggcaaca

SEQ ID NO: 156201 - DNA, 613 bp, Homo sapiens
  Payload ID: 10648
  Gene Symbol: MYBBP1A
  Gene Name: MYB binding protein (P160) 1a
  ENST ID: ENST00000573723
  CDS Start-End: 1-613
acatgcctgagcgagctgtgttccggctgaggaaatggatcatctttcgattggtgagcattgtggacagcctgcacctggagatggaggaggccttgactgagcaggtggccaggttttgtttgttccactcgttctttgtcacaaagaagcccacatcccagatccctgagacaaagcacccgttctccttccctttggaaaaccaggcccgagaggctgtcagcagtgccttcttcagtctgttgcagaccctcagcacgcagttcaagcaggcaccgggccagacccagggtgggcagccctggacctaccacctggtgcagttcgcagacctcctgttgaatcacagccacaacgtgaccaccgtgacacccttcactgcgcagcagcgccaggtgaatggagctcccgggtcccccacggaacctgcaggccaaaagcagcatcagaaggctcttcccaaaaagggggtcttgggcaaatcaccactgtccgcgctggcacggaaaaaggcaaggctgtctttggtcatcaggagtcccagcctgcttcagagtggggccaagaagaaagcacagactctgagattcacaatcagcagctctaaaaa

SEQ ID NO: 156202 - DNA, 588 bp, Homo sapiens
  Payload ID: 10648
  Gene Symbol: MYBBP1A
  Gene Name: MYB binding protein (P160) 1a
  ENST ID: ENST00000572759
  CDS Start-End: 1-209
agagcgagggggaggagagcgaggaggaggagcgcgacggggacgtggatcagggcttccgggaacagctgatgaccgtgctgcaggctgggaagccgcctgcacgacctctactggcaggccatgaaaaccctgggagtccagcgccccaagttggagaagaaggatgccaaggagatccccagtgccacccagagccccatcagtaagaagcggaagaaaaagggattcttgccagagacgaagaagcgcaagaaacgcaagtcagaggatggcacgccagcggaggatggcacacctgcagccaccggcgggagccagccccccagcatgggcaggaagaagaggaacaggacaaaggctaaggtcccagcccaggcaaacgggacgccaaccaccaagagtccagcccctggcgcccccacccggagccccagcacccctgccaaatccccaaaactgcagaagaaaaaccagaagccgtcccaggtgaatggagctcccgggtcccccacggaacctgcaggccaaaagcagcatcagaaggctcttcccaaaaagggggtcttgggcaaatcaccactgtcc

SEQ ID NO: 156203 - DNA, 2922 bp, Homo sapiens
  Payload ID: 10649
  Gene Symbol: MSANTD1
  Gene Name: Myb/SANT-like DNA-binding domain containing 1
  Uniprot ID: Q6ZTZ1
  ENST ID: ENST00000438480
  CDS Start-End: 1748-2584
agggcttcctagaggaggtaggccttctagtcactccttcatctgcaggcactccacagagctctctgtgccagcccccagcacggagggctgaccttagtcgagtggagatgccccagtgccaggcagtagggatgatgtctcctgaggcccagatggaagggactggactagtctcatggggctgatggtggggccaggccttgaccagggacccagtgtagggggtgcagagacccctctgagttcctcacacatccctggggccctccccatacacttcctatcctgactgcgggcaagagggagccccagttcgccttccctatgctgggcacccacagtggggctgggcacccccgccatgcccctgccctgtccttcccctgagagcctcggtcccacctccaaggtgcctcagaggacagcaggggcagcgggcagaggccgagatgcctcctcattccaggctcagctgcccttcttggggcagcccacacctgagagtctcctgcagttggtcaggcctgaggagggcaggggggtgcctgctgtccctctgctgaccacagtggcatttagcctgggcaccgcgcccagcacagtccatgctgcacaggtgccgtgggctccacagagccctgcctgacatgcatgtgttacgtttcgggtgccgatgcccttgggcggcacttctccgggcagaacccccaggccaccgctccggttccggttccgctgcatctggggctctcggcaggctgtggtcctccggccagcctgggggcatctcagtccctcagccccacaggggcctgccccgcagcctgggcctcgagccccgtctccgcacgctgtgccgaatctggctgcccatcagctccctgcgtacccagactgtgccctgccatgcccgtggctcttcccaggagtgccctgtggcctccccctggcttgctgggctgattccctcctgtgtctcaaacagagctcacctttgccatcactgctgtcctcaccggccggtgccagaggcccgtgtctgtgtaccctgtgtctgcacctctgggcagggcctggctctgaccaacccgggcttccagtgtccacagacctaaggcccagggcgcctgggggctggagcaagagaagcaaaaggagccaagggtgggggtttggggttcttgtgagggcccagccccaggaccccaggaccaggacacccaggagccccagggcccagccccagttcagaaggcaggggccttctgagggagcttaagggtcccacagcccaggacccccaccagggccagtggccagcgttgggggactcagcctcctcgtcgctcgtcctctctgtttctcccaccttttgccccctttctccttgcctgttcccacccgaggccccctcttggcctgcgtgagccggggcggcactgaactgggggccgatccgcctgggcggcggtgagaggcagggccgggagccgggccgctgggtttgggcctggcccgctcgccgcaatattgatggcccgtcagtgcagccctgattcctgtgctttcagttaaaaggtttctgttgttgtagcttatgcagttgctctgttgctatggaaacgtgacatcaaaatgacgtttcccgtttaaaagcttttaactaaattcctgcctgtcagatgtaggccccattttgagcgtggagctgccttcgagcgagcgtgagcggcgcctcccgcccatggtgcgtggggccgggccggggccctcgctgagcgcgctctctcaccccacaggcgcctccggcatggcggcggccgaggggcccggctacctcgtgtctccccaggcggagaagcaccggcgggcccgcaactggacggacgccgagatgcgcggcctcatgctggtctgggaggagttcttcgacgagctcaagcagaccaagcgcaacgccaaggtgtacgagaagatggccagcaagctcttcgagatgaccggcgagcgcaggctgggcgaggagatcaagatcaagatcaccaacatgaccttccagtacaggaaattaaaatgcatgacagatagcgagtccgccccgcccgactggccctattacctagccattgatgggattctggccaaggtccccgagtcctgtgatggcaaactgccggacagccagccgccggggccctccacgtcccagaccgaggcgtccctgtcgccgcccgctaagtccacccctctgtacttcccgtataaccagtgctcctacgaaggccgcttcgaggatgatcgctccgacagctcctccagcttactgtcccttaagttcaggtcggaggagcggccggtgaagaagcgcaaggtgcagagctgccacctgcagaagaagcagctgcggctgctggaggccatggtggaggagcagcgccggctgagccgcgccgtggaggagacctgccgcgaggtgcgccgcgtgctggaccagcagcacatcctgcaggtgcagagcctgcagctgcaggagcgcatgatgagtctgctggagaggatcatcaccaagtccagcgtctaggccagcaggcggcggcggcggcggggccgggcggctggtggtactgctcaggccacccagggcaggccactcaggccaggcgggcaagggggccgccccgcgagcggagaccgccttccacctggcctctggcaggatgtcccttctgaggggtattttgaggaacccccaggccctggggaccgtgaggctccagtctccagcatgaatgcccttcctcggacacaggccagggcctctggggttcactccgagtaagaacgtcctagagccactctccagtgtcgttactatcaatgatacttgacgtggctttgatattaaacgtatactttttc

SEQ ID NO: 156204 - DNA, 2039 bp, Homo sapiens
  Payload ID: 10649
  Gene Symbol: MSANTD1
  Gene Name: Myb/SANT-like DNA-binding domain containing 1
  ENST ID: ENST00000510580
  CDS Start-End: 65-922
agatgtaggccccattttgagcgtggagctgccttcgagcgagcgtgagcggcgcctcccgcccatggtgcgtggggccgggccggggccctcgctgagcgcgctctctcaccccacaggcgcctccggcatggcggcggccgaggggcccggctacctcgtgtctccccaggcggagaagcaccggcgggcccgcaactggacggacgccgagatgcgcggcctcatgctggtctgggaggagttcttcgacgagctcaagcagaccaagcgcaacgccaaggtgtacgagaagatggccagcaagctcttcgagatgaccggcgagcgcaggctgggcgaggagatcaagatcaagatcaccaacatgaccttccagtacaggaaattaaaatgcatgacagatagcgagtccgccccgcccgactggccctattacctagccattgatgggattctggccaaggtccccgagtcctgtgatggcaaactgccggacagccagccgccggggccctccacgtcccagaccgaggcgtccctgtcgccgcccgctaagtccacccctctgtacttcccgtataaccagtgctcctacgaaggccgcttcgaggatgatcgctccgacagctcctccagcttactgtcccttaagttcaggtcggaggagcggccggtgaagaagcgcaaggtgcagagctgccacctgcagaagaagcagctgcggctgctggaggccatggtggaggagcagcgccggctgagccgcgccgtggaggagacctgccgcgaggtgcgccgcgtgctggaccagcagcacatcctgcagatccagacggcagctcagcccattgcacacctgcatttcctcagcgtggacgtggggcaggcgcgccttccagttgctcgggcaggacgttgaaaagatgtggacccaggggtcaagacctcacacactcgaccattttcactccatcacggacatttggaagtgaccggcgtttcacactgcagctgtgcggtgcgaaaacccctcagggctgcgccggggctcggggcctgcctgcgttcctgctcaggtcttgccacatcagtgcgcatgtcagctccgtgaagaccccgtgaagaccccgtgatcatcagactatgatgaaagcagctgcaacctcagggacccttggtgacccacaggccgagacctgagaaccactgcctgaatgctggagcgggcacacaggtgacctgagcgagcctcgtctgtccttgcccggtacccagagctggctcactggcgattggtggacgcacgggcgctgtcacacaaaggggccctccgtgtgactgggtggcgtcatcacagacagcgtgtgggaaccgtgcccccaagcgggcccagagggactccctgctgtcttgtaggcactggggatagggtcaggtggaaagcagatacaaatctttgtctttacagggtttcgagttgagggtggggctagaccaacaataaacacgtaagtgtctagtatgttagaagagaggtgctttccagggaaataaggctgtagggggattggagccgtggggtgagagaaaaggccttcaaaaaatgtcatgtgagcggatggagtgggaggggcgccctcacctgagcactgggagctgcactgtctaggtgggagctggctctgagggcgaggtgggcctggacagggacaccctgctttctgctgggacaagagagtcccggagcagggagggtcaggtgtggcgtggagcctgggaggtgggtgaggggtgctcaggaggcatcctggcctaggggaggatagaatggttggactggcacaggccttggctgttgcccgggcatggggaaaaaccagaacctctgtgtgctggctttgcgctcgtggccatctccaggactcagaacatgcgagaggcacgcaaggtggagcgtgtgggagaaggtgctgcctgtggtttcagcccaagttcatctcagctgggtccggagggagagggcaccctacccctag

SEQ ID NO: 156205 - DNA, 2289 bp, Homo sapiens
  Payload ID: 10649
  Gene Symbol: MSANTD1
  Gene Name: Myb/SANT-like DNA-binding domain containing 1
  ENST ID: ENST00000507492
  CDS Start-End: 844-1641
cagagactagagctgtgttctcacagggcccaccacccttccacctccttggccattgacacctgcgtccctggcccagctgctcccaggtaacccccaaagcagctggcacatcccacctctggtgtggccggggctgctgtgtgtccgcagggcctgccccgtctattctagcttgtttgtcctgtctgaaccagcgcctactccaagaagcctctgctcagcccagcggggatgcttctaagctccggacgagcctctcggaagccttggtgattggtggtgtagtcatcttgggatgcagatgtcttaccaacctgcaagaacaaaaaccctgtggcttcctctggtgcagggtgacaccgctccagggccccccagtggcctctcctttcagagctacctaaattctggtcacttcagagaaatggagcacccccttctccctggtccaggtgtggacagcctggcacactgagcacacctggcatggctggtaatttcagaaagaagaggggccggggtccagtgggaagcagcggtgaacccctcgtgagtgggctttgcagtccctccccatgccacggcagagctgccctcaacacagccttcctcttcctcatcggagagcacaccctgtccccttgccgagctgtgccctgtgccttcggtggtatttgattttggctgctactggctttgttgggatctggaagtcgcttcccctgcgtggtgcgtggagcactgtaagtcagatgagggaagtagccagggtgaggtgctgctggttgaccagcctctggccctaggagaccccgtagcgactgagggtcccagcaggccatgcagctttgccaaggcgcctccggcatggcggcggccgaggggcccggctacctcgtgtctccccaggcggagaagcaccggcgggcccgcaactggacggacgccgagatgcgcggcctcatgctggtctgggaggagttcttcgacgagctcaagcagaccaagcgcaacgccaaggtgtacgagaagatggccagcaagctcttcgagatgaccggcgagcgcaggctgggcgaggagatcaagatcaagatcaccaacatgaccttccagtacaggaaattaaaatgcatgacagatagcgagtccgccccgcccgactggccctattacctagccattgatgggattctggccaaggtccccgagtcctgtgatggcaaactgccggacagccagccgccggggccctccacgtcccagaccgaggcgtccctgtcgccgcccgctaagtccacccctctgtacttcccgtataaccagtgctcctacgaaggccgcttcgaggatgatcgctccgacagctcctccagcttactgtcccttaagttcaggtcggaggagcggccggtgaagaagcgcaaggtgcagagctgccacctgcagaagaagcagctgcggctgctggaggccatggtggaggagcagcgccggctgagccgcgccgtggaggagacctgccgcgaggtgcgccgcgtgctggaccagcagcacatcctgcaggtgcagagcctgcagctgcaggagcgcatgatgagtctgctggagaggatcatcaccaagtccagcgtctaggccagcaggcggcggcggcggcggggccgggcggctggtggtactgctcaggccacccagggcaggccactcaggccaggcgggcaagggggccgccccgcgagcggagaccgccttccacctggcctctggcaggatgtcccttctgaggggtattttgaggaacccccaggccctggggaccgtgaggctccagtctccagcatgaatgcccttcctcggacacaggccagggcctctggggttcactccgagtaagaacgtcctagagccactctccagtgtcgttactatcaatgatacttgacgtggctttgatattaaacgtatactttttcattcttgcctggaacgcacagtttgctgttgctggcttggtgaggatgccctgattgatggatcccgaaaatgaaagcagatggaaacgggttggggcaggctggagctgggggagctctctcctgaagggaaccctgtgtcctccctcaccaggacctctgcgtctctccttaaatggcctctgacgcctgatgaaaaccccagcgaccttccaggaggcttttattcagctctgtttggagcatcaggtgtttccactgcctccttagcaatgacactaataaaagtcgtaacacctgttcacatgca

SEQ ID NO: 156206 - DNA, 3164 bp, Homo sapiens
  Payload ID: 10649
  Gene Symbol: MSANTD1
  Gene Name: Myb/SANT-like DNA-binding domain containing 1
  ENST ID: ENST00000505599
  CDS Start-End: 184-987
gtgctttcagttaaaaggtttctgttgttgtagcttatgcagttgctctgttgctatggaaacgtgacatcaaaatgacgtttcccgtttaaaagcttttaactaaattcctgcctgtcagatgtaggccccattttgagcgtggagctgccttcgagcgagcgtgagcggcgcctcccgcccatggtgcgtggggccgggccggggccctcgctgagcgcgctctctcaccccacaggcgcctccggcatggcggcggccgaggggcccggctacctcgtgtctccccaggcggagaagcaccggcgggcccgcaactggacggacgccgagatgcgcggcctcatgctggtctgggaggagttcttcgacgagctcaagcagaccaagcgcaacgccaaggtgtacgagaagatggccagcaagctcttcgagatgaccggcgagcgcaggctgggcgaggagatcaagatcaagatcaccaacatgaccttccagtacaggaaattaaaatgcatgacagatagcgagtccgccccgcccgactggccctattacctagccattgatgggattctggccaaggtccccgagtcctgtgatggcaaactgccggacagccagccgccggggccctccacgtcccagaccgaggcgtccctgtcgccgcccgctaagtccacccctctgtacttcccgtataaccagtgctcctacgaaggccgcttcgaggatgatcgctccgacagctcctccagcttactgtcccttaagttcaggtcggaggagcggccggtgaagaagcgcaaggtgcagagctgccacctgcagaagaagcagctgcggctgctggaggccatggtggaggagcagcgccggctgagccgcgccgtggaggagacctgccgcgagatatcccgttgttacagcaccgtttgtagaagagggtgtcctgtcgctatggagtggctttggactctttcttgaagatggatggcctgtggatgtgtcgggcccgctctggagtctgcatcctgtccattgataatgatgtcagtcctcacgtcagtacacactttcctgattactcaggtgctgtgcctgagtgtccaaggccaatttctgacgctacattctggagtgttctactgacaccatctgccaggacccacacttccaagaatccccacctgtgtgcttctagagcagacagatggggtcagagctcagggcgggtggggtctggagtccggcctcccccaacagcccacctgctccccgcccggccgcctggcgcagaggccctagtttggagagcccattcacgctcggaatttggattcaaccacggggctgaccccccacctccctcattttccaaaacgcctttgtcttttcctgttcaaagaactttcaagagactttccaagttttgttcgggaacagtgtggctccccagggtgccagctggcatcttgtgcaattatcattaaattacagggacaattttaatttcatgataattagaaatatcaactgccgctcagccttcgaaactaatggaattttaatgggcagctgcttaggttacagctaagaatagcagcgctccaccgagcggctgcagcagggccctgagtgggcgccagcctccatgtgggagccgtgcccagggagccggggcacctggtgtgggctgcgggaggcaggccctgggtgaaccttcagcagctgcctgtaagggagaaaatgggaccgtcctggtcaggtggaggagacctgtgtcctggactttggaccccgaggccagcccattacccctgcaatgcagccccaggtccacctgccccacagccacagcctcagggcttggagctgagcctgcgacctcagactgtgccctctggggagcccacccactctgggcctcggcagcctgggctgaccaagaccttccactctgagcaaatctgcaagccgggggagccccaggccctcagacggaaggcgccctcactccttcctcttgtccttagaattacagtccaaggcccggaaacagtcattccccatgttctgtccagttttccagtcatttgaagcagggatggaggagaggtgaatccagagcttgtcactccatcctggtggaaagtggaattaatggtgtctttcaattgggcagattttgcttttgataatatcaaattttagctaattttttttatggctaaaacattttgtgtcctaagaaatcttcaccaaggccagggagatattttcccatattgtattctagaagctgtggttacatctgggtctctgtccatctcaattgctttgtaggaaatgaaatggatatcagagccattttttccacgtgattcccctgttattccagaactgtttgttagaaagcctgccctttccctatcgcgagtgtctggtgcctttgtcaaaaagcaattcacagaacaggagggggtctattattattattattttttttttttttgagatggagtttcattcttgtcacccaggctggagtgcagtggcacgatctcagctcgctgcaacctccgtctcccagattcaagcaattctcctgcctcagcctcccaagtacctgtgattacaggcatccaccatcatgcctggctaatttttttttttttgcatttttagtagaggcggggtttggctgcgttggccaggctggtcttgaactcctgacctcaggtgaacctcccgcctcgcctcccaaagtgctgggattacaggcgtgaggcaccacgcccggccgagcgggtctattttgagacaccattcggtcctgttggtctgtgcgtctgcattatcttggttactgtgcctttatagaaaatcttcaggtcacctagtgtaagtcttccaaacttcttcttttccaaaactgtttttgctaatccatatattttgccattctgtataaattttaaatcaccttattgatttctatccccaaaaaagcctgctgaaatttgtattgagatggaattgaattcatagtcccacttgataagaactgacatgttgaaaatattgtcttacaatttatgaacatggtgtatctcaccatttggagctgtctaatacatcctttattaaatttatttatcagt

SEQ ID NO: 156207 - DNA, 2495 bp, Homo sapiens
  Payload ID: 10650
  Gene Symbol: MSANTD2
  Gene Name: Myb/SANT-like DNA-binding domain containing 2
  Uniprot ID: Q6P1R3
  ENST ID: ENST00000239614
  CDS Start-End: 294-1817
aatctgttcctcactccagcgccctcatgcccccacccttctcttcagctcggggcttcggcgcgcctcgtccccgcccttcgccccgggagaggagcgggcggcgtgggagggctcgcggagaaaggcccaggggagtggacgacctccgcccggcagccacatcctcagcagcagagacccggagccatccgcccgcgggcgagccaggcccgagggcagccccggagaccgcggtggccggatgcgcgggcgcgtcacttccgggcggtgcagcggcggccgcttggaagatggctgcgccctgtggctcggagctgcccgccaactcgccgctaaaaattccgaagatggaggtgctttccccggcttctcctggtggcctgagcgacggaaatccatcgctgtccgacccttccacgcctcggggtgcctccccgctcgggccgggcagtgcggcgggctcgggggcagcggcgtccgggggtctcgggctggggctggggggccgcagcgccgcctcgtcctcggtctccttctcccctggtggcggcggtggcggggctgcggcagccgccgccgccgcctgccggggcatgtcgtggacgccagccgagacgaacgcgctcatcgcagtgtggggcaacgagcggctggtggaggcgcggtaccagcagctggagggagccggcacggtgttcggcagcaaggcccccgggccagccatgtacgagcgcgtgtcccgggccctggccgagctgggctacgagcggaccccgtcccagtgccgggagcgcatcaaggagctggagtcagatggcagcactatggaggactattcacaggaggactggggaaaccacagtcaggatctccatggctatccaacagatcaggaattggatgaaatacctgtcacaaagagaacattaaaaataaaacaagagtcttctgaagaagcacagaagagagacatcatgcagaatattgtacagattttggaatcggtacagttgaaatgggaactttttcagagctggacagacttttcaaggctccatctttctaataaactggccatttttggaattggttataacacccgttggaaagaggatatccgttaccattatgctgagatcagctcccaggtgccccttggcaagcgacttcgggagtacttcaactctgagaagcctgaaggacggatcattatgacccgagtgcagaaaatgaactggaaaaatgtttactacaaatttttagagatcactattagcgaagctaggtgcttggagctgcacatggaaattgactggatacccattgcccactccaaaccaactggtgggaatgttgttcaatatttattgcctgggggtattcctaaaagcccaggcctttatgccattggctatgaagaatgtattgagaggcccctctcaccacacatggagcaaagttccctggacccaggaaaagagggccgggttgacctggaaaccctttcagcacaagcctcattacaggtggaaatagaacccacccgaattatctattgctacctcgggattgctgaggtcaggactctacagcagtgcttatttttacatttccaagcgaataccaaaaccttcagcaaagattgggttggtattaacgggtttttgtctcagaactgtattgtggatcccggagtttcccccaaatccatctacatcaaatttgtagaagtagagagggattttctttccgcaggctctttagttgagtgcctggaaaaagccattggataccccttaaaatttaacaactgaatgtcatccttcataaggatttgggctcttagctccttcttctctactcacttcccattacccggaccacccctcatccagatgccgccgtcagactcttcatggaaaccctttcttcaattgggccagtacgacttctaaggaatcatagtagacttgggccagaaaaaacagacctcacctgaaaatgctcattttgagcaagcaagatatatagcgaacttgcatggtgggtcagctatttcttttttaaaaacagaaaaacaatttttaaatggattttagagccctaatataaacaaatgtaggtacattccatattggacaaaacttatactttgagtttcatatgaaattgaaaaattgtatttttttcacaatgtttcatttttacacatctctatgtctctatataagtaatatttacaaccctgaataaataagcaatagataatggcaagttaaatcttgattcacagttaaaaagactttttcaatatcacccttagctactattgtatataatttagattttcatttttttcaccagccaagtgttttgctatttccaatcagtattgcttgcaaagacctttgtttctgtgatgtaccaactttacagttgtgttgccatttaaacctttttttaaaaaaaaaaaattaaagtaattcctggcc

SEQ ID NO: 156208 - DNA, 2349 bp, Homo sapiens
  Payload ID: 10650
  Gene Symbol: MSANTD2
  Gene Name: Myb/SANT-like DNA-binding domain containing 2
  Uniprot ID: Q6P1R3
  ENST ID: ENST00000374979
  CDS Start-End: 10-1689
gcttggaagatggctgcgccctgtggctcggagctgcccgccaactcgccgctaaaaattccgaagatggaggtgctttccccggcttctcctggtggcctgagcgacggaaatccatcgctgtccgacccttccacgcctcggggtgcctccccgctcgggccgggcagtgcggcgggctcgggggcagcggcgtccgggggtctcgggctggggctggggggccgcagcgccgcctcgtcctcggtctccttctcccctggtggcggcggtggcggggctgcggcagccgccgccgccgcctgccggggcatgtcgtggacgccagccgagacgaacgcgctcatcgcagtgtggggcaacgagcggctggtggaggcgcggtaccagcagctggagggagccggcacggtgttcggcagcaaggcccccgggccagccatgtacgagcgcgtgtcccgggccctggccgagctgggctacgagcggaccccgtcccagtgccgggagcgcatcaagacccttcgcaggtgttacagtcgggtgaaagaacatggtgttgggaaaagaaagagcagttacacatttgaacagttggaacaggtgtttggtcagggaggatgggatgctcagccctgccagcctgtacttattaacagtagtggcttgtaccaggagctggagtcagatggcagcactatggaggactattcacaggaggactggggaaaccacagtcaggatctccatggctatccaacagatcaggaattggatgaaatacctgtcacaaagagaacattaaaaataaaacaagagtcttctgaagaagcacagaagagagacatcatgcagaatattgtacagattttggaatcggtacagttgaaatgggaactttttcagagctggacagacttttcaaggctccatctttctaataaactggccatttttggaattggttataacacccgttggaaagaggatatccgttaccattatgctgagatcagctcccaggtgccccttggcaagcgacttcgggagtacttcaactctgagaagcctgaaggacggatcattatgacccgagtgcagaaaatgaactggaaaaatgtttactacaaatttttagagatcactattagcgaagctaggtgcttggagctgcacatggaaattgactggatacccattgcccactccaaaccaactggtgggaatgttgttcaatatttattgcctgggggtattcctaaaagcccaggcctttatgccattggctatgaagaatgtattgagaggcccctctcaccacacatggagcaaagttccctggacccaggaaaagagggccgggttgacctggaaaccctttcagcacaagcctcattacaggtggaaatagaacccacccgaattatctattgctacctcgggattgctgaggtcaggactctacagcagtgcttatttttacatttccaagcgaataccaaaaccttcagcaaagattgggttggtattaacgggtttttgtctcagaactgtattgtggatcccggagtttcccccaaatccatctacatcaaatttgtagaagtagagagggattttctttccgcaggctctttagttgagtgcctggaaaaagccattggataccccttaaaatttaacaactgaatgtcatccttcataaggatttgggctcttagctccttcttctctactcacttcccattacccggaccacccctcatccagatgccgccgtcagactcttcatggaaaccctttcttcaattgggccagtacgacttctaaggaatcatagtagacttgggccagaaaaaacagacctcacctgaaaatgctcattttgagcaagcaagatatatagcgaacttgcatggtgggtcagctatttcttttttaaaaacagaaaaacaatttttaaatggattttagagccctaatataaacaaatgtaggtacattccatattggacaaaacttatactttgagtttcatatgaaattgaaaaattgtatttttttcacaatgtttcatttttacacatctctatgtctctatataagtaatatttacaaccctgaataaataagcaatagataatggcaagttaaatcttgattcacagttaaaaagactttttcaatatcacccttagctactattgtatataatttagattttcatttttttcaccagccaagtgttttgctatttccaatcagtattgcttgcaaagacctttgtttctgtgatgtaccaactttacagttgtgttgccatttaaacctttttttaaaaaaaaaaaa

SEQ ID NO: 156209 - DNA, 1109 bp, Homo sapiens
  Payload ID: 10650
  Gene Symbol: MSANTD2
  Gene Name: Myb/SANT-like DNA-binding domain containing 2
  ENST ID: ENST00000524950
  CDS Start-End: 4-543
aagatggctgcgccctgtggctcggagctgcccgccaactcgccgctaaaaattccgaagatggaggtgctttccccggcttctcctggtggcctgagcgacggaaatccatcgctgtccgacccttccacgcctcggggtgcctccccgctcgggccgggcagtgcggcgggctcgggggcagcggcgtccgggggtctcgggctggggctggggggccgcagcgccgcctcgtcctcggtctccttctcccctggtggcggcggtggcggggctgcggcagccgccgccgccgcctgccggggcatgtcgtggacgccagccgagacgaacgcgctcatcgcagtgtggggcaacgagcggctggtggaggcgcggtaccagcagctggagggagccggcacggtgttcggcagcaaggcccccgggccagccatgtacgagcgcgtgtcccgggccctggccgagctgggctacgagcggaccccgtcccagtgccgggagcgcatcaagatgaaatacctgtcacaaagagaacattaaaaataaaacaagagtcttctgaagaagcacagaagagagacatcatgcagaatattgtacagattttggaatcggtacagttgaaatgggaactttttcagagctggacagacttttcaaggctccatctttctaataaactggccatttttggaattggttataacacccgttggaaagaggatatccgttaccattatgctgagatcagctcccaggtgccccttggcaagcgacttcgggagtacttcaactctgagaagcctgaaggacggatcattatgacccgagtgcagaaaatgaactggaaaaatgtttactacaaatttttagagatcactattagcgaagctaggtgcttggagctgcacatggaaattgactggatacccattgcccactccaaaccaactggtgggaatgttgttcaatatttattgcctgggggtattcctaaaagcccaggcctttatgccattggctatgaagaatgtattgagaggcccctctcaccacacatggagcaaagttccctggacccaggaaaagagggccgggttgacctg

SEQ ID NO: 156210 - DNA, 775 bp, Homo sapiens
  Payload ID: 10650
  Gene Symbol: MSANTD2
  Gene Name: Myb/SANT-like DNA-binding domain containing 2
  ENST ID: ENST00000527140
  CDS Start-End: 11-637
cgcttggaagatggctgcgccctgtggctcggagctgcccgccaactcgccgctaaaaattccgaagatggaggtgctttccccggcttctcctggtggcctgagcgacggaaatccatcgctgtccgacccttccacgcctcggggtgcctccccgctcgggccgggcagtgcggcgggctcgggggcagcggcgtccgggggtctcgggctggggctggggggccgcagcgccgcctcgtcctcggtctccttctcccctggtggcggcggtggcggggctgcggcagccgccgccgccgcctgccggggcatgtcgtggacgccagccgagacgaacgcgctcatcgcagtgtggggcaacgagcggctggtggaggcgcggtaccagcagctggagggagccggcacggtgttcggcagcaaggcccccgggccagccatgtacgagcgcgtgtcccgggccctggccgagctgggctacgagcggaccccgtcccagtgccgggagcgcatcaagtggcttgtaccaggagctggagtcagatggcagcactatggaggactattcacaggaggactggggaaaccacagtcaggatctccatggctatccaacagatcaggaattggatgaaatacctgtcacaaagagaacattaaaaataaaacaagagtcttctgaagaagcacagaagagagacatcatgcagaatattgtacagattttggaatcggtacagttgaaatgggaactttttcagagctggacaga

SEQ ID NO: 156211 - DNA, 3086 bp, Homo sapiens
  Payload ID: 10650
  Gene Symbol: MSANTD2
  Gene Name: Myb/SANT-like DNA-binding domain containing 2
  Uniprot ID: Q6P1R3
  ENST ID: ENST00000526629
  CDS Start-End: 1449-2438
gtgaaaatagttaacatattggcttatggagagcaatctcacgtttaggataaatttagtctggcagtgcctacaaattaagtctgaggtgaactacttttgaacagttgagttagaaagtatttggtagccaccagggaaaagagatcttatttcaagaaaataattagtgaaactcagtaaagtagaagggagattagaaggaacaaagggaggcagagatgggatagagactggttgcaacttaactaaatttggaagctgggattaagcccttgatttatcttttgaaatgccatataagatagcataagatgtaccattaaattcaggaaactgggctaataatcagaaatatgtgttagaaataaagaccatggtaaaaatggaagggttgtacaagagaataaaattattcaggttttgtctgtggatttgcataatgatatttatttgctgtgtgccacatggcagaaaaggaagtgaaataacacccctctgtcccgtccttttccccagaaagaaatcactggcttcatttgttggtttgtttagctggcagcttgagttggtagaacagacgagtagattgtctagctttagacgtaggtattagtgtactgtttcttgatcattgatgtttgagacctggaatttgtagcattattgatttgacctctgttttaaattttagcggcttccacaaagactgagttagtaaggaatacaactatgtaagtaatatgttttactagctaatttgtctaggcaattatttttaccctgtattcattccttcttaatcaagagtaaggcaggtattctttgctttgggaaattcttctttctgtcctcccttccctcactttttccaaattctgggcacaacagcagctctctctcttctgtggcaggtgtgcatcctattggctggctggtatttcttgttttttttcccccttattctttttaaatgggggtgggggtataaaaatatgtgtatggggtacatgcaataatgttgtaatgtttcttgttgtttaatggataattaattgcaaaataattgttttaattataacatgtttgagtaaatgctaaattagtatttttttctaatataataatgaatttgaaatctagcattcctgtaacaatgtgtctatgtttgtctgtctgtgtctgtctaatagtaattaatatctgtggtccgtacctggaagaggaagtacagctttaaaggaataacaaaagactttgtgtcttagacccttcgcaggtgttacagtcgggtgaaagaacatggtgttgggaaaagaaagagcagttacacatttgaacagttggaacaggtgtttggtcagggaggatgggatgctcagccctgccagcctgtacttattaacagtagtggcttgtaccaggagctggagtcagatggcagcactatggaggactattcacaggaggactggggaaaccacagtcaggatctccatggctatccaacagatcaggaattggatgaaatacctgtcacaaagagaacattaaaaataaaacaagagtcttctgaagaagcacagaagagagacatcatgcagaatattgtacagattttggaatcggtacagttgaaatgggaactttttcagagctggacagacttttcaaggctccatctttctaataaactggccatttttggaattggttataacacccgttggaaagaggatatccgttaccattatgctgagatcagctcccaggtgccccttggcaagcgacttcgggagtacttcaactctgagaagcctgaaggacggatcattatgacccgagtgcagaaaatgaactggaaaaatgtttactacaaatttttagagatcactattagcgaagctaggtgcttggagctgcacatggaaattgactggatacccattgcccactccaaaccaactggtgggaatgttgttcaatatttattgcctgggggtattcctaaaagcccaggcctttatgccattggctatgaagaatgtattgagaggcccctctcaccacacatggagcaaagttccctggacccaggaaaagagggccgggttgacctggaaaccctttcagcacaagcctcattacaggtggaaatagaacccacccgaattatctattgctacctcgggattgctgaggtcaggactctacagcagtgcttatttttacatttccaagcgaataccaaaaccttcagcaaagattgggttggtattaacgggtttttgtctcagaactgtattgtggatcccggagtttcccccaaatccatctacatcaaatttgtagaagtagagagggattttctttccgcaggctctttagttgagtgcctggaaaaagccattggataccccttaaaatttaacaactgaatgtcatccttcataaggatttgggctcttagctccttcttctctactcacttcccattacccggaccacccctcatccagatgccgccgtcagactcttcatggaaaccctttcttcaattgggccagtacgacttctaaggaatcatagtagacttgggccagaaaaaacagacctcacctgaaaatgctcattttgagcaagcaagatatatagcgaacttgcatggtgggtcagctatttcttttttaaaaacagaaaaacaatttttaaatggattttagagccctaatataaacaaatgtaggtacattccatattggacaaaacttatactttgagtttcatatgaaattgaaaaattgtatttttttcacaatgtttcatttttacacatctctatgtctctatataagtaatatttacaaccctgaataaataagcaatagataatggcaagttaaatcttgattcacagttaaaaagactttttcaatatcacccttagctactattgtatataatttagattttcatttttttcaccagccaagtgttttgctatttccaatcagtattgcttgcaaagacctttgtttctgtgatgtaccaactttacagttgtgttgccatttaaaccttttttt

SEQ ID NO: 156212 - DNA, 786 bp, Homo sapiens
  Payload ID: 10651
  Gene Symbol: MSANTD3
  Gene Name: Myb/SANT-like DNA-binding domain containing 3
  Uniprot ID: Q96H12
  ENST ID: ENST00000374885
  CDS Start-End: 151-630
gttcgggagcccgcggccctcccggccgccctgcttgcgagaggagcccaggccgcccgccctcgcgcctcgccggcccctcccccggtcgccgcggctgccgcgccgccgctgcaggatagctagcggccaggagaaatacagtggaaaatgcaaaacaacgaaattataaagcctgccaaatacttctcagaattggaaaagagcatcctgctggctttagtagaaaagtataaatatgtgctggaatgtaagaaaagtgatgcgcgaactattgcccttaagcagcgtacctggcaggcgctggcccacgaatacaactctcagcccagcgtgtccctgcgggatttcaaacagctgaagaagtgctgggagaacatcaaggctcggaccaaaaaaattatggcccatgaaaggagagagaaagtgaaacggagcgtcagccctctcctgagtacccacgtcctagggaaggagaagatcgccagcatgctgccggagcagctctacttcctgcagagccccccggaggaggagcccgaataccaccccgacgcctcagcccaagttttctttcaagaaagaaaaagaagcctggaattgtcaatcatcctttctgggacttggtaggaaaaagaatcatttgctgtttcaaatagagaactgtgcgatgatgagaaagagttcatacattttccagtatgtgaggggacctctcaacctgaaccctcgtgttcagctgtcagaataacagccaataaaaactacaggagcaaaacctctcag

SEQ ID NO: 156213 - DNA, 710 bp, Homo sapiens
  Payload ID: 10651
  Gene Symbol: MSANTD3
  Gene Name: Myb/SANT-like DNA-binding domain containing 3
  ENST ID: ENST00000374886
  CDS Start-End: 168-710
gggggtggggggcgcgggccgggcgtagagggggccgggggccggcatggagggttttcgggccgagccgctgcgaccccggccttgcaggctgggcgccgggcggccgcctctgcgcgccgcgatgggactcggatagctagcggccaggagaaatacagtggaaaatgcaaaacaacgaaattataaagcctgccaaatacttctcagaattggaaaagagcatcctgctggctttagtagaaaagtataaatatgtgctggaatgtaagaaaagtgatgcgcgaactattgcccttaagcagcgtacctggcaggcgctggcccacgaatacaactctcagcccagcgtgtccctgcgggatttcaaacagctgaagaagtgctgggagaacatcaaggctcggaccaaaaaaattatggcccatgaaaggagagagaaagtgaaacggagcgtcagccctctcctgagtacccacgtcctagggaaggagaagatcgccagcatgctgccggagcagctctacttcctgcagagccccccggaggaggagcccgaataccaccccgacgcctcagcccaagaatcatttgctgtttcaaatagagaactgtgcgatgatgagaaagagttcatacattttccagtatgtgaggggacctctcaacctgaaccctcgtgttcagctgtcagaataacagccaataaa

SEQ ID NO: 156214 - DNA, 1362 bp, Homo sapiens
  Payload ID: 10651
  Gene Symbol: MSANTD3
  Gene Name: Myb/SANT-like DNA-binding domain containing 3
  Uniprot ID: Q96H12
  ENST ID: ENST00000395067
  CDS Start-End: 272-1099
acggaccggcaggcggcgggcggtccgcgagggggcggcggcgtccgggctttgtggccgcggcgcgcgcggcggggcctggccggccgggggcgcgccgccgccgccgccgccgcccggcgttcgggagcccgcggccctcccggccgccctgcttgcgagaggagcccaggccgcccgccctcgcgcctcgccggcccctcccccggtcgccgcggctgccgcgccgccgctgcaggatagctagcggccaggagaaatacagtggaaaatgcaaaacaacgaaattataaagcctgccaaatacttctcagaattggaaaagagcatcctgctggctttagtagaaaagtataaatatgtgctggaatgtaagaaaagtgatgcgcgaactattgcccttaagcagcgtacctggcaggcgctggcccacgaatacaactctcagcccagcgtgtccctgcgggatttcaaacagctgaagaagtgctgggagaacatcaaggctcggaccaaaaaaattatggcccatgaaaggagagagaaagtgaaacggagcgtcagccctctcctgagtacccacgtcctagggaaggagaagatcgccagcatgctgccggagcagctctacttcctgcagagccccccggaggaggagcccgaataccaccccgacgcctcagcccaagaatcatttgctgtttcaaatagagaactgtgcgatgatgagaaagagttcatacattttccagtatgtgaggggacctctcaacctgaaccctcgtgttcagctgtcagaataacagccaataaaaactacaggagcaaaacctctcaggaaggtgctttaaaaaagatgcatgaggaagaacaccatcaacaaatgtccatcttacaactgcaactgatacaaatgaatgaggtgcatgtggccaaaatccagcagatagagcgagagtgtgagatggcagaggaggaacacaggataaaaatggaagttctcaataaaaagaagatgtattgggaaagaaaactacaaacttttaccaaggaatggcctgtttcctcatttaaccggccctttcccaattcgccctaagactttgggggtggctctcttgtaattaatctgtgttggcaaagaatgtctggaacatggacttggcggtcagtaacctgtaacagagctacaactaggaaaattagagtggtagtagtcacttatttaagaattcattcaggtaaacagctgcaccctctgtaccccttaagtggcaaagaagctgttatagtcttctgaaaattatcactatgagtgctataattctgaatataatgtctcttaattagaattcatacaag

SEQ ID NO: 156215 - DNA, 780 bp, Homo sapiens
  Payload ID: 10651
  Gene Symbol: MSANTD3
  Gene Name: Myb/SANT-like DNA-binding domain containing 3
  ENST ID: ENST00000398977
  CDS Start-End: 378-780
ttgtggccgcggcgcgcgcggcggggcctggccggccgggggcgcgccgccgccgccgccgccgcccggcgttcgggagcccgcggccctcccggccgccctgcttgcgagaggagcccaggccgcccgccctcgcgcctcgccggcccctcccccggtcgccgcggctgccgcgccgccgctgcaggaatttcccagtccagtgtgggagatggacgcaaagagcaaattgcaaaaaatatgggaagtgctacagtacagtcatgtacaactgtcagtgagctcatagaagagtaactcattctgagccagtgggaactcagggccaatctatatctaacaaggatagctagcggccaggagaaatacagtggaaaatgcaaaacaacgaaattataaagcctgccaaatacttctcagaattggaaaagagcatcctgctggctttagtagaaaagtataaatatgtgctggaatgtaagaaaagtgatgcgcgaactattgcccttaagcagcgtacctggcaggcgctggcccacgaatacaactctcagcccagcgtgtccctgcgggatttcaaacagctgaagaagtgctgggagaacatcaaggctcggaccaaaaaaattatggcccatgaaaggagagagaaagtgaaacggagcgtcagccctctcctgagtacccacgtcctagggaaggagaagatcgccagcatgctgccggagcagctctacttcctgcagagccccccggaggaggagcccgaataccaccccg

SEQ ID NO: 156216 - DNA, 1755 bp, Homo sapiens
  Payload ID: 10651
  Gene Symbol: MSANTD3
  Gene Name: Myb/SANT-like DNA-binding domain containing 3
  Uniprot ID: Q96H12
  ENST ID: ENST00000613183
  CDS Start-End: 183-1010
cagtccagtgtgggagatggacgcaaagagcaaattgcaaaaaatatgggaagtgctacagtacagtcatgtacaactgtcagtgagctcatagaagagtaactcattctgagccagtgggaactcagggccaatctatatctaacaaggatagctagcggccaggagaaatacagtggaaaatgcaaaacaacgaaattataaagcctgccaaatacttctcagaattggaaaagagcatcctgctggctttagtagaaaagtataaatatgtgctggaatgtaagaaaagtgatgcgcgaactattgcccttaagcagcgtacctggcaggcgctggcccacgaatacaactctcagcccagcgtgtccctgcgggatttcaaacagctgaagaagtgctgggagaacatcaaggctcggaccaaaaaaattatggcccatgaaaggagagagaaagtgaaacggagcgtcagccctctcctgagtacccacgtcctagggaaggagaagatcgccagcatgctgccggagcagctctacttcctgcagagccccccggaggaggagcccgaataccaccccgacgcctcagcccaagaatcatttgctgtttcaaatagagaactgtgcgatgatgagaaagagttcatacattttccagtatgtgaggggacctctcaacctgaaccctcgtgttcagctgtcagaataacagccaataaaaactacaggagcaaaacctctcaggaaggtgctttaaaaaagatgcatgaggaagaacaccatcaacaaatgtccatcttacaactgcaactgatacaaatgaatgaggtgcatgtggccaaaatccagcagatagagcgagagtgtgagatggcagaggaggaacacaggataaaaatggaagttctcaataaaaagaagatgtattgggaaagaaaactacaaacttttaccaaggaatggcctgtttcctcatttaaccggccctttcccaattcgccctaagactttgggggtggctctcttgtaattaatctgtgttggcaaagaatgtctggaacatggacttggcggtcagtaacctgtaacagagctacaactaggaaaattagagtggtagtagtcacttatttaagaattcattcaggtaaacagctgcaccctctgtaccccttaagtggcaaagaagctgttatagtcttctgaaaattatcactatgagtgctataattctgaatataatgtctcttaattagaattcatacaagaaccacgtgtgagtgttgttgttgttgtttttttttttaatcaaatgcaagtgtgactataaaggagtgtggctgatttttttttttttcttttttctttttaaacagacagcagaacttttctatccaaatgaatgccgtcccatggaaagtggctgtcctgggaggctacacgtttctccaatggtgatgctgttgctcagaacttgctagaggtctttagggaacctccgtgagagctgcagcacctttttaattttctcggtgtcatcctctgagtatggattttctgtttttaaacagcccaaagtttagaagggtattttctaatgtggctcataaaccaccttttaaggcctttcctcaaacaggagttctaaataagtctccaacaatagtagttttgttggagctaaggatgtaactactttgaggaagaaatgttcgtttagatttctacattctgttatgttggttttatt

SEQ ID NO: 156217 - DNA, 1748 bp, Homo sapiens
  Payload ID: 10651
  Gene Symbol: MSANTD3
  Gene Name: Myb/SANT-like DNA-binding domain containing 3
  Uniprot ID: Q96H12
  ENST ID: ENST00000622639
  CDS Start-End: 176-1003
gcgggggcgggggtggggggcgcgggccgggcgtagagggggccgggggccggcatggagggttttcgggccgagccgctgcgaccccggccttgcaggctgggcgccgggcggccgcctctgcgcgccgcgatgggactcggatagctagcggccaggagaaatacagtggaaaatgcaaaacaacgaaattataaagcctgccaaatacttctcagaattggaaaagagcatcctgctggctttagtagaaaagtataaatatgtgctggaatgtaagaaaagtgatgcgcgaactattgcccttaagcagcgtacctggcaggcgctggcccacgaatacaactctcagcccagcgtgtccctgcgggatttcaaacagctgaagaagtgctgggagaacatcaaggctcggaccaaaaaaattatggcccatgaaaggagagagaaagtgaaacggagcgtcagccctctcctgagtacccacgtcctagggaaggagaagatcgccagcatgctgccggagcagctctacttcctgcagagccccccggaggaggagcccgaataccaccccgacgcctcagcccaagaatcatttgctgtttcaaatagagaactgtgcgatgatgagaaagagttcatacattttccagtatgtgaggggacctctcaacctgaaccctcgtgttcagctgtcagaataacagccaataaaaactacaggagcaaaacctctcaggaaggtgctttaaaaaagatgcatgaggaagaacaccatcaacaaatgtccatcttacaactgcaactgatacaaatgaatgaggtgcatgtggccaaaatccagcagatagagcgagagtgtgagatggcagaggaggaacacaggataaaaatggaagttctcaataaaaagaagatgtattgggaaagaaaactacaaacttttaccaaggaatggcctgtttcctcatttaaccggccctttcccaattcgccctaagactttgggggtggctctcttgtaattaatctgtgttggcaaagaatgtctggaacatggacttggcggtcagtaacctgtaacagagctacaactaggaaaattagagtggtagtagtcacttatttaagaattcattcaggtaaacagctgcaccctctgtaccccttaagtggcaaagaagctgttatagtcttctgaaaattatcactatgagtgctataattctgaatataatgtctcttaattagaattcatacaagaaccacgtgtgagtgttgttgttgttgtttttttttttaatcaaatgcaagtgtgactataaaggagtgtggctgatttttttttttttcttttttctttttaaacagacagcagaacttttctatccaaatgaatgccgtcccatggaaagtggctgtcctgggaggctacacgtttctccaatggtgatgctgttgctcagaacttgctagaggtctttagggaacctccgtgagagctgcagcacctttttaattttctcggtgtcatcctctgagtatggattttctgtttttaaacagcccaaagtttagaagggtattttctaatgtggctcataaaccaccttttaaggcctttcctcaaacaggagttctaaataagtctccaacaatagtagttttgttggagctaaggatgtaactactttgaggaagaaatgttcgtttagatttctacattctgttatgttggttttatt

SEQ ID NO: 156218 - DNA, 4087 bp, Homo sapiens
  Payload ID: 10652
  Gene Symbol: MSANTD4
  Gene Name: Myb/SANT-like DNA-binding domain containing 4 with coiled-coils
  Uniprot ID: Q8NCY6
  ENST ID: ENST00000301919
  CDS Start-End: 1417-2454
ggcgaccgtggggaggtgccgccggggtcgcaggtgagcggttctatgctggaggaggcggccagggaagcggcggctccgtgaccagtgggtgccctcgcagtgggtagggtcccggaggggtcagcggcaattggcgcaacgcttgctgccgggtttggtccaagggctgcgacgtagcgggactgcacgctcgggagaagtgccacgcgcgtctgtcgcctgaccggggaggctggggagggcccaggccacggaaacaagactgcagaagtttctgggcactcagtcgggactctcatttaatacccagagagaggagatcttccaggttgccccgactcccaccgggactcctaccagcagcaacctcatcattgtggccgaggcaggtgcgcgcccctgctcccctgggtggccttccgggagcccagtctaactcgattcttcccaggggctctttttggacggtcccaaaggaggcagcgggagggaggtgaaagatactttgataaccgtcgacccataagtatacttgttatgcacctaccacgagttttagagaagaacatactttttggcagggaagtgaatcccctataagaatataggggaggggaaagccacactttaaagagaatttgggtagggtttgatattgtagatttgtgatgcttttcttcttgaactgcttaactaatttaccctcaaatttttttgatccggaacttgccgtctggtttttctcagacttcttaattctgacttatcatgaagtatctaggaacttcattctcaagttttagtgcttgtaaaaagttgcctggttatattatgccattggcagtacatcatcttcacaaggattacgtaagtgaactacatctcattcctgtttccaactagtgaagaacgattgtgaaatgggattttagaaaatggctgttctctgtgattgggcatagaaggtttgtaagttttagagactgcagctgttgaatcctttctgctaagagagcgatgacaggcaatagaaaagggatagtgtttgacatctaaaatgacatattttcacattttatgaggtgttatatccccagcaccaaaaatagtgcctttcacacagtaggagctcagtaagtattttttgaggaaattattggggaatgaatggatggtagaaaacccaagcttctgttacttggataccggcatataaaggagaggacaggaagacaaacatttctggaaatggcttttatccaggaattatccagactgccttgccactagatgaatggaagacaatgatttgaactaagggccagcaaagaattatccctggtttttgtgctttgcagcattcctcaaattgttttcacatctcttaccataaaaactgcattgaaattgaaaatgaagcagttgaaaagaaaaaggaaaagcaattttagtgttcaagaaactcagacccttttgaaagaaattacgaaaaggaaagaagtcattttttccaagcagctcaatacaacaattaatgtgatgaagcgaatggcttgggaagagattgcacagtgtgtgaatgctgtaggagaaggagaacagaggacagggacagaggtgaaaagaaggtaccttgactggcgagcacttatgaagagaaagaggatgaaggccaacattaagctggttggttcaggatttccccttccctcctctgatttggatgactctctcactgaagagatagatgaaaagattggattccgaaatgatgcaaattttgactggcaaaatgtggcagatttcagggatgcaggtggatccttaactgaggtcaaggtggaagaggaagaaagggatccgcagagtcctgaatttgaaattgaggaggaggaagaaatgttgtcatccgtcataccagattccaggagagaaaatgaacttcccgatttcccccacattgatgagttttttacccttaactcaacaccatctagatctgcatatgatgagcctcatttgctcgtaaatattgagaaacagaaactagagttggaaaaacgacgactggatatcgaggccgaaaggctgcaggtagaaaaggaacgcctacaaatcgagaaagagaggctgcggcatttagacatggaacatgagcggcttcagctagagaaggagcggctgcagattgaaagagaaaagttgaggttacagatagtcaattcagagaaaccgtccttggaaaatgaacttggtcaaggagaaaaatccatgcttcaaccacaggacatagaaacagagaagttaaaacttgagcgagaacgcttgcaactggaaaaggataggctgcagtttttgaagtttgaatctgagaagctgcagattgaaaaggaacgcttacaggtagagaaagacagacttcgaattcagaaagaaggacacttgcagtgatttttccaggcttccatttagcaaatgtttgaaaactctagatttttctcatatcaggtgatataatgatggttgctggattagctgtggtttcttgtctaatgtcagtgttcagtaggaaaaagttatatgtggataactgtatgcctaagtagtatataaaagctgtgccctagcgtaaacagtatagcagaaacttactgtgctggactctttaccttataatattacatagagtcttgtattgtctgtgtacccagagtttacaattatgtccatataaaattctagcccagaagttctcatctggggtagattttggccttcagaagaccaatttggtgatgtctggagacatgttgggttgtcaaaactggggtggggaaaaggttgctactgtgcaatgcatacctcctcaacacccccccacactcagtaaagaattttccaacccaaaatatcattagtcctgaggttgagaaaccctgtcctagcctaactgtgtacctctatagctatgttttatagttttagaatattaaaacctcagatatttatgtgggtaggtacttaaatggccaaaaactttaactatgaaatgttactgtgtagtatattgaatataggaagtgatgaagattataggtattttattcccatgtttccatctataaatagccttctcagattcagaaaacaatacagagaacatcagaaattttctaaaatgggtcactttgaaaagaattctttttctcactattaatgctttagaagcaagacgcaattttaaagctttagttccttttctttcagtcattgtcttagtttgggtacaaaaatgtcatttcagtaatgtactgaaatcttataagtgaatagttgaagctagtaaaaatgataccagtataaaaatggtacttgtagtccatgagcttgaacccaatgactgattgtttgacttttaaaataagtaatagcagccatttgggagtagggggtaggtggggaagatgtactccgtatcaaataataatgatgttgaaataatgatagtaggtatgtattatggattggagaagcacttattacactatctaacctaatatgtagaacaattcttgagagttgtatctgtcgttatttctgaatgtgaagctcagagaagtgacacagagtaaatggctgatcttctatattgtagtatattttgtccttccctcttccctgaggaacaaagcacgtatctttagtctctttgatatttattctgagaccaagggcttgcttgacctgatgattttccttcagctctctgaaggtgctttttccacaatccaagtgattctgatacacactaaagttgagaatcactgcactagatcactttgtgttttctgattttcaaggttgatacgtagctttaatacagctcttctgttgacagttattactttaattttgcatttgttccttgtaagaatggctggaaactgtgtgttgacatttgaggatgggtatgcaaggaaaaaatatacttctgtttacttactctgactttgaaatagtgttatttttctatatctgaaataaatgcttctaccatagaaataaatttgcctatactatctga

SEQ ID NO: 156219 - DNA, 612 bp, Homo sapiens
  Payload ID: 10652
  Gene Symbol: MSANTD4
  Gene Name: Myb/SANT-like DNA-binding domain containing 4 with coiled-coils
  ENST ID: ENST00000534458
  CDS Start-End: 280-612
atcttttttcctaccccccttggggcgaccgtggggaggtgccgccggggtcgcaggtgagcggttctatgctggaggaggcggccagggaagcggcggctccgtgaccagtgggtgccctcgcagtgggaattatccagactgccttgccactagatgaatggaagacaatgatttgaactaagggccagcaaagaattatccctggtttttgtgctttgcagcattcctcaaattgttttcacatctcttaccataaaaactgcattgaaattgaaaatgaagcagttgaaaagaaaaaggaaaagcaattttagtgttcaagaaactcagacccttttgaaagaaattacgaaaaggaaagaagtcattttttccaagcagctcaatacaacaattaatgtgatgaagcgaatggcttgggaagagattgcacagtgtgtgaatgctgtaggagaaggagaacagaggacagggacagaggtgaaaagaaggtaccttgactggcgagcacttatgaagagaaagaggatgaaggccaacattaagctggttggttcaggatttccccttccctcctctgatttggatgactctctcactgaagagata

SEQ ID NO: 156220 - DNA, 948 bp, Homo sapiens
  Payload ID: 10652
  Gene Symbol: MSANTD4
  Gene Name: Myb/SANT-like DNA-binding domain containing 4 with coiled-coils
  ENST ID: ENST00000530788
  CDS Start-End: 360-948
attgtgaggccaggcctagggcgggctctcagccagaatggctacaccattctaaccaatggatgagactcatcaaatgagcggcagccatatgagccattggggtggcgggagatgggcgggcccagttagtgggcgggggatcaatgaagcatcttttttcctaccccccttggggcgaccgtggggaggtgccgccggggtcgcaggaattatccagactgccttgccactagatgaatggaagacaatgatttgaactaagggccagcaaagaattatccctggtttttgtgctttgcagcattcctcaaattgttttcacatctcttaccataaaaactgcattgaaattgaaaatgaagcagttgaaaagaaaaaggaaaagcaattttagtgttcaagaaactcagacccttttgaaagaaattacgaaaaggaaagaagtcattttttccaagcagctcaatacaacaattaatgtgatgaagcgaatggcttgggaagagattgcacagtgtgtgaatgctgtaggagaaggagaacagaggacagggacagaggtgaaaagaaggtaccttgactggcgagcacttatgaagagaaagaggatgaaggccaacattaagctggttggttcaggatttccccttccctcctctgatttggatgactctctcactgaagagatagatgaaaagattggattccgaaatgatgcaaattttgactggcaaaatgtggcagatttcagggatgcaggtggatccttaactgaggtcaaggtggaagaggaagaaagggatccgcagagtcctgaatttgaaattgaggaggaggaagaaatgttgtcatccgtcataccagattccaggagagaaaatgaacttcccgatttcccccacattgatgagttttttacccttaactcaacaccatctagatctg

SEQ ID NO: 156221 - DNA, 780 bp, Homo sapiens
  Payload ID: 10652
  Gene Symbol: MSANTD4
  Gene Name: Myb/SANT-like DNA-binding domain containing 4 with coiled-coils
  ENST ID: ENST00000530108
  CDS Start-End: 566-780
atcttttttcctaccccccttggggcgaccgtggggaggtgccgccggggtcgcaggtgagcggttctatgctggaggaggcggccagggaagcggcggctccgtgaccagtgggtgccctcgcagtgggtagggtcccggaggggtcagcggcaattggcgcaacgcttgctgccgggtttggtccaagggctgcgacgtagcgggactgcacgctcgggagaagtgccacgcgcgtctgtcgcctgaccggggaggctggggagggcccaggccacggaaacaagactgcagaagtttctgggcactcagtcgggactctcatttaatacccagagagaggagatcttccaggttgccccgactcccaccgggactcctaccagcagcaacctcatcattgtggccgaggcaggaattatccagactgccttgccactagatgaatggaagacaatgatttgaactaagggccagcaaagaattatccctggtttttgtgctttgcagcattcctcaaattgttttcacatctcttaccataaaaactgcattgaaattgaaaatgaagcagttgaaaagaaaaaggaaaagcaattttagtgttcaagaaactcagacccttttgaaagaaattacgaaaaggaaagaagtcattttttccaagcagctcaatacaacaattaatgtgatgaagcgaatggcttgggaagagattgcacagtgtgtgaatgctgtaggagaaggagaacagaggacagggacagaggtgaaaagaag

SEQ ID NO: 156222 - DNA, 508 bp, Homo sapiens
  Payload ID: 10652
  Gene Symbol: MSANTD4
  Gene Name: Myb/SANT-like DNA-binding domain containing 4 with coiled-coils
  ENST ID: ENST00000617528
  CDS Start-End: 3-407
agatgaaaagattggattccgaaatgatgaattttgactggcaaaatgtggcagatttcagggatgcaggtggatccttaactgaggtcaaggtggaagaggaagaaagggatccgcagagtcctgaatttgaaattgaggaggaggaagaaatgttgtcatccgtcataccagattccaggagagaaaatgaacttcccgatttcccccacattgatgagttttttacccttaactcaacaccatctagatctgcatatgatgagcctcatttgctcgtaaatattgagaaacagaaactagagttggaaaaacgacgactggatatcgaggccgaaagggcaggtagaaaaggaacgcctacaaatcgagaaagagaggctgcggcatttagacatggaacatgagcggcttcagctagagaaggagcggctgcagattgaaagagaaaagttgaggttacagatagtcaattcagagaaaccgtccttggaaaatgaacttggtc

SEQ ID NO: 156223 - DNA, 7785 bp, Homo sapiens
  Payload ID: 10653
  Gene Symbol: MYSM1
  Gene Name: Myb-like, SWIRM and MPN domains 1
  Uniprot ID: Q5VVJ2
  ENST ID: ENST00000472487
  CDS Start-End: 41-2527
gcgggatctctcgggaggacggacggggtcaggtcccatcatggcggctgaagaggcggatgtggatatcgaaggggacgtggtagcggcggcgggggcacagccaggaagtggtgaaaatacagcatcagttttacaaaaagatcactatcttgattcatcttggagaacagagaatggccttattccttggaccttggataacaccatcagtgaagagaacagagctgttattgagaaaatgttgttggaagaagaatattatttatctaaaaaatcacaaccggaaaaagtctggcttgatcaaaaggaagatgataaaaaatacatgaagagtctgcagaaaacagcaaaaatcatggtacactctcctacaaaaccagccagttactcagtaaagtggacgatagaagaaaaagagctgtttgaacaagggctggctaaatttggccgaagatggaccaaaatttcaaagctaattggaagccgcactgttttacaagtgaagagttatgcaagacagtattttaaaaataaggtcaaatgcggtctggataaagaaacaccaaatcagaagaccggccataatcttcaagttaaaaatgaagataaagggacaaaggcatggacaccatcatgtttaaggggacgtgctgatcccaacttgaatgctgtaaaaattgaaaagttatctgatgatgaagaagtagacatcacagatgaggtggacgagttgtcttctcaaacaccccagaagaattctagcagtgatctcttgttagactttcctaatagtaaaatgcatgaaaccaatcaaggagaattcattacttctgacagccaggaagctctcttttctaagtcttccaggggctgtcttcaaaatgaaaagcaagatgaaacactttcaagctcagaaattacactgtggactgagaaacagagcaatggtgacaaaaaatcaattgaattaaatgaccagaaatttaatgaattgattaaaaactgcaacaagcatgatggaaggggaataatagttgatgccaggcagttgccttctccagagccttgtgaaattcagaaaaatttgaatgataatgaaatgctttttcattcttgccaaatggtagaggaaagccatgaggaagaagagcttaagccaccagaacaggaaatagaaatagatagaaatatcattcaagaagaagaaaaacaagcaattcctgagttttttgaggggcgccaagctaaaacaccagaacgctatttgaaaattagaaattatattttggatcaatgggagatatgcaaaccaaaatacttaaataagacctcagtacgtcctggcctgaagaactgtggagatgttaattgtattggacggattcatacatacctcgaattgataggagcaatcaattttggatgtgaacaggctgtgtataataggccacaaacagttgacaaagtacgaatcagagacagaaaagatgcagtagaagcataccaacttgcccagcgtctgcagtctatgcgtacaaggagacgtagggtccgagacccatggggaaactggtgtgatgcaaaggacttagaaggacaaacgtttgagcatctctctgctgaggagttggcaaaaagaagagaagaggaaaaaggcagacctgttaaatctttaaaagtgccaagaccaacaaaaagctcgtttgatcccttccaactgataccttgtaatttttttagtgaagaaaagcaggagccatttcaggtgaaagtggcttcagaagcacttttaataatggatttgcatgctcatgtttctatggcagaagtgattggtctgttaggaggaagatactcagaagttgataaagtagttgaagtctgtgcagcagaaccatgtaacagtctgagtacaggactacagtgtgagatggatcctgtatcacaaacacaggcctcagaaaccttggctgttagaggcttcagtgttattggatggtatcattctcatcctgcttttgatcctaatccttccttacgagatattgacacacaagctaaataccagagttacttctccagaggaggtgcaaagttcattgggatgattgttagtccctataatcgaaataatcccttaccatattctcagattacctgcctggttataagtgaggaaattagcccagatggctcttatcgcttaccttacaaatttgaagtacagcagatgttagaagaacctcagtggggattagtatttgaaaagacaagatggataatagaaaaatacaggctctcccatagcagcgtccccatggataaaatctttcgccgggattctgacctgacttgtttgcagaaacttttggagtgtatgaggaagactctgagcaaagtgaccaattgctttatggctgaagaattcttgactgaaatagaaaatttgttcctttccaattataaaagcaaccaagagaatggagtaaccgaagagaactgtacaaaggaattgttaatgtgattattttaaagttaagacattttaatcttgacacagtagatcttactttcaaagttataaacttgaagtgattgtagttaacattggcacagctttggtattttttctctatttcacaaaatccaaactttgccacataaatcatgtgaaaaggaagagatacaaatttgttttcatatagtgattatcagagtgttctgcaaaccagggtccaccacggtgttctagtcctttactgagcaatgctgtaggctgtgaaactaagcaacctggtcggctttactgttgtgttcagcttgggatttggactatgtctctaagtcatttcttccctgaactagtcatttatgttccattgtggtatctcctatttcatttaaaagcacttccattctttccatatattctgctgagatttgtttatggctataaatgagatatggatgggtggtcactgagataattaatatggtttagaactactgattaataaatctaacaggagaccaggagaggcatgacaagaaaatcttaaaaacaggaaaaacccaaaggagagaactaaattaccagtttctaatcatagatactatcttccatttcattgtatagcagtagtatcataagatatgccattttctcagctatctgaaaatttttaaccaattttacacacataaaataattagcttcaattgtgagtccacttacattagtaggtgtgataaaacctcatttaactggaacataggtaatcataactcaaactttttttctactgcctactactaggagaaagaggcaaatgataataaagctggaataaatcagagatttaatttttaaaacaagcctttcaggacatgttacatattcagcccagtttcatatgctttctgaatctataatggaggtcagtgaacttttttaatgtaaagggccagtttgtaaataattttggcttttcaggccacatatgatgtctatgagacattcttctttgtgtgtgtgtgtgtgtgtgtgtgtgtgtgtgtgtgttttacagccctttaaaatgataaaaaccattgttaactcacaggcctcataaaacataggctgttggctattattctccaacccttgatctagagaattttaaacattagaattttgttttacatttgttaagctttacgtcatcttcaaatgacaccaaaactcagaattatgatctgcatttaagccaattttaaaataaaataagcagtcaatgctgcctcatttattgaaattcagtagattttagtttatttcttagtagtcagagaattgatttatagctattcaccaaacattcttactaacgtttccttatatctaaatcagattgattctatattttgctttgtttgtaatcaatagccaatgaagaataaggagtattggaagaagcagtgagtcagctttaggtgacctggttcttgtctcaactttgtgatttggggagatacagtttactttccctgagccttaattcttgtgtaactgaagtctaacttaacttcttaatgtccttccagaactaaaattttattgttcattctaatcgttggactactcttgtgaagtttatattttgagttaatacagtttccaaattaacatacatttaaaaaaaaaagggtagtatttttccatttctctgtgtgcacttaggataaacagtgaagtatagcttataaaacaattagtttgagggctgagagtgtaagaggaactataccaaaagtcaggaaacctgagctcttaccctaactctgttaccaactttgctgtgtgaccttaatcaaaacacataacctggaccccatgctcctcaccagtaaatcaagggcctgaattttatggcttagtattcccttccaagctccgaagttgcgtgattctgtgaaaggcagtgattgattcctttgtactcatcttccttttgacctgtttcctcatgatatattggggaacaaatactaaaaagtgttttatactagctttcttgattgacatttccctataatactgatgaatttgggtgatggaaagtaatggaaattgttaaaagttctgctctcaaatctgagtctccttgccctgtgtgccaatgtttaaccatatttgctaatctaagccatattgcgaggatctcaaggatgatacttgtcaagagtttggggccttgagagcacagttttcaaaataatacttagtattttctgactatagagtacatttgtcttgtaaagtatattttaaaatacagagaagtgtgaagtacaaatatctcagtgctactatttaaaaaaacacaattagtatataaatccttccccatttttttgacagtataattttagtatgttaaacttggttacttctttctctcttcctccatcattttccctgcttcctttttcttttgtcatattcttaaaacaattttgcaaccacaggtacccacattgctggcactaccagccttgggctactaccgaggataatggagccagggccttgtagaagcacagaggaagtctagaactgagggggcctatgatacaggaagttcaggaggcagagtctcaaaggaacacctgcctttaataatgtttacagaagtggagaaaggactaaaggacttaaagacatgcaggtgtcttcatcctgattctgtctttgttattgcacaatgactataaaataatgacctaatttttttttttttctggcttggctaatggaaatcgacactagcgcttccccagtattagacttaatctaattccaaagtaacattcaagaaaagaaaaaccagtggaacaggatcagtaagctcagactctccatctccattattttagccttgaccattcttctctaatccttttaaattatcttcagtttccagttcaagttacattgcttcagttacagtttgtttgaccctgtattcagagctgcattatgattcttgtgggccctagatagttttgccatcttagaccccttcttccatacaaaattaaaagtgatattttacaattgtatctgtatgaaatgaatgtattaatattttagattaaaacattttgtttagaagttcagttttttcttatgaggctaaaaaaaattaaaacatttttgtgggcttctaaaaaactgtgggccttaggtactgtgcctaatggataagttggcattgcctgtattctgaagggcatcattggaaaaatagcagtcattattctgtccccttctcccaccaccacagtccttggagaagcctttgccactccatccaggagcactgcagtttccacggttatagatctatagacttgaacttacttccttcccaacctaacgaaaactcacaaggattacttgggaccattcatcctcaaaaaagataggaggcagtggtttgttttagtcttcagatatttttgttttggtcagtccctaatctgtagttttgaaactcgtgccacacttgaaagggaaacatcctactacctttctttcctctccatttcccacaaaccctttccttcatcatcactccctgcattcttacttctcagcatataaatacaagacccttctttctattatttgttgaaagctaggcctgtaaaatagagatggacagaccatgcatgtttccatgaagctatttaatgctgctcccagtcttctgtccataccattccttccctgcccctaggagtggggttgaggtctgtgacatgcagactgtaagcacagtcagaacctctgcagctctcaacccaacagaggagactgtggcttcaacatgccaacctgagcaggtctcctctgcattaccttcctcccatttctcttcctgggtcctgatgaggtgagctggaggaaccaatagtcaggatgccctggaattgatgttgctctgttttgtgctcacaaaacagccatgtaacacatgagcacctgagttgaagccatccagtcgcaagtcagcagacagcagttgatggaattctcagtagaaattcagtaagggtgcccaaattttattttttttttcacctatactctaccaatatatggtatttaggaaaacttcttttatccaagcacaaagaaaagcacacacatttttataatcatctgcttcatcagggtaaataaataatttaacaaatttgatcagcatctctagtttaccagtactttaatattagttttcttacaaattaatgtattttgcaatatttccagaaaatcactgtgggagaataatgtaatatactttaggatatatttcctgaccttttcttaaatggcttcatgtgctattcccccaaattctgctttctctattttcttttttatttaacctataattatactttctagtatattctgagtctatcttctaagccaccttacatttttcctggaacaagggagggaataaatagttgcctccactaaatcaggaaaaaataaaaatatcccaggggagctgtgattatgccaagagctctaaacagaagtttgagaaggtaaaaattaagttgtagtatctgagttgtttttattttcttcctttggtgtttatgaaggtattcataagaactttaatttcaggggaaaaaaatgcctgatttgctatttttgacatttcctcgtctcttaagaagtcagttaaatatgttttcatagtttatattcctgtttcatagattactgtgaaacatgtatttaaacctatgaattataaaatagtatttagattctagcgtgagttaaatagattagtcatatatcttttagatttgtggatttgacatgtaaattatgtgttgtgtataagtaagttagttactaaacatatggcatggttattgataaacttgttgctatttttttccaaatgctatcagtgtttgtggacttttaaaaattagtttgaattttggaatgttctgtgataaaatgtaatttcaactattttgtacatttaaatatgccatgttgtatatgtctgtatttaaaaatgttgtaaatacctgcattttaagaattatgaaagattttcctcaaaaatgacagaactctccatacttaattgtgacacattataagatatctgattttaagcttttggattttgttctaaaaattaagtttaaacatgctgaaaattccataaaaataaaattttgaaaataaagtga

SEQ ID NO: 156224 - DNA, 6020 bp, Homo sapiens
  Payload ID: 10653
  Gene Symbol: MYSM1
  Gene Name: Myb-like, SWIRM and MPN domains 1
  Uniprot ID: Q5VVJ2
  ENST ID: ENST00000622766
  CDS Start-End: 70-774
tggagaaaagccaaacaattgcatgtttccatattttagagaaaataaattaatcatgctcatgtttctatggcagaagtgattggtctgttaggaggaagatactcagaagttgataaagtagttgaagtctgtgcagcagaaccatgtaacagtctgagtacaggactacagtgtgagatggatcctgtatcacaaacacaggcctcagaaaccttggctgttagaggcttcagtgttattggatggtatcattctcatcctgcttttgatcctaatccttccttacgagatattgacacacaagctaaataccagagttacttctccagaggaggtgcaaagttcattgggatgattgttagtccctataatcgaaataatcccttaccatattctcagattacctgcctggttataagtgaggaaattagcccagatggctcttatcgcttaccttacaaatttgaagtacagcagatgttagaagaacctcagtggggattagtatttgaaaagacaagatggataatagaaaaatacaggctctcccatagcagcgtccccatggataaaatctttcgccgggattctgacctgacttgtttgcagaaacttttggagtgtatgaggaagactctgagcaaagtgaccaattgctttatggctgaagaattcttgactgaaatagaaaatttgttcctttccaattataaaagcaaccaagagaatggagtaaccgaagagaactgtacaaaggaattgttaatgtgattattttaaagttaagacattttaatcttgacacagtagatcttactttcaaagttataaacttgaagtgattgtagttaacattggcacagctttggtattttttctctatttcacaaaatccaaactttgccacataaatcatgtgaaaaggaagagatacaaatttgttttcatatagtgattatcagagtgttctgcaaaccagggtccaccacggtgttctagtcctttactgagcaatgctgtaggctgtgaaactaagcaacctggtcggctttactgttgtgttcagcttgggatttggactatgtctctaagtcatttcttccctgaactagtcatttatgttccattgtggtatctcctatttcatttaaaagcacttccattctttccatatattctgctgagatttgtttatggctataaatgagatatggatgggtggtcactgagataattaatatggtttagaactactgattaataaatctaacaggagaccaggagaggcatgacaagaaaatcttaaaaacaggaaaaacccaaaggagagaactaaattaccagtttctaatcatagatactatcttccatttcattgtatagcagtagtatcataagatatgccattttctcagctatctgaaaatttttaaccaattttacacacataaaataattagcttcaattgtgagtccacttacattagtaggtgtgataaaacctcatttaactggaacataggtaatcataactcaaactttttttctactgcctactactaggagaaagaggcaaatgataataaagctggaataaatcagagatttaatttttaaaacaagcctttcaggacatgttacatattcagcccagtttcatatgctttctgaatctataatggaggtcagtgaacttttttaatgtaaagggccagtttgtaaataattttggcttttcaggccacatatgatgtctatgagacattcttctttgtgtgtgtgtgtgtgtgtgtgtgtgtgtgtgtgtgttttacagccctttaaaatgataaaaaccattgttaactcacaggcctcataaaacataggctgttggctattattctccaacccttgatctagagaattttaaacattagaattttgttttacatttgttaagctttacgtcatcttcaaatgacaccaaaactcagaattatgatctgcatttaagccaattttaaaataaaataagcagtcaatgctgcctcatttattgaaattcagtagattttagtttatttcttagtagtcagagaattgatttatagctattcaccaaacattcttactaacgtttccttatatctaaatcagattgattctatattttgctttgtttgtaatcaatagccaatgaagaataaggagtattggaagaagcagtgagtcagctttaggtgacctggttcttgtctcaactttgtgatttggggagatacagtttactttccctgagccttaattcttgtgtaactgaagtctaacttaacttcttaatgtccttccagaactaaaattttattgttcattctaatcgttggactactcttgtgaagtttatattttgagttaatacagtttccaaattaacatacatttaaaaaaaaaagggtagtatttttccatttctctgtgtgcacttaggataaacagtgaagtatagcttataaaacaattagtttgagggctgagagtgtaagaggaactataccaaaagtcaggaaacctgagctcttaccctaactctgttaccaactttgctgtgtgaccttaatcaaaacacataacctggaccccatgctcctcaccagtaaatcaagggcctgaattttatggcttagtattcccttccaagctccgaagttgcgtgattctgtgaaaggcagtgattgattcctttgtactcatcttccttttgacctgtttcctcatgatatattggggaacaaatactaaaaagtgttttatactagctttcttgattgacatttccctataatactgatgaatttgggtgatggaaagtaatggaaattgttaaaagttctgctctcaaatctgagtctccttgccctgtgtgccaatgtttaaccatatttgctaatctaagccatattgcgaggatctcaaggatgatacttgtcaagagtttggggccttgagagcacagttttcaaaataatacttagtattttctgactatagagtacatttgtcttgtaaagtatattttaaaatacagagaagtgtgaagtacaaatatctcagtgctactatttaaaaaaacacaattagtatataaatccttccccatttttttgacagtataattttagtatgttaaacttggttacttctttctctcttcctccatcattttccctgcttcctttttcttttgtcatattcttaaaacaattttgcaaccacaggtacccacattgctggcactaccagccttgggctactaccgaggataatggagccagggccttgtagaagcacagaggaagtctagaactgagggggcctatgatacaggaagttcaggaggcagagtctcaaaggaacacctgcctttaataatgtttacagaagtggagaaaggactaaaggacttaaagacatgcaggtgtcttcatcctgattctgtctttgttattgcacaatgactataaaataatgacctaatttttttttttttctggcttggctaatggaaatcgacactagcgcttccccagtattagacttaatctaattccaaagtaacattcaagaaaagaaaaaccagtggaacaggatcagtaagctcagactctccatctccattattttagccttgaccattcttctctaatccttttaaattatcttcagtttccagttcaagttacattgcttcagttacagtttgtttgaccctgtattcagagctgcattatgattcttgtgggccctagatagttttgccatcttagaccccttcttccatacaaaattaaaagtgatattttacaattgtatctgtatgaaatgaatgtattaatattttagattaaaacattttgtttagaagttcagttttttcttatgaggctaaaaaaaattaaaacatttttgtgggcttctaaaaaactgtgggccttaggtactgtgcctaatggataagttggcattgcctgtattctgaagggcatcattggaaaaatagcagtcattattctgtccccttctcccaccaccacagtccttggagaagcctttgccactccatccaggagcactgcagtttccacggttatagatctatagacttgaacttacttccttcccaacctaacgaaaactcacaaggattacttgggaccattcatcctcaaaaaagataggaggcagtggtttgttttagtcttcagatatttttgttttggtcagtccctaatctgtagttttgaaactcgtgccacacttgaaagggaaacatcctactacctttctttcctctccatttcccacaaaccctttccttcatcatcactccctgcattcttacttctcagcatataaatacaagacccttctttctattatttgttgaaagctaggcctgtaaaatagagatggacagaccatgcatgtttccatgaagctatttaatgctgctcccagtcttctgtccataccattccttccctgcccctaggagtggggttgaggtctgtgacatgcagactgtaagcacagtcagaacctctgcagctctcaacccaacagaggagactgtggcttcaacatgccaacctgagcaggtctcctctgcattaccttcctcccatttctcttcctgggtcctgatgaggtgagctggaggaaccaatagtcaggatgccctggaattgatgttgctctgttttgtgctcacaaaacagccatgtaacacatgagcacctgagttgaagccatccagtcgcaagtcagcagacagcagttgatggaattctcagtagaaattcagtaagggtgcccaaattttattttttttttcacctatactctaccaatatatggtatttaggaaaacttcttttatccaagcacaaagaaaagcacacacatttttataatcatctgcttcatcagggtaaataaataatttaacaaatttgatcagcatctctagtttaccagtactttaatattagttttcttacaaattaatgtattttgcaatatttccagaaaatcactgtgggagaataatgtaatatactttaggatatatttcctgaccttttcttaaatggcttcatgtgctattcccccaaattctgctttctctattttcttttttatttaacctataattatactttctagtatattctgagtctatcttctaagccaccttacatttttcctggaacaagggagggaataaatagttgcctccactaaatcaggaaaaaataaaaatatcccaggggagctgtgattatgccaagagctctaaacagaagtttgagaaggtaaaaattaagttgtagtatctgagttgtttttattttcttcctttggtgtttatgaaggtattcataagaactttaatttcaggggaaaaaaatgcctgatttgctatttttgacatttcctcgtctcttaagaagtcagttaaatatgttttcatagtttatattcctgtttcatagattactgtgaaacatgtatttaaacctatgaattataaaatagtatttagattctagcgtgagttaaatagattagtcatatatcttttagatttgtggatttgacatgtaaattatgtgttgtgtataagtaagttagttactaaacatatggcatggttattgataaacttgttgctatttttttccaaatgctatcagtgtttgtggacttttaaaaattagtttgaattttggaatgttctgtgataaaatgtaatttcaactattttgtacatttaaatatgccatgttgtatatgtctgtatttaaaaatgttgtaaatacctgcattttaagaattatgaaagattttcctcaaaaatgacagaactctccatacttaattgtgacacattataagatatctgattttaagcttttggattttgttctaaaaattaagtttaaacatgctgaaaattccataaaaataaaattttg

SEQ ID NO: 156225 - DNA, 1890 bp, Homo sapiens
  Payload ID: 10654
  Gene Symbol: MYPOP
  Gene Name: Myb-related transcription factor, partner of profilin
  Uniprot ID: Q86VE0
  ENST ID: ENST00000322217
  CDS Start-End: 88-1287
cgagccctgacccaccggcggctgcggcggagccgcgccggcgccccccatgcgccagacggcaggacggcggcgtcggggggcgccatggcctcggcggcggcgggcgaagcggaggaaaccacccggttgcgcaagccgcgcttctcattcgaagagaaccagatcctgatccgcgaggtgcgcgcccactacccgcagctctacggcgcgcagagccgtcgggtgagcgtggcagagcggcggcgcgtgtgggacggcatcgccgccaagatcaacggtatcaccagctggaagcgcacgggccaggaggtgcagaagcgctggaacgacttcaagcgccgcaccaaggagaagctcgctcgcgtgccgcactccacgcagggcgccgggcccgccgcggaggacgctttctccgcggaagaggagaccatttttgccatcctggggccaggtgtggcggcgccgggggcaggtgctggggcggaggagccccctgcggccccctcttcacagccgccgcccccaagcgcctgccctcagcgctacgtgttgtcggaagaccgccgggaggaccgacgtgcagatacatcagcccacagcaaggcgggctccagcagcccggagccatgggcccggccctcctgcactccccaggaagggggctgcccacggcccaaggagcgtgagtcaccacccccttcggccctgcagccggtccagctgcctcgcctggccttgtctccaccacccccagcccctccactgccacccccaccgccactggcccaagtggcaccctcaccccctagccccccaccccctcctcggcctccacccacgctctcggcctcagacccctccctggacttcctgcgggcccagcaggagactgccaacgccatccgggagctggccggcacccttcgacagggactggccaaactgagcgaggccctcagcgctctgctgccccttctgccaggaaccccagttgactccctgcctccacctctgcccccacccccacccccaccgccacctcccaggcctgtcctgcccccaccggcccccaaggtggagatcaccccagagcccgtgtccgtggtggctgctgtggtggacggggcagtggtggcagccaggggagtgatcattgccccaaggagcgaggagggggcaccccggccccccccagccccgctccctccgcacgactcccccccacacaagcggagaaaaggtttccctacacggaaaaggcgcggccgatggaaatctccgtgaaatctactatctatgatcctgcctgcaacccctctccccagcttggcgcagtcgaggggggcgatgctctctgcccatcccagctgcaccctagctccctgctccagggatgtgagcacccactccctgtgctagttagtgcctgattctctggggggggcctcagtaatgggcccccccaacccctttctctggtacagtgctgtctgcctggctgcctcccttaaccctgacttctaagccatcaatttcatgttatttattattgccctatgtggggtggggagggaacctctcgggtctgcacatctccccttccctaacagttcctgttcttgacttgaagagaattgacccgtgggggactccccacctccccaacccagactttggagcgggtgggagttgtaagacaaatcaaaatacggatgacaaagaggatatagccgtgtataccccagggagaggaggcgccgagttctgatgggagaggtacaggttgggttctctgcctaccattgctgtctctgacttccagagctcaaccccctcctttctcccagtggtgacaagatatcaataaacttatttttaatacaatta

SEQ ID NO: 156226 - DNA, 897 bp, Homo sapiens
  Payload ID: 10655
  Gene Symbol: MAX
  Gene Name: MYC associated factor X
  Uniprot ID: P61244
  ENST ID: ENST00000246163
  CDS Start-End: 171-461
ggtggttcttgcccgtgttgtgtgtgtgtgtgagtgagagagcgagtgagtgagtgagtgagtgtgtgtgtgggggggactcggcttgttgttgtcggtgacttccccctccccttcaccccttcccctccccgccgccgctgcagtggccgctccctgggccgtaggaaatgagcgataacgatgacatcgaggtggagagcgacgaagagcaaccgaggtttcaatctgcggctgacaaacgggctcatcataatgcactggaacgaaaacgtagggaccacatcaaagacagctttcacagtttgcgggactcagtcccatcactccaaggagagaagctctatttcctcttttggaaattgtgtactcctgtccttcatcgtcaaagtttgatgcagaaatgccacaccttcatttcaagctaccaagtgcacaagaaaaaagaatgcaagatttaaaaaatgattgttttgaccccttacacaaatgtcttactcctggctttaattaagctgcttgagggctgatagctctgccttaccctggtaatcagcaaaatggtcctgtggctggggaggccctggcagcaggaagccttcaaggagccatgggtctgtgctgactctggccttacaaccttccagcctcctttgctggcattgatggggttccatttttgaatgaactagtttaatgtggatccaaatttattgtgcatattctttcgttttggttttcaaaagatggcttattcacatggaaatgtacaccagtttagccctgggccctccctttaccttcatatgtgtaaaagcttacacaggtttcagaaaataaatggtttcattttctctaaaataactagtacaaaataaaacagatgtcagttgttga

SEQ ID NO: 156227 - DNA, 3155 bp, Homo sapiens
  Payload ID: 10655
  Gene Symbol: MAX
  Gene Name: MYC associated factor X
  Uniprot ID: P61244
  ENST ID: ENST00000284165
  CDS Start-End: 150-554
gtgtgtgtgtgagtgagagagcgagtgagtgagtgagtgagtgtgtgtgtgggggggactcggcttgttgttgtcggtgacttccccctccccttcaccccttcccctccccgccgccgctgcagtggccgctccctgggccgtaggaaatgagcgataacgatgacatcgaggtggagagcgacgaagagcaaccgaggtttcaatctgcggctgacaaacgggctcatcataatgcactggaacgaaaacgtagggaccacatcaaagacagctttcacagtttgcgggactcagtcccatcactccaaggagagaaggcatcccgggcccaaatcctagacaaagccacagaatatatccagtatatgcgaaggaaaaaccacacacaccagcaagatattgacgacctcaagcggcagaatgctcttctggagcagcaaggtgagcacccgagctcgtggggcagctggccctgctgtgctccagccaggtcaggctttggcacctgggcctgcagagtcagagccagtcatggagtatgtgctcagtagcaggcttggtcctgcttcttggggcctgagtaactgagtgttagagccgtcctgaggaaggacctgaggcgccagtgaggagacagtggaagctaggaagttggacatctggagacttgtatcttttctggcctgacctctccccttcttggggctcaggtgctctgcctgcagtagggatcacacctggcatcaggtgtctgaaaagagctttgaggtccttggagtggaatgtgctgtgtaagtaccagagactccaggtgttcagggacagtgagccctccccattgtcaatggtagtccaatcagggcagcctatgggctaggcccatgctgttctcaatgctcacacccgccttttcctacaaccacaggggaaagcgagagctgatcaagttctttgttcctggggaattcacttctcttcctccctcatggaagatgcaagtaaaaggaaatgcaagtaaccacctgggttagaaaacctcaaataaaataaaataaaataaattaaatgggttgaccttccaggctcaagctgagctgaaccaagggatgggcagtgggtggtgtcagtgggttggttactgggccaggcagcctgcatgtaggggctatttgaaaagcccaggtattttatgtgtattggtgacttgcttccaagtgtccagcttgtcattccaagtggatcttgtacacgagagctaagccaaaactgttctttggctgatacgtcttatgtcatcctttcctgctgttgtgtggcctcacaccttgtggagcctcatgctcctgggccagcttctcctctgttattgcactgctgaatcccacagggagctcacgctccagtctctccacggggcttccacggcaggacggtgacatcacaagccttctcttcagagttgggtgggattgcagagtgtctgctggctcccaggtccagctgggaaaggcgggagggaaatgaagtgtgtgagtgaacagccacccgaagggagctacttctgagcatcttgagcctcgggggccaacaagcaagcccttaggaagaacaggctggaccctgagtctgagactcggttactccccaagtctccagaaggcagtaacacactcccttggttgccttttagtccgtgcactggagaaggcgaggtcaagtgcccaactgcagaccaactacccctcctcagacaacagcctctacaccaacgccaagggcagcaccatctctgccttcgatgggggctcggactccagctcggagtctgagcctgaagagccccaaagcaggaagaagctccggatggaggccagctaagccactcggggcaggccagcaataaaaactgtctgtctccatcgtctcatcctcctttcagttcgttggtagagccctcagaaccatttaagagactctttatttttctctttctcccttttttttttaaatttttatttttacgtagaagctcttggacaacagctctcgttctccttccccatttccactgtatattttttaatgtattcccttcagggattccctgtccccaacaggaatttttaaaccaaaacaccccaacttggcagctttttctgtggaggacagacggccggccggacctctgagcacatagtgtcctgcccaccctaccagctcctccagccctgccgggcacatgcccgggggacgcctgccctgcccaggtggcctcctggcccgccctcacctctgatagactttgtgaatctgaactgctctactttgagaagatgaccggtttggagtaatcagaatgaaccctcctcctttttaagggttttttttttttcctttttctaaaaagctatgtatcgctcctattgaaagaccagatccttagagaagtttgtggtataaaaaggaagtggggacagattcgcagcacagagtcgctggcatgtttcactcctgcttctctcagccagctgtttaagcctgcggcgccagcctcacggagggccgtgtgacactctcgtggtatgtatgggagatggcagcagtgaagcagcagccaccagggagtggccatttggggttgggacagggagggtgttttgggtggcatagaggttttgtattgagggccagtgatgatgttttgatatttatttcctgctacttaaatttgaatctgagtgaattgtacctatttctgatgatgtcggtcttgcaaagcgacagattcataaagtaatgatgaaatctttctttcttcccgtgtgtatttctaagaaatagagccaactgattttgtatgtaaataccaagagcaatttacctggtactaaacccgcaccccagtgcggacccttcccagccctcatcccacttcctttcctactgtcctggaacctgtctccattgtgtgatccagccctggttctggctgtggtcagcagatgccagtgaagggttttgtgtgtttaggcctcatttctttgtctttttcctactccgttcctggcatttgctgatttctagtgtatactctgtagtctcagttcgtgtttgattccattccatggaaataaaaagtatgttgtacatac

SEQ ID NO: 156228 - DNA, 330 bp, Homo sapiens
  Payload ID: 10655
  Gene Symbol: MAX
  Gene Name: MYC associated factor X
  Uniprot ID: P61244
  ENST ID: ENST00000341653
  CDS Start-End: 49-300
ttcccctccccgccgccgctgcagtggccgctccctgggccgtaggaaatgagcgataacgatgacatcgaggtggagagcgacgaagagcaaccgaggtttcaatctgcggctgacaaacgggctcatcataatgcactggaacgaaaacgtagggaccacatcaaagacagctttcacagtttgcgggactcagtcccatcactccaaggagagaagggaacaaagatgaagttaaccctcccacctgtctttccttatgaacacttgccttttccaactgttttctgccatggctaatcagaaaaagtttcttaaggaaatggtggc

SEQ ID NO: 156229 - DNA, 1973 bp, Homo sapiens
  Payload ID: 10655
  Gene Symbol: MAX
  Gene Name: MYC associated factor X
  Uniprot ID: P61244
  ENST ID: ENST00000358402
  CDS Start-End: 166-621
ttcttgcccgtgttgtgtgtgtgtgtgagtgagagagcgagtgagtgagtgagtgagtgtgtgtgtgggggggactcggcttgttgttgtcggtgacttccccctccccttcaccccttcccctccccgccgccgctgcagtggccgctccctgggccgtaggaaatgagcgataacgatgacatcgaggtggagagcgacgctgacaaacgggctcatcataatgcactggaacgaaaacgtagggaccacatcaaagacagctttcacagtttgcgggactcagtcccatcactccaaggagagaaggcatcccgggcccaaatcctagacaaagccacagaatatatccagtatatgcgaaggaaaaaccacacacaccagcaagatattgacgacctcaagcggcagaatgctcttctggagcagcaagtccgtgcactggagaaggcgaggtcaagtgcccaactgcagaccaactacccctcctcagacaacagcctctacaccaacgccaagggcagcaccatctctgccttcgatgggggctcggactccagctcggagtctgagcctgaagagccccaaagcaggaagaagctccggatggaggccagctaagccactcggggcaggccagcaataaaaactgtctgtctccatcgtctcatcctcctttcagttcgttggtagagccctcagaaccatttaagagactctttatttttctctttctcccttttttttttaaatttttatttttacgtagaagctcttggacaacagctctcgttctccttccccatttccactgtatattttttaatgtattcccttcagggattccctgtccccaacaggaatttttaaaccaaaacaccccaacttggcagctttttctgtggaggacagacggccggccggacctctgagcacatagtgtcctgcccaccctaccagctcctccagccctgccgggcacatgcccgggggacgcctgccctgcccaggtggcctcctggcccgccctcacctctgatagactttgtgaatctgaactgctctactttgagaagatgaccggtttggagtaatcagaatgaaccctcctcctttttaagggttttttttttttcctttttctaaaaagctatgtatcgctcctattgaaagaccagatccttagagaagtttgtggtataaaaaggaagtggggacagattcgcagcacagagtcgctggcatgtttcactcctgcttctctcagccagctgtttaagcctgcggcgccagcctcacggagggccgtgtgacactctcgtggtatgtatgggagatggcagcagtgaagcagcagccaccagggagtggccatttggggttgggacagggagggtgttttgggtggcatagaggttttgtattgagggccagtgatgatgttttgatatttatttcctgctacttaaatttgaatctgagtgaattgtacctatttctgatgatgtcggtcttgcaaagcgacagattcataaagtaatgatgaaatctttctttcttcccgtgtgtatttctaagaaatagagccaactgattttgtatgtaaataccaagagcaatttacctggtactaaacccgcaccccagtgcggacccttcccagccctcatcccacttcctttcctactgtcctggaacctgtctccattgtgtgatccagccctggttctggctgtggtcagcagatgccagtgaagggttttgtgtgtttaggcctcatttctttgtctttttcctactccgttcctggcatttgctgatttctagtgtatactctgtagtctcagttcgtgtttgattccattccatggaaataaaaagtatgttgtacatactgccgaagaattgtcttgcaagttaaggcttccccctttactataagactataaataaaaacttattttatccttctt

SEQ ID NO: 156230 - DNA, 1546 bp, Homo sapiens
  Payload ID: 10655
  Gene Symbol: MAX
  Gene Name: MYC associated factor X
  Uniprot ID: P61244
  ENST ID: ENST00000358664
  CDS Start-End: 132-614
gagcgagtgagtgagtgagtgagtgtgtgtgtgggggggactcggcttgttgttgtcggtgacttccccctccccttcaccccttcccctccccgccgccgctgcagtggccgctccctgggccgtaggaaatgagcgataacgatgacatcgaggtggagagcgacgaagagcaaccgaggtttcaatctgcggctgacaaacgggctcatcataatgcactggaacgaaaacgtagggaccacatcaaagacagctttcacagtttgcgggactcagtcccatcactccaaggagagaaggcatcccgggcccaaatcctagacaaagccacagaatatatccagtatatgcgaaggaaaaaccacacacaccagcaagatattgacgacctcaagcggcagaatgctcttctggagcagcaagtccgtgcactggagaaggcgaggtcaagtgcccaactgcagaccaactacccctcctcagacaacagcctctacaccaacgccaagggcagcaccatctctgccttcgatgggggctcggactccagctcggagtctgagcctgaagagccccaaagcaggaagaagctccggatggaggccagctaagccactcggggcaggccagcaataaaaactgtctgtctccatcgtctcatcctcctttcagttcgttggtagagccctcagaaccatttaagagactctttatttttctctttctcccttttttttttaaatttttatttttacgtagaagctcttggacaacagctctcgttctccttccccatttccactgtatattttttaatgtattcccttcagggattccctgtccccaacaggaatttttaaaccaaaacaccccaacttggcagctttttctgtggaggacagacggccggccggacctctgagcacatagtgtcctgcccaccctaccagctcctccagccctgccgggcacatgcccgggggacgcctgccctgcccaggtggcctcctggcccgccctcacctctgatagactttgtgaatctgaactgctctactttgagaagatgaccggtttggagtaatcagaatgaaccctcctcctttttaagggttttttttttttcctttttctaaaaagctatgtatcgctcctattgaaagaccagatccttagagaagtttgtggtataaaaaggaagtggggacagattcgcagcacagagtcgctggcatgtttcactcctgcttctctcagccagctgtttaagcctgcggcgccagcctcacggagggccgtgtgacactctcgtggtatgtatgggagatggcagcagtgaagcagcagccaccagggagtggccatttggggttgggacagggagggtgttttgggtggcatagaggttttgtattgagggccagtgatgatgttttgatatttatttcctgctacttaaatttgaatctgagtgaattgtacctatttctgatgatgtcggtcttgcaaagcgacagattcataaagtaatgatgaaatcttt

SEQ ID NO: 156231 - DNA, 2097 bp, Homo sapiens
  Payload ID: 10655
  Gene Symbol: MAX
  Gene Name: MYC associated factor X
  Uniprot ID: P61244
  ENST ID: ENST00000394606
  CDS Start-End: 181-492
gcagtgaggaggtggttcttgcccgtgttgtgtgtgtgtgtgagtgagagagcgagtgagtgagtgagtgagtgtgtgtgtgggggggactcggcttgttgttgtcggtgacttccccctccccttcaccccttcccctccccgccgccgctgcagtggccgctccctgggccgtaggaaatgagcgataacgatgacatcgaggtggagagcgacgaagagcaaccgaggtttcaatctgcggctgacaaacgggctcatcataatgcactggaacgaaaacgtagggaccacatcaaagacagctttcacagtttgcgggactcagtcccatcactccaaggagagaaggcatcccgggcccaaatcctagacaaagccacagaatatatccagtatatgcgaaggaaaaaccacacacaccagcaagatattgacgacctcaagcggcagaatgctcttctggagcagcaaggggaaagcgagagctgatcaagttctttgttcctggggaattcacttctcttcctccctcatggaagatgcaagtaaaaggaaattccgtgcactggagaaggcgaggtcaagtgcccaactgcagaccaactacccctcctcagacaacagcctctacaccaacgccaagggcagcaccatctctgccttcgatgggggctcggactccagctcggagtctgagcctgaagagccccaaagcaggaagaagctccggatggaggccagctaagccactcggggcaggccagcaataaaaactgtctgtctccatcgtctcatcctcctttcagttcgttggtagagccctcagaaccatttaagagactctttatttttctctttctcccttttttttttaaatttttatttttacgtagaagctcttggacaacagctctcgttctccttccccatttccactgtatattttttaatgtattcccttcagggattccctgtccccaacaggaatttttaaaccaaaacaccccaacttggcagctttttctgtggaggacagacggccggccggacctctgagcacatagtgtcctgcccaccctaccagctcctccagccctgccgggcacatgcccgggggacgcctgccctgcccaggtggcctcctggcccgccctcacctctgatagactttgtgaatctgaactgctctactttgagaagatgaccggtttggagtaatcagaatgaaccctcctcctttttaagggttttttttttttcctttttctaaaaagctatgtatcgctcctattgaaagaccagatccttagagaagtttgtggtataaaaaggaagtggggacagattcgcagcacagagtcgctggcatgtttcactcctgcttctctcagccagctgtttaagcctgcggcgccagcctcacggagggccgtgtgacactctcgtggtatgtatgggagatggcagcagtgaagcagcagccaccagggagtggccatttggggttgggacagggagggtgttttgggtggcatagaggttttgtattgagggccagtgatgatgttttgatatttatttcctgctacttaaatttgaatctgagtgaattgtacctatttctgatgatgtcggtcttgcaaagcgacagattcataaagtaatgatgaaatctttctttcttcccgtgtgtatttctaagaaatagagccaactgattttgtatgtaaataccaagagcaatttacctggtactaaacccgcaccccagtgcggacccttcccagccctcatcccacttcctttcctactgtcctggaacctgtctccattgtgtgatccagccctggttctggctgtggtcagcagatgccagtgaagggttttgtgtgtttaggcctcatttctttgtctttttcctactccgttcctggcatttgctgatttctagtgtatactctgtagtctcagttcgtgtttgattccattccatggaaataaaaagtatgttgtacatactgccgaagaattgtcttgcaagttaaggcttccccctttactataagactataaataaaaacttattttatcctt

SEQ ID NO: 156232 - DNA, 1673 bp, Homo sapiens
  Payload ID: 10655
  Gene Symbol: MAX
  Gene Name: MYC associated factor X
  ENST ID: ENST00000555932
  CDS Start-End: 132-380
gagcgagtgagtgagtgagtgagtgtgtgtgtgggggggactcggcttgttgttgtcggtgacttccccctccccttcaccccttcccctccccgccgccgctgcagtggccgctccctgggccgtaggaaatgagcgataacgatgacatcgaggtggagagcgactccgtgcactggagaaggcgaggtcaagtgcccaactgcagaccaactacccctcctcagacaacagcctctacaccaacgccaagggcagcaccatctctgccttcgatgggggctcggactccagctcggagtctgagcctgaagagccccaaagcaggaagaagctccggatggaggccagctaagccactcggggcaggccagcaataaaaactgtctgtctccatcgtctcatcctcctttcagttcgttggtagagccctcagaaccatttaagagactctttatttttctctttctcccttttttttttaaatttttatttttacgtagaagctcttggacaacagctctcgttctccttccccatttccactgtatattttttaatgtattcccttcagggattccctgtccccaacaggaatttttaaaccaaaacaccccaacttggcagctttttctgtggaggacagacggccggccggacctctgagcacatagtgtcctgcccaccctaccagctcctccagccctgccgggcacatgcccgggggacgcctgccctgcccaggtggcctcctggcccgccctcacctctgatagactttgtgaatctgaactgctctactttgagaagatgaccggtttggagtaatcagaatgaaccctcctcctttttaagggttttttttttttcctttttctaaaaagctatgtatcgctcctattgaaagaccagatccttagagaagtttgtggtataaaaaggaagtggggacagattcgcagcacagagtcgctggcatgtttcactcctgcttctctcagccagctgtttaagcctgcggcgccagcctcacggagggccgtgtgacactctcgtggtatgtatgggagatggcagcagtgaagcagcagccaccagggagtggccatttggggttgggacagggagggtgttttgggtggcatagaggttttgtattgagggccagtgatgatgttttgatatttatttcctgctacttaaatttgaatctgagtgaattgtacctatttctgatgatgtcggtcttgcaaagcgacagattcataaagtaatgatgaaatctttctttcttcccgtgtgtatttctaagaaatagagccaactgattttgtatgtaaataccaagagcaatttacctggtactaaacccgcaccccagtgcggacccttcccagccctcatcccacttcctttcctactgtcctggaacctgtctccattgtgtgatccagccctggttctggctgtggtcagcagatgccagtgaagggttttgtgtgtttaggcctcatttctttgtctttttcctactccgttcctggcatttgctgatttctagtgtatactctgtagtctcagttcgtgtttgattccattccatggaaataaaaagtatgttgtacatactgccgaagaattgtcttgcaagttaaggcttccccctttactat

SEQ ID NO: 156233 - DNA, 585 bp, Homo sapiens
  Payload ID: 10655
  Gene Symbol: MAX
  Gene Name: MYC associated factor X
  ENST ID: ENST00000556443
  CDS Start-End: 179-556
agtgaggaggtggttcttgcccgtgttgtgtgtgtgtgtgagtgagagagcgagtgagtgagtgagtgagtgtgtgtgtgggggggactcggcttgttgttgtcggtgacttccccctccccttcaccccttcccctccccgccgccgctgcagtggccgctccctgggccgtaggaaatgagcgataacgatgacatcgaggtggagagcgacgctgacaaacgggctcatcataatgcactggaacgaaaacgtagggaccacatcaaagacagctttcacagtttgcgggactcagtcccatcactccaaggagagaaggcatcccgggcccaaatcctagacaaagccacagaatatatccagtatatgcgaaggaaaaaccacacacaccagcaagatattgacgacctcaagcggcagaatgctcttctggagcagcaaggtgagcacccgagctcgtggggcagctggccctgctgtgctccagccaggtcaggctttggcacctgggcctgcagagtcagagccagtcatggagtatgtgctcagtagcaggcttggtcctgcttcttggggcctga

SEQ ID NO: 156234 - DNA, 728 bp, Homo sapiens
  Payload ID: 10655
  Gene Symbol: MAX
  Gene Name: MYC associated factor X
  ENST ID: ENST00000557277
  CDS Start-End: 421-714
cgggctggcgtcgcctggatgcggtttcttccgggatttgtagtttttctggagctacccgggccgtctgttagagggacaagaactacaagtctcggctgccccagcgctgcgagcctggtcacgtggcgggggccgaccgggcgtgcgtgccgccgttgatccggtgctgcagtgaggaggaagagcaaccgaggtttcaatctgcggctgacaaacgggctcatcataatgcactggaacgaaaacgtagggaccacatcaaagacagctttcacagtttgcgggactcagtcccatcactccaaggagagaaggcatcccgggcccaaatcctagacaaagccacagaatatatccagtatatgcgaaggaaaaaccacacacaccagcaagatattgacgacctcaagcggcagaatgctcttctggagcagcaaggggaaagcgagagctgatcaagttctttgttcctggggaattcacttctcttcctccctcatggaagatgcaagtaaaaggaaattccgtgcactggagaaggcgaggtcaagtgcccaactgcagaccaactacccctcctcagacaacagcctctacaccaacgccaagggcagcaccatctctgccttcgatgggggctcggactccagctcggagtctgagcctgaagagccccaaagcaggaagaagctccggatggaggccagctaagccactcggggcag

SEQ ID NO: 156235 - DNA, 623 bp, Homo sapiens
  Payload ID: 10655
  Gene Symbol: MAX
  Gene Name: MYC associated factor X
  Uniprot ID: P61244
  ENST ID: ENST00000553928
  CDS Start-End: 22-333
ccgctccctgggccgtaggaaatgagcgataacgatgacatcgaggtggagagcgacgaagagcaaccgaggtttcaatctgcggctgacaaacgggctcatcataatgcactggaacgaaaacgtagggaccacatcaaagacagctttcacagtttgcgggactcagtcccatcactccaaggagagaaggcatcccgggcccaaatcctagacaaagccacagaatatatccagtatatgcgaaggaaaaaccacacacaccagcaagatattgacgacctcaagcggcagaatgctcttctggagcagcaaggggaaagcgagagctgatcaagttctttgttcctggggaattcacttctcttcctccctcatggaagatgcaagtaaaaggaaatgcaagtaaccacctggtccgtgcactggagaaggcgaggtcaagtgcccaactgcagaccaactacccctcctcagacaacagcctctacaccaacgccaagggcagcaccatctctgccttcgatgggggctcggactccagctcggagtctgagcctgaagagccccaaagcaggaagaagctccggatggaggccagctaagccactcggggcaggcca

SEQ ID NO: 156236 - DNA, 571 bp, Homo sapiens
  Payload ID: 10655
  Gene Symbol: MAX
  Gene Name: MYC associated factor X
  ENST ID: ENST00000557746
  CDS Start-End: 179-544
agtgaggaggtggttcttgcccgtgttgtgtgtgtgtgtgagtgagagagcgagtgagtgagtgagtgagtgtgtgtgtgggggggactcggcttgttgttgtcggtgacttccccctccccttcaccccttcccctccccgccgccgctgcagtggccgctccctgggccgtaggaaatgagcgataacgatgacatcgaggtggagagcgacgctgacaaacgggctcatcataatgcactggaacgaaaacgtagggaccacatcaaagacagctttcacagtttgcgggactcagtcccatcactccaaggagagaaggcatcccgggcccaaatcctagacaaagccacagaatatatccagtatatgcgaaggaaaaaccacacacaccagcaagatattgacgacctcaagcggcagaatgctcttctggagcagcaaggtgctctgcctgcagtagggatcacacctggcatcaggtgtctgaaaagagctttgaggtccttggagtggaatgtgctgtgggaaagcgagagctgatcaagttctttgttcctggggaattca

SEQ ID NO: 156237 - DNA, 474 bp, Homo sapiens
  Payload ID: 10655
  Gene Symbol: MAX
  Gene Name: MYC associated factor X
  ENST ID: ENST00000556892
  CDS Start-End: 344-474
caagccgggctggcgtcgcctggatgcggtttcttccgggatttgtagtttttctggagctacccgggccgtctgttagagggacaagaactacaagtctcggctgccccagcgctgcgagcctggtcacgtggcgggggccgaccgggcgtgcgtgccgccgttgatccggtgctgcagtgaggaggctgacaaacgggctcatcataatgcactggaacgaaaacgtagggaccacatcaaagacagctttcacagtttgcgggactcagtcccatcactccaaggagagaaggcatcccgggcccaaatcctagacaaagccacagaatatatccagtatatgcgaaggaaaaaccacacacaccagcaagatattgacgacctcaagcggcagaatgctcttctggagcagcaagtccgtgcactggagaaggcgaggtcaagtgcccaactgcagaccaactacccctc

SEQ ID NO: 156238 - DNA, 574 bp, Homo sapiens
  Payload ID: 10655
  Gene Symbol: MAX
  Gene Name: MYC associated factor X
  ENST ID: ENST00000555667
  CDS Start-End: 179-463
agtgaggaggtggttcttgcccgtgttgtgtgtgtgtgtgagtgagagagcgagtgagtgagtgagtgagtgtgtgtgtgggggggactcggcttgttgttgtcggtgacttccccctccccttcaccccttcccctccccgccgccgctgcagtggccgctccctgggccgtaggaaatgagcgataacgatgacatcgaggtggagagcgacgctgacaaacgggctcatcataatgcactggaacgaaaacgtagggaccacatcaaagacagctttcacagtttgcgggactcagtcccatcactccaaggagagaaggcatcccgggcccaaatcctagacaaagccacagaatatatccagtatatgcgaaggaaaaaccacacacaccagcaagatattgacgacctcaagcggcagaatgctcttctggagcagcaaggggaaagcgagagctgatcaagttctttgttcctggggaattcacttctcttcctccctcatggaagatgcaagtaaaaggaaatgcaagtaaccacctgggttagaaaacctcaaataaaataaaat

SEQ ID NO: 156239 - DNA, 615 bp, Homo sapiens
  Payload ID: 10655
  Gene Symbol: MAX
  Gene Name: MYC associated factor X
  Uniprot ID: P61244
  ENST ID: ENST00000556979
  CDS Start-End: 179-490
agtgaggaggtggttcttgcccgtgttgtgtgtgtgtgtgagtgagagagcgagtgagtgagtgagtgagtgtgtgtgtgggggggactcggcttgttgttgtcggtgacttccccctccccttcaccccttcccctccccgccgccgctgcagtggccgctccctgggccgtaggaaatgagcgataacgatgacatcgaggtggagagcgacgaagagcaaccgaggtttcaatctgcggctgacaaacgggctcatcataatgcactggaacgaaaacgtagggaccacatcaaagacagctttcacagtttgcgggactcagtcccatcactccaaggagagaaggcatcccgggcccaaatcctagacaaagccacagaatatatccagtatatgcgaaggaaaaaccacacacaccagcaagatattgacgacctcaagcggcagaatgctcttctggagcagcaaggggaaagcgagagctgatcaagttctttgttcctggggaattcacttctcttcctccctcatggaagatgcaagtaaaaggaaatgcaagtaaccacctgggttagaaaacctcaaataaaataaaataaaataaattaaat

SEQ ID NO: 156240 - DNA, 765 bp, Homo sapiens
  Payload ID: 10655
  Gene Symbol: MAX
  Gene Name: MYC associated factor X
  ENST ID: ENST00000555419
  CDS Start-End: 1-375
atgagcgataacgatgacatcgaggtggagagcgacgaagagcaaccgaggtttcaatctgcggcatcccgggcccaaatcctagacaaagccacagaatatatccagtatatgcgaaggaaaaaccacacacaccagcaagatattgacgacctcaagcggcagaatgctcttctggagcagcaagtccgtgcactggagaaggcgaggtcaagtgcccaactgcagaccaactacccctcctcagacaacagcctctacaccaacgccaagggcagcaccatctctgccttcgatgggggctcggactccagctcggagtctgagcctgaagagccccaaagcaggaagaagctccggatggaggccagctaagccactcggggcaggccagcaataaaaactgtctgtctccatcgtctcatcctcctttcagttcgttggtagagccctcagaaccatttaagagactctttatttttctctttctcccttttttttttaaatttttatttttacgtagaagctcttggacaacagctctcgttctccttccccatttccactgtatattttttaatgtattcccttcagggattccctgtccccaacaggaatttttaaaccaaaacaccccaacttggcagctttttctgtggaggacagacggccggccggacctctgagcacatagtgtcctgcccaccctaccagctcctccagccctgccgggcacatgcccgggggacgcctgccctgcccagg

SEQ ID NO: 156241 - DNA, 2141 bp, Homo sapiens
  Payload ID: 10655
  Gene Symbol: MAX
  Gene Name: MYC associated factor X
  Uniprot ID: P61244
  ENST ID: ENST00000618858
  CDS Start-End: 206-517
tgcgtgccgccgttgatccggtgctgcagtgaggaggtggttcttgcccgtgttgtgtgtgtgtgtgagtgagagagcgagtgagtgagtgagtgagtgtgtgtgtgggggggactcggcttgttgttgtcggtgacttccccctccccttcaccccttcccctccccgccgccgctgcagtggccgctccctgggccgtaggaaatgagcgataacgatgacatcgaggtggagagcgacgaagagcaaccgaggtttcaatctgcggctgacaaacgggctcatcataatgcactggaacgaaaacgtagggaccacatcaaagacagctttcacagtttgcgggactcagtcccatcactccaaggagagaaggcatcccgggcccaaatcctagacaaagccacagaatatatccagtatatgcgaaggaaaaaccacacacaccagcaagatattgacgacctcaagcggcagaatgctcttctggagcagcaaggggaaagcgagagctgatcaagttctttgttcctggggaattcacttctcttcctccctcatggaagatgcaagtaaaaggaaatgcaagtaaccacctggtccgtgcactggagaaggcgaggtcaagtgcccaactgcagaccaactacccctcctcagacaacagcctctacaccaacgccaagggcagcaccatctctgccttcgatgggggctcggactccagctcggagtctgagcctgaagagccccaaagcaggaagaagctccggatggaggccagctaagccactcggggcaggccagcaataaaaactgtctgtctccatcgtctcatcctcctttcagttcgttggtagagccctcagaaccatttaagagactctttatttttctctttctcccttttttttttaaatttttatttttacgtagaagctcttggacaacagctctcgttctccttccccatttccactgtatattttttaatgtattcccttcagggattccctgtccccaacaggaatttttaaaccaaaacaccccaacttggcagctttttctgtggaggacagacggccggccggacctctgagcacatagtgtcctgcccaccctaccagctcctccagccctgccgggcacatgcccgggggacgcctgccctgcccaggtggcctcctggcccgccctcacctctgatagactttgtgaatctgaactgctctactttgagaagatgaccggtttggagtaatcagaatgaaccctcctcctttttaagggttttttttttttcctttttctaaaaagctatgtatcgctcctattgaaagaccagatccttagagaagtttgtggtataaaaaggaagtggggacagattcgcagcacagagtcgctggcatgtttcactcctgcttctctcagccagctgtttaagcctgcggcgccagcctcacggagggccgtgtgacactctcgtggtatgtatgggagatggcagcagtgaagcagcagccaccagggagtggccatttggggttgggacagggagggtgttttgggtggcatagaggttttgtattgagggccagtgatgatgttttgatatttatttcctgctacttaaatttgaatctgagtgaattgtacctatttctgatgatgtcggtcttgcaaagcgacagattcataaagtaatgatgaaatctttctttcttcccgtgtgtatttctaagaaatagagccaactgattttgtatgtaaataccaagagcaatttacctggtactaaacccgcaccccagtgcggacccttcccagccctcatcccacttcctttcctactgtcctggaacctgtctccattgtgtgatccagccctggttctggctgtggtcagcagatgccagtgaagggttttgtgtgtttaggcctcatttctttgtctttttcctactccgttcctggcatttgctgatttctagtgtatactctgtagtctcagttcgtgtttgattccattccatggaaataaaaagtatgttgtacatactgccgaagaattgtcttgcaagttaaggcttccccctttactataagactataaataaaaacttattttatccttctt

SEQ ID NO: 156242 - DNA, 2818 bp, Homo sapiens
  Payload ID: 10656
  Gene Symbol: MYCBP
  Gene Name: MYC binding protein
  Uniprot ID: Q99417
  ENST ID: ENST00000397572
  CDS Start-End: 801-1112
cacatgttgctacctagtaaataaaatcttaagaagatccgtggctttccttcaccagttcatagcatcgtgattcattgcccggattggactcgactctactcactggacatctaaccactccacttaattaacaatacccaccctacaggggtgttgtaaggattaaaatttaaaatacccgtgttttctacagtgcctggctcaaaagctactgcaagctcgttactgctcatcctccagaggcccacatcaagtcagccacgactcaaggagactccaaagataaaagctgaagccaaaatatatgattctaaacaccctcctcggctactgcaaagcactgtgagcactttctcaggacgagagccaagaagcccagcacctatgggtcaccacagtttccgaggtcccagatgaaaaagatgcgctcgctaccaccgtgcggcggtcctttctctcgcaatagtctcaatgctcccgggccctgcctccggacgccaggacagaggtaccaaaatctcacctcctgcaaagaaacctaattgctacgggggccggaagaggaagaggtgcggctccgacagccagaggggcgggcatacgcagcctccctcggctcagcctgctactggggatgcagagcgtcctggtcgccatgaaaacaggccacacctcggcgatcccggccggtggtttgcaagtgcgcaggcgcgcgcccccttccgcgcatgagcagtgctgctcccaacccgccagtcgcggtctccggcgccagctacgccgctgccgctgtcactatggcccattacaaagccgccgactcgaagcgtgagcagttccggaggtacttggagaagtcgggggtgctggacacgctgaccaaggtgttggtagccttatatgaagaaccagagaaacctaacagtgctttggattttttaaagcatcacttaggagctgctactccagaaaatccagaaatagagctgcttcgcctagaactggccgaaatgaaagagaagtatgaagctattgtagaagaaaataaaaaactgaaagcaaagcttgctcagtatgaaccacctcaggaggagaagcgtgctgaataggattcttctcagtttgaaagacaatgaaaaatggttttgtatgacttgaatagtttgtatagtatataatcttttctgaacagatgctatagaactcttttaatatgtttaattcacctatcacactctgttaaaaacacatagaatcatcaataaaaactcaatataactttctttgggtcttaaagcaggagaatccaaagtaaatcctgaacaaaacctaaacacagccatctaactcattaccttaaaagacattctgtttattagtctgattaggaatgatggcactggttgtattttagccaagacagtttagcatggagctattccttggtgcagttcaggatatgaacacaggtacagtcattctttgaaggtgacactgttctgtatattccctataggcagctggagagatctgtgtgacacaagatgcttttgtacgggttcccatgaatcttctgctcttgtttgtgtgacatggaacaaataacttctttgccaccactttgccttagataactgtgtgtgtgtgtgccagtttgaactctgacaccacattttccttctatgcaatcatgcctgtctgataatcttgcattgctttcctctgagctttagtgggtcctagttgcacactggcctttctgtgctgtttttcaatttgcctaataatagcagttaccctgattgtaatttatgtaactttaaacaggatcacactgtaccccctgcctgccttatttgcttactgagcacaggacagaggcaatatacaactctgggttcacacacaagctgagatgagaagaggaatgagccatatattggggaaaatcatagtttgtaggtataattatatagtgcttttctccctcaaagtatttttctagccttgaattcattttatcttcattatccctgtgaagtaggtgggacaagtataaggggaagaggggtgctgaatttttaggccaaagactgatattaatacaaatcactcactaactgtagagccttgggcattatcagtgaactactctgagatttactgtcttcatctgtttaatgagtagaatgtccgtgatgcctacctcacagggttgttgtgagggtcaaatgagaatgtatgtgaaagatttgtaaatggtaaagcactatattcttgtttgttagtcctttttcctttctttgggtagacctacagtcagatgttttgttttatggatcacttattttccttactggtagactgtcgttttatagacatattcctatttcatatattctctccctgttgttagagaacctatctttgtttttggtcaaaacacacatagaaaacaaaatgatccaatgaaaactggtttaactagcaaaagccttggcacctgttggagactatgaccaagccaataaaaagggcatttaaatcagccctgttagtaggaatgtggctatggctggtgcctcttctagtcacaagtttgtttttggagggggtccagaagatcattcccttgcatagatttctcttttaccaatttgagtgcctcctacatgggcagcagtggactaagtgctgggtgtgataaagaggaatgacttaattatgagactgtatataatcaaatacagtgtgggttaggacctgtggcagaccattataataaagcatggccccgtgagggttttgaaagaga

SEQ ID NO: 156243 - DNA, 750 bp, Homo sapiens
  Payload ID: 10656
  Gene Symbol: MYCBP
  Gene Name: MYC binding protein
  ENST ID: ENST00000494695
  CDS Start-End: 64-234
agtgctgctcccaacccgccagtcgcggtctccggcgccagctacgccgctgccgctgtcactatggcccattacaaagccgccgactcgaagcgtgagcagttccggaggtacttggagaagtcgggggtgctggacacgctgaccaaggcatcacttaggagctgctactccagaaaatccagaaatagagctgcttcgcctagaactggccgaaatgaaagagaagtatgaagctattgtagaagaaaataaaaaactgaaagcaaagcttgctcagtatgaaccacctcaggaggagaagcgtgctgaataggattcttctcagtttgaaagacaatgaaaaatggttttgtatgacttgaatagtttgtatagtatataatcttttctgaacagatgctatagaactcttttaatatgtttaattcacctatcacactctgttaaaaacacatagaatcatcaataaaaactcaatataactttctttgggtcttaaagcaggagaatccaaagtaaatcctgaacaaaacctaaacacagccatctaactcattaccttaaaagacattctgtttattagtctgattaggaatgatggcactggttgtattttagccaagacagtttagcatggagctattccttggtgcagttcaggatatgaacacaggtacagtcattctttgaaggtgacactgttctgtatattccctataggcagctggagagatctgtgtgacacaa

SEQ ID NO: 156244 - DNA, 14736 bp, Homo sapiens
  Payload ID: 10657
  Gene Symbol: MYCBP2
  Gene Name: MYC binding protein 2, E3 ubiquitin protein ligase
  Uniprot ID: O75592
  ENST ID: ENST00000357337
  CDS Start-End: 94-14016
ggcggcggcagtggcggcaccgcctcctcctcacattcccggggtggcggggttagatgagcggccccagtagcggcgccgggggcgctgttcatgccggttcccgacggctccgtggctgctgcggggctggggctggggctacccgccgcggactcccggggtcactaccagctgctgctgtcaggccgggccctggccgaccgctaccggaggatttataccgctgcgctcaatgacagggaccaggggggcggcagcgctggacacccagcctccaggaataagaaaattttaaataagaagaaattgaaaagaaaacagaagagcaaatcaaaagtgaagacaagaagcaagtctgaaaacttagagaatacagtaatcataccagatatcaaactacatagcaatccttctgctttcaatatttactgtaatgtacgccattgcgttctggaatggcagaaaaaggaaatatcattggcagccgcatctaagaactctgtgcagagtggagaatcagatagtgatgaagaagaggaatccaaagagccccctatcaagcttccaaagattattgaggttggcctttgtgaagtttttgaattgatcaaagagacacgattttctcatccatccctgtgtctcaggagtctccaagccctgctcaacgtgctgcagggccagcagccagaaggcctccagtctgagccacctgaggtcctagagtctctcttccagcttcttttggaaatcaccgttcgaagtactgggatgaatgacagcacaggacagtccttaacagcactttcctgtgcttgcctctttagtctggtggcttcttggggagaaacaggaaggacacttcaggccatctctgctatcctcaccaacaatggaagccatgcttgccaaactattcaggtgccaacaattctaaattcgctacagagaagtgtacaagcagttttggtgggaaaaattcaaattcaggactggtttagtaatggcattaagaaagcagctttaatgcacaagtggccattaaaagaaatatctgttgatgaagatgaccaatgtctacttcagaatgatggattttttctttatctattatgcaaggatggattatataaaataggctctggatacagtggaacagttaggggccatatatacaattctacatcccgtattagaaacagaaaagaaaaaaagtcttggttagggtatgctcagggttatttattatatagagatgtgaataaccacagcatgacagccataaggataagccctgaaacactggagcaagatggtactgtgatgttaccagattgccacactgaaggtcaaaatattttattcactgatggagaatatattaatcagatagctgcttcaagagatgatggctttgttgtcagaatatttgccacaagcactgaacctgttctacagcaagaattgcaacttaaactggctagaaaatgcttacatgcctgtggtatctcactattcgatctggaaaaggacttgcatattataagtacaggatttgatgaggagtcagcaattcttggtgcaggacgagagtttgcgctaatgaaaacagcaaatggaaagatatattacactggcaaataccagagtcttggaatcaaacaaggtggtccttcagcaggaaaatgggttgagctaccaattacaaaatctccaaagatagtacacttctcagttggacacgatggctctcacgcccttttagttgcagaagatgggagcatattctttacaggatctgctagtaaaggagaagatggagaatcaactaagagcagacggcaatccaaaccttataaacctaaaaagataattaagatggaaggaaagattgtggtatatacagcctgcaataatggaagtagttctgttatttctaaagatggagaactctacatgtttggaaaagatgccatttactctgatagttcaagtttggtaactgatttgaagggccattttgtaactcaggtagctatgggcaaagctcacacttgtgttttaatgaagaatggagaggtgtggacatttggtgtaaataataaaggacagtgtggacgagatactggtgccatgaaccaaggtgggaaagggtttggagttgaaaatatggcaacagcaatggatgaagacctggaagaagaactagatgaaaaagatgagaagtctatgatgtgccctccaggcatgcacaaatggaagctggagcagtgcatggtttgcactgtctgtggagactgtacaggttatggagccagctgtgtcagtagtggacggccagacagagtccccggagggatctgtggttgtggttccggagaatctggttgtgctgtgtgtggatgttgcaaggcctgtgcaagagagttagatggtcaagaggcaagacaaagaggaattcttgatgcagtgaaagaaatgatacctttagatcttcttttagctgtcccagtgcccggggttaacattgaagaacaccttcagttacgacaagaagaaaaacggcaacgtgtaatcagaaggcacagattagaggaaggaagaggcccccttgtatttgctggtcctatttttatgaaccatcgagaacaggctctagccagactcagatcccatccagcacagctaaagcataaacgggacaagcacaaagatggaagtggagaaagaggcgaaaaggatgcaagcaaaatcacaacataccctccaggctctgtgcgatttgactgtgagctccgggcagtccaagtcagctgtggatttcaccattcagtggttttaatggaaaatggagatgtctatacatttggttatgggcagcatgggcagctaggacatggagatgtcaactccaggggatgtcccactcttgttcaagcattgccaggccctagcacacaagtcactgcaggcagcaaccatacggcagtacttttaatggatggacaggtcttcacatttggaagtttttctaaaggacaactgggcagaccaattttggatgtgccatattggaatgcaaagccagctcccatgcctaacattggatcaaaatatggaagaaaagctacttggataggtgcaagtggggaccaaacttttttacgaattgatgaagcacttattaattctcatgtacttgctacatcagaaatttttgccagtaaacacataataggcttggtacctgcttctatatcagaacctcctccatttaaatgccttctgataaataaagtggatgggagttgtaaaacttttaatgactcagaacaagaggatctgcaaggatttggtgtgtgtcttgatcctgtatatgatgtaatttggaggtttcgaccaaatactagagagctgtggtgttacaatgcggtggttgctgatgccaggcttccctctgcagcagacatgcagtccagatgtagtatcctaagtcctgaacttgccttaccaacaggatcaagggccctcactacccgatctcatgcagctttgcacattttaggttgtcttgataccttggcagctatgcaggacttaaaaatgggtgttgcaagtacagaggaagagactcaagcagtaatgaaggtttattctaaagaagattatagtgtggtaaacaggtttgaaagtcatggaggaggctggggttattctgcccattcagtagaagctatacgtttcagtgccgacactgatattttacttggtggtcttggtctgtttggaggtagaggagaatatactgctaaaattaagctgtttgaattgggtcctgatggaggagatcatgaaactgatggtgaccttcttgcagagactgatgtattggcttatgactgtgctgctagagaaaaatatgcaatgatgtttgatgagcctgttctcctgcaagctgggtggtggtatgtggcatgggcccgagtgtcaggacccagcagtgactgtggatctcatggacaggcatctattaccacagatgatggggttgttttccagttcaagagttcaaagaaatcaaataatggtacagatgttaatgcgggtcagatacctcagttattatacagacttccaaccagtgatggcagtgcttcaaaaggcaaacagcaaaccagtgaacctgtacacattttaaagaggtcttttgcaagaactgtctcagtggaatgttttgagtcattgttgagtattcttcactggagctggaccaccttagtcttaggagttgaagaacttagaggattaaaaggattccagttcacagctacactcctagatttagagagactgcgctttgtgggtacctgttgtctgaggttattgcgtgtctatacctgtgaaatttacccagtgtcagctacaggaaaagcagttgtagaagaaactagcaaattagcagagtgtattggaaaaaccagaactttgttaagaaaaattttatcagaaggagttgatcactgcatggtgaaattggataatgatcctcaaggatatctcagtcaacccttgagtcttctagaagctgtccttcaggaatgtcataatactttcactgcctgctttcattctttctacccaactcctgccttacagtgggcttgcctttgtgatctgctgaattgtttggatcaggatatccaagaagcaaacttcaagacatcaagtagccgactccttgcagctgttatgtcagctctgtgtcacacgtctgttaagctgacttccatcttcccgattgcgtatgatggagaagtattactacgatcaattgttaaacaagttagtacagagaacgactcaacactagttcatcgttttccccttttggtggcacatatggaaaaactcagccagagtgaagagaatatctcagggatgacaagcttccgtgaagttctggagaaaatgctggtcattgttgtgctaccagtcaggaacagcctgaggagagaaaatgaactcttctcctcccacctcgtctctaacacctgtggattactggccagcattgtcagtgaactgacagcgtcagccctgggatctgaggttgatggacttaattctcttcactctgtaaaagctagtgctaaccgatttacaaaaacaagtcagggcagaagttggaacactgggaacgggtcccctgatgcaatctgtttttcagtagacaaacctggaatagttgtggttggtttctctgtctatggaggaggtggaattcatgaatatgaattagaggtgttggttgatgatagtgaacatgcaggagattcaactcattcccacagatggacatctctggaattagtgaaaggaacgtacacaacggatgactcacccagtgatatagctgagatcagacttgacaaagtggttcctttaaaggaaaatgttaaatatgctgtgcgcttgaggaactatggaagccgtacagccaatggagatggaggaatgaccacagttcagtgccctgatggtgtgacattcacattcagcacgtgcagcttgagcagtaacggcacaaaccaaaccagaggacagatcccacagatactctactataggagtgaatttgatggagatttacaatcccaacttctgagtaaagccaatgaagaagataaaaactgtagcagagcattgtctgttgtaagcactgtcgttcgagcctctaaggacctcctgcacagagctcttgctgtggatgctgatgacattccagaactgctgagttcttccagtctgttttccatgctgctcccccttattatagcctacataggaccagtagctgctgctattcccaaggtggctgtagaagtctttggccttgtccaacaattgcttccgtcagttgccattttgaatcagaagtatgcaccgcctgccttcaaccctaatcagtcgacagatagcaccacaggaaaccagcctgaacagggcctctctgcttgtacaacctccagtcactatgctgtcatagagagtgagcacccgtataaacctgcctgtgtgatgcattacaaggtgacattcccagaatgtgtgaggtggatgacaatcgaatttgaccctcagtgtggtactgcacagtcagaagatgtccttcgtttgttgattcctgtcagaactgttcagaattcaggatatggaccaaaattgacatctgttcatgaaaatcttaattcatggatagaattaaagaaattttcaggatcctctgggtggcctactatggttttggtgttgccaggaaatgaggcccttttttcattggagactgcatcagattatgtgaaagatgacaaagcttctttctatggttttaagtgttttgcaattggatatgaatttagccctggacctgatgagggagtcatccaattggaaaaagaattagccaatcttggtggggtttgtgcagcagctctgatgaagaaggacctagcacttcctattggtaatgaattagaagaagaccttgaaattcttgaggaggctgcattgcaggtgtgcaaaacccattctggaattcttggaaagggtctagctctttctcattcaccaactatattagaagcacttgagggaaatttaccactccaaatccaaagcaatgaacagtcttttctggatgattttattgcctgtgtcccaggatcaagtggtggaaggcttgcaaggtggcttcagccagattcatatgcggatcctcagaaaacatctttgatcctgaataaggatgatattcgttgtggttggcctaccaccataactgttcaaacaaaagaccagtatggggatgtggtacatgttcccaatatgaaggtggaagtgaaagctgtccctgtttctcagaaaaaaatgtctttacaacaagatcaagcaaagaaacctcaaaggattcctggcagtcctgcagtaacagctgcatcttctaatactgacatgacttatggagggctggcatcaccaaagctagatgtttcatatgaaccaatgatagtgaaggaagctcgatatattgccataacaatgatgaaggtttatgaaaattattcatttgaagaactacgttttgcatcaccaactcctaagagacccagtgagaatatgctgatccgtgtcaataatgatgggacttattgtgcaaattggactccaggggctattggactctacactcttcatgttaccattgatggcattgaaatcgatgctggtctggaagtaaaagtaaaagacccaccaaaagggatgataccaccaggaactcagttggtcaaaccaaagtctgaacctcagcctaataaggttcgaaaatttgtggccaaggacagtgcggggcttcgcatccgtagccacccttcccttcagagtgagcagataggcatagtgaaagtcaatggaactatcacttttattgatgagatccataatgatgatggtgtgtggctgaggctgaatgatgagacaataaagaagtatgtccctaacatgaatggttacactgaagcctggtgcctctcttttaatcaacatcttggcaagagtcttctggtccctgttgacgaatctaaaactaatactgatgactttttcaaagacataaactcctgctgcccacaggaagcaacaatgcaagaacaagatatgccattcttgcgaggagggccaggcatgtacaaggtagtgaagacgggaccttcaggtcacaacatcagaagctgccctaaccttagaggtatcccaattggaatgttagttctgggaaacaaagtcaaagcagtgggagaggtaaccaattctgaagggacatgggtgcaactggatcagaacagcatggtagagttctgtgagagtgatgaaggagaggcatggtccttagctagagacagaggcggaaaccagtacctccgacatgaagatgaacaagctcttctggatcagaattctcaaactcctcctccaagccctttctcagtgcaagcttttaataaaggggcaagttgcagtgcccaaggatttgattatggactcggaaatagcaaaggtgatcgaggaaacatctcaacatcttctaaaccagcctctacatcaggaaaatcagagctgtcctctaaacacagcagatcgcttaaacctgatggacgtatgagccggactactgctgatcagaagaagccaaggggcacagaaagtttatctgctagtgaatccctcatcttaaaatctgatgctgcaaagttgaggtcagattcccacagtaggtcattatcccccaaccataacaccttgcagacattgaaatctgatgggaggatgccttctagctccagagctgaatccccaggaccaggttctcggttgtcatctcctaagccaaagactctcccagccaataggtctagcccatcgggtgctagttctccacgctcctcctcaccacatgataaaaatctacctcaaaaaagtactgctcctgttaagacaaagcttgatcctcctcgggaacgttctaaatcagactcttacacacttgatccagataccctccgcaagaagaaaatgcccctcacagaacctttgagaggacggtcaacgtcaccaaaaccaaaatcagtaccaaaggattctacagattcccctggatctgaaaatagagctccctctccccatgtggtacaggaaaacctccacagtgaggtggtcgaagtctgcacctcaagtactttaaaaacaaatagtctaacagacagcacctgcgatgacagcagtgaatttaagagtgtggatgaaggttcaaataaagttcattttagcattggaaaagcaccactgaaagatgaacaggaaatgagagcatctcccaaaataagtcgaaaatgtgctaatagacacaccaggcccaaaaaagaaaaatcgagttttcttttcaaaggagatggatccaagcctttagagccagccaagcaagccatgtctccttctgtggccgaatgtgccagagctgtgtttgcttccttcctctggcatgaaggcatagtacatgatgcaatggcttgttcttctttcctaaagtttcatcctgaactttccaaagaacatgctcctataaggagtagtttaaatagccaacaacctacagaggaaaaagaaaccaagttaaaaaatagacattcattagaaatatcatctgcactgaatatgtttaatattgcaccccatggaccagatatatctaagatgggtagcatcaacaaaaacaaggtattgtctatgcttaaggaaccacctctgcatgaaaaatgtgaggatgggaaaaccgagaccacttttgaaatgtccatgcataacacaatgaagtctaagtctcctcttcccttaactttacaacatttagtggctttttgggaagacatctctttggctactatcaaagctgcttcccagaatatgatttttccaagtcctggttcctgtgcagttcttaaaaagaaagagtgtgagaaagagaataagaagtccaaaaaggaaaaaaagaaaaaagaaaaggcagaagttaggcccaggggtaatttgtttggagagatggcccagctggcagtaggaggaccagagaaagataccatctgtgaactgtgtggggagtcacatccatacccggtgacctatcacatgagacaagctcacccaggttgtggccgatatgctggtggacaaggttacaatagcattgggcatttttgtggaggatgggctggtaactgtggtgatggtggcataggaggaagcacttggtatctggtatgtgatcgctgtagagaaaaatacctccgcgaaaaacaggctgctgcaagggagaaggtcaaacaatctaggagaaaaccaatgcaagtcaagacccctcgtgccttgcccaccatggaagctcaccaggtgattaaagccaatgcactcttcctgctgtccctgagcagtgcagcagaaccgagcattctgtgttaccatcctgcaaagccattccaatctcagttgcccagtgtaaaagaaggcatttctgaggatcttcctgtgaaaatgccttgtctctacctgcagacattagctaggcatcatcatgaaaattttgtgggctatcaagatgacaatctattccaggatgaaatgagatatctacgttcaacatctgtacctgccccgtatatatcagtaactcctgatgcaagtcctaatgtatttgaagagccagagagcaatatgaagtctatgccaccaagtttagaaaccagtcccataactgatactgatcttgcaaagagaactgtcttccaaagatcatactcagttgttgcttccgaatatgataaacaacactccattttacctgcacgagttaaagctattcctagaagaagagttaacagtggagacactgaagttggttcttcccttttgagacatccgtctcctgagctttctcggctaatctcagcccacagctctctttctaaaggagaacgaaatttccagtggccagttttagcttttgttatacaacatcatgatctagaaggtcttgaaatagcaatgaaacaggccctaaggaaatctgcttgtcgagtttttgctatggaggctttcaactggcttctgtgtaatgtcatccaaaccacttctctccatgatattctgtggcattttgtggcatcactgactcctgcaccagtggaaccagaggaagaagaggatgaagaaaataaaacaagcaaagaaaattcagaacaagagaaagatacaagagtatgtgaacatccactctcagacatagtgattgccggggaagctgctcatcctttaccacacacctttcaccgcttgctgcagaccatctcagaccttatgatgtctctccccagcggcagttcattacagcaaatggccctgaggtgctggagtctcaaattcaagcaatctgatcaccagttccttcatcagagcaacgtctttcatcacattaacaatattttgtcaaagtcagatgatggcgatagtgaagagagttttagcatcagtatacagtctggctttgaagctatgagtcaggaattatgcatagtaatgtgcttaaaggacttaaccagcattgttgacataaaaacttcaagccgacctgccatgattggcagtttgacagacggctccacagaaaccttttgggaatcaggagatgaagataaaaacaaaactaagaacatcaccatcaactgtgtaaaaggaatcaatgcccgctatgtgtctgttcacgtggacaattcccgagatcttgggaataaagttacctcaatgaccttcttaactggcaaagcagtagaagatttgtgcagaataaagcaggttgatctggattccaggcacattggctgggtaacaagtgaacttccaggaggggataatcacatcataaaaattgaattaaaaggcccagaaaatacactgagagttcgacaagtcaaagtcctgggctggaaagatggtgaaagcacaaaaatagctggccagatttcagccagtgtggcccagcagaggaactgtgaagctgagactctgcgagtattcagactgattacgtctcaagtatttggaaagctcatctctggagatgctgaacctacaccagaacaagaggaaaaagcactattgtcatcacctgaaggagaagaaaaagtatacaatgcaacatcagatgctgacctgaaagaacatatggttggaatcatattcagcaggagtaagctgactaacttacaaaaacaggtgtgtgctcatattgtccaagctattcgcatggaagctaccagagtccgtgaagaatgggaacatgctatatcaagcaaagaaaatgccaattctcagccaaatgatgaagatgcctcctctgatgcctactgctttgagctgctctctatggttttagcactgagtggctctaacgttggccggcaatatctggctcaacagctaaccctgcttcaggatctcttctcgctgcttcacacagcctctcctagagtccagagacaggtaacctctttactaagaagagttttgcctgaagtaacccctagtcgtctggccagcatcataggagtgaaatccctccccccagcagatatcagtgatatcattcactcaacagagaaaggagactggaataagctgggtatcttggacatgtttctaggatgcattgccaaagcactcactgtacagctaaaagccaaaggaaccaccatcactggaacagctggtaccactgtgggcaaaggagttacaacagttactcttccgatgattttcaattccagttatctccgacgaggtgaaagtcattggtggatgaagggctcaacccctacccagatctcagagatcatcattaaacttatcaaggatatggcagcaggtcatctgtcagaagcttggtcccgagtgacaaaaaatgctattgcagaaaccatcattgccttgaccaagatggaagaagaatttaggtctccagtgagatgtattgcaacaactagactctggcttgctctcgcatccctatgtgttcttgatcaggaccacgtagatcgtctctcctcggggagatggatgggaaaggatggacaacaaaaacaaatgcctatgtgtgataaccatgatgatggtgaaactgcagcaatcattttatgcaatgtctgtggaaatttatgtacagactgtgacagattccttcaccttcatcgaagaaccaaaactcatcaaagacaggtcttcaaagaagaagaagaagctataaaggttgaccttcatgaaggttgtggtagaaccaaattgttctggttgatggcactggcagattctaaaacaatgaaggcaatggtggaattccgagaacacacaggcaaacccaccacgagtagctcagaagcatgtcgcttctgtggttccaggagtggaacagagttatctgctgttggcagtgtttgttctgatgcagattgccaggaatacgctaagatagcctgtagtaagacgcatccttgtggccatccatgcgggggtgttaaaaacgaagagcactgtctgccctgtctacacggctgtgacaaaagtgccacaagcctgaagcaagacgccgatgacatgtgcatgatatgtttcaccgaagcgctctcggcagcaccagccattcagctggattgtagtcacatattccacttacagtgctgtcggcgagtattagaaaatcgatggcttggcccaaggataacatttggatttatatcttgtcccatttgcaagaacaaaattaatcacatagtactaaaagacctacttgatccaataaaagaactctatgaggatgtcagaagaaaagccttaatgagattggaatatgaaggtctgcataagagtgaagctatcacaactcctggtgtgaggttttataatgacccagctggctatgcaatgaatagatatgcatattatgtgtgctacaaatgcagaaaggcatattttggtggtgaagctcgctgcgatgctgaggctggacggggagatgattatgatcccagagagctcatttgtggtgcctgttctgatgtttccagggctcagatgtgtcccaaacatggcacagactttttggaatataaatgtcgctactgctgttcagtggctgtttttttctgttttggaacaacacatttttgtaatgcttgtcatgatgattttcaaagaatgactagcattcctaaggaagaactaccacactgtcctgcaggtcccaaaggcaagcagttagaaggaactgaatgtccactccatgttgttcatccacccactggggaagagtttgctctgggatgtggagtgtgcagaaatgcccacactttttagaacacgcagatcctttgtctacagagagaaaaattgccttcatcccccaagaggatgcggtgaagtttaaactctgctcaggataaggacgggaccatttttacatccatgaaaatgaaccattcacagtgcaagaaggataccaaataccatgtacataattcttgctatgaaaagtttccccattattttggtttatcttcttttgaacaaatgacatcaaacttgtgaggtgtttgcatgtggccattaccgtcattggcctgtgaagcattggacatttatagataattgatataaaagaatcgccatgcccatggactaagaacgatgctggctttcaagcaaaaaagaaaaataatcattgtttattgtatactgcctttttgtaatcctgtacaattgcatcacgggtggggataaaaagaggaatattctggtttatttcctagactgttatttaaaaaaaaaaaaaacattgtgttaggacagcatataaatgtaataagtatcacactgtatataaacatatcaatgtttgtcctgtataagaattactaaattacaaatgcaatttcatttaaacttctaggttaagtttgagcctgaaattttaatgaagtgcaatactgagtgtgcctcattatcttgcagctgtaaacatattggaatgtacatgtcaataaaaccactgtacatttttatacagtgataaagtct

SEQ ID NO: 156245 - DNA, 3660 bp, Homo sapiens
  Payload ID: 10657
  Gene Symbol: MYCBP2
  Gene Name: MYC binding protein 2, E3 ubiquitin protein ligase
  ENST ID: ENST00000429715
  CDS Start-End: 1-3184
aaataaaacaagcaaagaaaattcagaacaagagaaagatacaagagtatgtgaacatccactctcagacatagtgattgccggggaagctgctcatcctttaccacacacctttcaccgcttgctgcagaccatctcagaccttatgatgtctctccccagcggcagttcattacagcaaatggccctgaggtgctggagtctcaaattcaagcaatctgatcaccagttccttcatcagagcaacgtctttcatcacattaacaatattttgtcaaagtcagatgatggcgatagtgaagagagttttagcatcagtatacagtctggctttgaagctatgagtcaggaattatgcatagtaatgtgcttaaaggacttaaccagcattgttgacataaaaacttcaagccgacctgccatgattggcagtttgacagacggctccacagaaaccttttgggaatcaggagatgaagataaaaacaaaactaagaacatcaccatcaactgtgtaaaaggaatcaatgcccgctatgtgtctgttcacgtggacaattcccgagatcttgggaataaagttacctcaatgaccttcttaactggcaaagcagtagaagatttgtgcagaataaagcaggttgatctggattccaggcacattggctgggtaacaagtgaacttccaggaggggataatcacatcataaaaattgaattaaaaggcccagaaaatacactgagagttcgacaagtcaaagtcctgggctggaaagatggtgaaagcacaaaaatagctggccagatttcagccagtgtggcccagcagaggaactgtgaagctgagactctgcgagtattcagactgattacgtctcaagtatttggaaagctcatctctggagatgctgaacctacaccagaacaagaggaaaaagcactattgtcatcacctgaaggagaagaaaaagcaacatcagatgctgacctgaaagaacatatggttggaatcatattcagcaggagtaagctgactaacttacaaaaacaggtgtgtgctcatattgtccaagctattcgcatggaagctaccagagtccgtgaagaatgggaacatgctatatcaagcaaagaaaatgccaattctcagccaaatgatgaagatgcctcctctgatgcctactgctttgagctgctctctatggttttagcactgagtggctctaacgttggccggcaatatctggctcaacagctaaccctgcttcaggatctcttctcgctgcttcacacagcctctcctagagtccagagacaggtaacctctttactaagaagagttttgcctgaagtaacccctagtcgtctggccagcatcataggagtgaaatccctccccccagcagatatcagtgatatcattcactcaacagagaaaggagactggaataagctgggtatcttggacatgtttctaggatgcattgccaaagcactcactgtacagctaaaagccaaaggaaccaccatcactggaacagctggtaccactgtgggcaaaggagttacaacagttactcttccgatgattttcaattccagttatctccgacgaggtgaaagtcattggtggatgaagggctcaacccctacccagatctcagagatcatcattaaacttatcaaggatatggcagcaggtcatctgtcagaagcttggtcccgagtgacaaaaaatgctattgcagaaaccatcattgccttgaccaagatggaagaagaatttaggtctccagtgagatgtattgcaacaactagactctggcttgctctcgcatccctatgtgttcttgatcaggaccacgtagatcgtctctcctcggggagatggatgggaaaggatggacaacaaaaacaaatgcctatgtgtgataaccatgatgatggtgaaactgcagcaatcattttatgcaatgtctgtggaaatttatgtacagactgtgacagattccttcaccttcatcgaagaaccaaaactcatcaaagacaggtcttcaaagaagaagaagaagctataaaggttgaccttcatgaaggttgtggtagaaccaaattgttctggttgatggcactggcagattctaaaacaatgaaggcaatggtggaattccgagaacacacaggcaaacccaccacgagtagctcagaagcatgtcgcttctgtggttccaggagtggaacagagttatctgctgttggcagtgtttgttctgatgcagattgccaggaatacgctaagatagcctgtagtaagacgcatccttgtggccatccatgcgggggtgttaaaaacgaagagcactgtctgccctgtctacacggctgtgacaaaagtgccacaagcctgaagcaagacgccgatgacatgtgcatgatatgtttcaccgaagcgctctcggcagcaccagccattcagctggattgtagtcacatattccacttacagtgctgtcggcgagtattagaaaatcgatggcttggcccaaggataacatttggatttatatcttgtcccatttgcaagaacaaaattaatcacatagtactaaaagacctacttgatccaataaaagaactctatgaggatgtcagaagaaaagccttaatgagattggaatatgaaggtctgcataagagtgaagctatcacaactcctggtgtgaggttttataatgacccagctggctatgcaatgaatagatatgcatattatgtgtgctacaaatgcagaaaggcatattttggtggtgaagctcgctgcgatgctgaggctggacggggagatgattatgatcccagagagctcatttgtggtgcctgttctgatgtttccagggctcagatgtgtcccaaacatggcacagactttttggaatataaatgtcgctactgctgttcagtggctgtttttttctgttttggaacaacacatttttgtaatgcttgtcatgatgattttcaaagaatgactagcattcctaaggaagaactaccacactgtcctgcaggtcccaaaggcaagcagttagaaggaactgaatgtccactccatgttgttcatccacccactggggaagagtttgctctgggatgtggagtgtgcagaaatgcccacactttttagaacacgcagatcctttgtctacagagagaaaaattgccttcatcccccaagaggatgcggtgaagtttaaactctgctcaggataaggacgggaccatttttacatccatgaaaatgaaccattcacagtgcaagaaggataccaaataccatgtacataattcttgctatgaaaagtttccccattattttggtttatcttcttttgaacaaatgacatcaaacttgtgaggtgtttgcatgtggccattaccgtcattggcctgtgaagcattggacatttatagataattgatataaaagaatcgccatgcccatggactaagaacgatgctggctttcaagcaaaaaagaaaaataatcattgtttattgtatactgcctttttgtaatcctgtacaattgcatcacgggtggggataaaaagaggaatattctggtttatttcctagactgttatttaaaaaaaaaaaaaa

SEQ ID NO: 156246 - DNA, 14664 bp, Homo sapiens
  Payload ID: 10657
  Gene Symbol: MYCBP2
  Gene Name: MYC binding protein 2, E3 ubiquitin protein ligase
  Uniprot ID: O75592
  ENST ID: ENST00000544440
  CDS Start-End: 19-13941
gcgccgggggcgctgttcatgccggttcccgacggctccgtggctgctgcggggctggggctggggctacccgccgcggactcccggggtcactaccagctgctgctgtcaggccgggccctggccgaccgctaccggaggatttataccgctgcgctcaatgacagggaccaggggggcggcagcgctggacacccagcctccaggaataagaaaattttaaataagaagaaattgaaaagaaaacagaagagcaaatcaaaagtgaagacaagaagcaagtctgaaaacttagagaatacagtaatcataccagatatcaaactacatagcaatccttctgctttcaatatttactgtaatgtacgccattgcgttctggaatggcagaaaaaggaaatatcattggcagccgcatctaagaactctgtgcagagtggagaatcagatagtgatgaagaagaggaatccaaagagccccctatcaagcttccaaagattattgaggttggcctttgtgaagtttttgaattgatcaaagagacacgattttctcatccatccctgtgtctcaggagtctccaagccctgctcaacgtgctgcagggccagcagccagaaggcctccagtctgagccacctgaggtcctagagtctctcttccagcttcttttggaaatcaccgttcgaagtactgggatgaatgacagcacaggacagtccttaacagcactttcctgtgcttgcctctttagtctggtggcttcttggggagaaacaggaaggacacttcaggccatctctgctatcctcaccaacaatggaagccatgcttgccaaactattcaggtgccaacaattctaaattcgctacagagaagtgtacaagcagttttggtgggaaaaattcaaattcaggactggtttagtaatggcattaagaaagcagctttaatgcacaagtggccattaaaagaaatatctgttgatgaagatgaccaatgtctacttcagaatgatggattttttctttatctattatgcaaggatggattatataaaataggctctggatacagtggaacagttaggggccatatatacaattctacatcccgtattagaaacagaaaagaaaaaaagtcttggttagggtatgctcagggttatttattatatagagatgtgaataaccacagcatgacagccataaggataagccctgaaacactggagcaagatggtactgtgatgttaccagattgccacactgaaggtcaaaatattttattcactgatggagaatatattaatcagatagctgcttcaagagatgatggctttgttgtcagaatatttgccacaagcactgaacctgttctacagcaagaattgcaacttaaactggctagaaaatgcttacatgcctgtggtatctcactattcgatctggaaaaggacttgcatattataagtacaggatttgatgaggagtcagcaattcttggtgcaggacgagagtttgcgctaatgaaaacagcaaatggaaagatatattacactggcaaataccagagtcttggaatcaaacaaggtggtccttcagcaggaaaatgggttgagctaccaattacaaaatctccaaagatagtacacttctcagttggacacgatggctctcacgcccttttagttgcagaagatgggagcatattctttacaggatctgctagtaaaggagaagatggagaatcaactaagagcagacggcaatccaaaccttataaacctaaaaagataattaagatggaaggaaagattgtggtatatacagcctgcaataatggaagtagttctgttatttctaaagatggagaactctacatgtttggaaaagatgccatttactctgatagttcaagtttggtaactgatttgaagggccattttgtaactcaggtagctatgggcaaagctcacacttgtgttttaatgaagaatggagaggtgtggacatttggtgtaaataataaaggacagtgtggacgagatactggtgccatgaaccaaggtgggaaagggtttggagttgaaaatatggcaacagcaatggatgaagacctggaagaagaactagatgaaaaagatgagaagtctatgatgtgccctccaggcatgcacaaatggaagctggagcagtgcatggtttgcactgtctgtggagactgtacaggttatggagccagctgtgtcagtagtggacggccagacagagtccccggagggatctgtggttgtggttccggagaatctggttgtgctgtgtgtggatgttgcaaggcctgtgcaagagagttagatggtcaagaggcaagacaaagaggaattcttgatgcagtgaaagaaatgatacctttagatcttcttttagctgtcccagtgcccggggttaacattgaagaacaccttcagttacgacaagaagaaaaacggcaacgtgtaatcagaaggcacagattagaggaaggaagaggcccccttgtatttgctggtcctatttttatgaaccatcgagaacaggctctagccagactcagatcccatccagcacagctaaagcataaacgggacaagcacaaagatggaagtggagaaagaggcgaaaaggatgcaagcaaaatcacaacataccctccaggctctgtgcgatttgactgtgagctccgggcagtccaagtcagctgtggatttcaccattcagtggttttaatggaaaatggagatgtctatacatttggttatgggcagcatgggcagctaggacatggagatgtcaactccaggggatgtcccactcttgttcaagcattgccaggccctagcacacaagtcactgcaggcagcaaccatacggcagtacttttaatggatggacaggtcttcacatttggaagtttttctaaaggacaactgggcagaccaattttggatgtgccatattggaatgcaaagccagctcccatgcctaacattggatcaaaatatggaagaaaagctacttggataggtgcaagtggggaccaaacttttttacgaattgatgaagcacttattaattctcatgtacttgctacatcagaaatttttgccagtaaacacataataggcttggtacctgcttctatatcagaacctcctccatttaaatgccttctgataaataaagtggatgggagttgtaaaacttttaatgactcagaacaagaggatctgcaaggatttggtgtgtgtcttgatcctgtatatgatgtaatttggaggtttcgaccaaatactagagagctgtggtgttacaatgcggtggttgctgatgccaggcttccctctgcagcagacatgcagtccagatgtagtatcctaagtcctgaacttgccttaccaacaggatcaagggccctcactacccgatctcatgcagctttgcacattttaggttgtcttgataccttggcagctatgcaggacttaaaaatgggtgttgcaagtacagaggaagagactcaagcagtaatgaaggtttattctaaagaagattatagtgtggtaaacaggtttgaaagtcatggaggaggctggggttattctgcccattcagtagaagctatacgtttcagtgccgacactgatattttacttggtggtcttggtctgtttggaggtagaggagaatatactgctaaaattaagctgtttgaattgggtcctgatggaggagatcatgaaactgatggtgaccttcttgcagagactgatgtattggcttatgactgtgctgctagagaaaaatatgcaatgatgtttgatgagcctgttctcctgcaagctgggtggtggtatgtggcatgggcccgagtgtcaggacccagcagtgactgtggatctcatggacaggcatctattaccacagatgatggggttgttttccagttcaagagttcaaagaaatcaaataatggtacagatgttaatgcgggtcagatacctcagttattatacagacttccaaccagtgatggcagtgcttcaaaaggcaaacagcaaaccagtgaacctgtacacattttaaagaggtcttttgcaagaactgtctcagtggaatgttttgagtcattgttgagtattcttcactggagctggaccaccttagtcttaggagttgaagaacttagaggattaaaaggattccagttcacagctacactcctagatttagagagactgcgctttgtgggtacctgttgtctgaggttattgcgtgtctatacctgtgaaatttacccagtgtcagctacaggaaaagcagttgtagaagaaactagcaaattagcagagtgtattggaaaaaccagaactttgttaagaaaaattttatcagaaggagttgatcactgcatggtgaaattggataatgatcctcaaggatatctcagtcaacccttgagtcttctagaagctgtccttcaggaatgtcataatactttcactgcctgctttcattctttctacccaactcctgccttacagtgggcttgcctttgtgatctgctgaattgtttggatcaggatatccaagaagcaaacttcaagacatcaagtagccgactccttgcagctgttatgtcagctctgtgtcacacgtctgttaagctgacttccatcttcccgattgcgtatgatggagaagtattactacgatcaattgttaaacaagttagtacagagaacgactcaacactagttcatcgttttccccttttggtggcacatatggaaaaactcagccagagtgaagagaatatctcagggatgacaagcttccgtgaagttctggagaaaatgctggtcattgttgtgctaccagtcaggaacagcctgaggagagaaaatgaactcttctcctcccacctcgtctctaacacctgtggattactggccagcattgtcagtgaactgacagcgtcagccctgggatctgaggttgatggacttaattctcttcactctgtaaaagctagtgctaaccgatttacaaaaacaagtcagggcagaagttggaacactgggaacgggtcccctgatgcaatctgtttttcagtagacaaacctggaatagttgtggttggtttctctgtctatggaggaggtggaattcatgaatatgaattagaggtgttggttgatgatagtgaacatgcaggagattcaactcattcccacagatggacatctctggaattagtgaaaggaacgtacacaacggatgactcacccagtgatatagctgagatcagacttgacaaagtggttcctttaaaggaaaatgttaaatatgctgtgcgcttgaggaactatggaagccgtacagccaatggagatggaggaatgaccacagttcagtgccctgatggtgtgacattcacattcagcacgtgcagcttgagcagtaacggcacaaaccaaaccagaggacagatcccacagatactctactataggagtgaatttgatggagatttacaatcccaacttctgagtaaagccaatgaagaagataaaaactgtagcagagcattgtctgttgtaagcactgtcgttcgagcctctaaggacctcctgcacagagctcttgctgtggatgctgatgacattccagaactgctgagttcttccagtctgttttccatgctgctcccccttattatagcctacataggaccagtagctgctgctattcccaaggtggctgtagaagtctttggccttgtccaacaattgcttccgtcagttgccattttgaatcagaagtatgcaccgcctgccttcaaccctaatcagtcgacagatagcaccacaggaaaccagcctgaacagggcctctctgcttgtacaacctccagtcactatgctgtcatagagagtgagcacccgtataaacctgcctgtgtgatgcattacaaggtgacattcccagaatgtgtgaggtggatgacaatcgaatttgaccctcagtgtggtactgcacagtcagaagatgtccttcgtttgttgattcctgtcagaactgttcagaattcaggatatggaccaaaattgacatctgttcatgaaaatcttaattcatggatagaattaaagaaattttcaggatcctctgggtggcctactatggttttggtgttgccaggaaatgaggcccttttttcattggagactgcatcagattatgtgaaagatgacaaagcttctttctatggttttaagtgttttgcaattggatatgaatttagccctggacctgatgagggagtcatccaattggaaaaagaattagccaatcttggtggggtttgtgcagcagctctgatgaagaaggacctagcacttcctattggtaatgaattagaagaagaccttgaaattcttgaggaggctgcattgcaggtgtgcaaaacccattctggaattcttggaaagggtctagctctttctcattcaccaactatattagaagcacttgagggaaatttaccactccaaatccaaagcaatgaacagtcttttctggatgattttattgcctgtgtcccaggatcaagtggtggaaggcttgcaaggtggcttcagccagattcatatgcggatcctcagaaaacatctttgatcctgaataaggatgatattcgttgtggttggcctaccaccataactgttcaaacaaaagaccagtatggggatgtggtacatgttcccaatatgaaggtggaagtgaaagctgtccctgtttctcagaaaaaaatgtctttacaacaagatcaagcaaagaaacctcaaaggattcctggcagtcctgcagtaacagctgcatcttctaatactgacatgacttatggagggctggcatcaccaaagctagatgtttcatatgaaccaatgatagtgaaggaagctcgatatattgccataacaatgatgaaggtttatgaaaattattcatttgaagaactacgttttgcatcaccaactcctaagagacccagtgagaatatgctgatccgtgtcaataatgatgggacttattgtgcaaattggactccaggggctattggactctacactcttcatgttaccattgatggcattgaaatcgatgctggtctggaagtaaaagtaaaagacccaccaaaagggatgataccaccaggaactcagttggtcaaaccaaagtctgaacctcagcctaataaggttcgaaaatttgtggccaaggacagtgcggggcttcgcatccgtagccacccttcccttcagagtgagcagataggcatagtgaaagtcaatggaactatcacttttattgatgagatccataatgatgatggtgtgtggctgaggctgaatgatgagacaataaagaagtatgtccctaacatgaatggttacactgaagcctggtgcctctcttttaatcaacatcttggcaagagtcttctggtccctgttgacgaatctaaaactaatactgatgactttttcaaagacataaactcctgctgcccacaggaagcaacaatgcaagaacaagatatgccattcttgcgaggagggccaggcatgtacaaggtagtgaagacgggaccttcaggtcacaacatcagaagctgccctaaccttagaggtatcccaattggaatgttagttctgggaaacaaagtcaaagcagtgggagaggtaaccaattctgaagggacatgggtgcaactggatcagaacagcatggtagagttctgtgagagtgatgaaggagaggcatggtccttagctagagacagaggcggaaaccagtacctccgacatgaagatgaacaagctcttctggatcagaattctcaaactcctcctccaagccctttctcagtgcaagcttttaataaaggggcaagttgcagtgcccaaggatttgattatggactcggaaatagcaaaggtgatcgaggaaacatctcaacatcttctaaaccagcctctacatcaggaaaatcagagctgtcctctaaacacagcagatcgcttaaacctgatggacgtatgagccggactactgctgatcagaagaagccaaggggcacagaaagtttatctgctagtgaatccctcatcttaaaatctgatgctgcaaagttgaggtcagattcccacagtaggtcattatcccccaaccataacaccttgcagacattgaaatctgatgggaggatgccttctagctccagagctgaatccccaggaccaggttctcggttgtcatctcctaagccaaagactctcccagccaataggtctagcccatcgggtgctagttctccacgctcctcctcaccacatgataaaaatctacctcaaaaaagtactgctcctgttaagacaaagcttgatcctcctcgggaacgttctaaatcagactcttacacacttgatccagataccctccgcaagaagaaaatgcccctcacagaacctttgagaggacggtcaacgtcaccaaaaccaaaatcagtaccaaaggattctacagattcccctggatctgaaaatagagctccctctccccatgtggtacaggaaaacctccacagtgaggtggtcgaagtctgcacctcaagtactttaaaaacaaatagtctaacagacagcacctgcgatgacagcagtgaatttaagagtgtggatgaaggttcaaataaagttcattttagcattggaaaagcaccactgaaagatgaacaggaaatgagagcatctcccaaaataagtcgaaaatgtgctaatagacacaccaggcccaaaaaagaaaaatcgagttttcttttcaaaggagatggatccaagcctttagagccagccaagcaagccatgtctccttctgtggccgaatgtgccagagctgtgtttgcttccttcctctggcatgaaggcatagtacatgatgcaatggcttgttcttctttcctaaagtttcatcctgaactttccaaagaacatgctcctataaggagtagtttaaatagccaacaacctacagaggaaaaagaaaccaagttaaaaaatagacattcattagaaatatcatctgcactgaatatgtttaatattgcaccccatggaccagatatatctaagatgggtagcatcaacaaaaacaaggtattgtctatgcttaaggaaccacctctgcatgaaaaatgtgaggatgggaaaaccgagaccacttttgaaatgtccatgcataacacaatgaagtctaagtctcctcttcccttaactttacaacatttagtggctttttgggaagacatctctttggctactatcaaagctgcttcccagaatatgatttttccaagtcctggttcctgtgcagttcttaaaaagaaagagtgtgagaaagagaataagaagtccaaaaaggaaaaaaagaaaaaagaaaaggcagaagttaggcccaggggtaatttgtttggagagatggcccagctggcagtaggaggaccagagaaagataccatctgtgaactgtgtggggagtcacatccatacccggtgacctatcacatgagacaagctcacccaggttgtggccgatatgctggtggacaaggttacaatagcattgggcatttttgtggaggatgggctggtaactgtggtgatggtggcataggaggaagcacttggtatctggtatgtgatcgctgtagagaaaaatacctccgcgaaaaacaggctgctgcaagggagaaggtcaaacaatctaggagaaaaccaatgcaagtcaagacccctcgtgccttgcccaccatggaagctcaccaggtgattaaagccaatgcactcttcctgctgtccctgagcagtgcagcagaaccgagcattctgtgttaccatcctgcaaagccattccaatctcagttgcccagtgtaaaagaaggcatttctgaggatcttcctgtgaaaatgccttgtctctacctgcagacattagctaggcatcatcatgaaaattttgtgggctatcaagatgacaatctattccaggatgaaatgagatatctacgttcaacatctgtacctgccccgtatatatcagtaactcctgatgcaagtcctaatgtatttgaagagccagagagcaatatgaagtctatgccaccaagtttagaaaccagtcccataactgatactgatcttgcaaagagaactgtcttccaaagatcatactcagttgttgcttccgaatatgataaacaacactccattttacctgcacgagttaaagctattcctagaagaagagttaacagtggagacactgaagttggttcttcccttttgagacatccgtctcctgagctttctcggctaatctcagcccacagctctctttctaaaggagaacgaaatttccagtggccagttttagcttttgttatacaacatcatgatctagaaggtcttgaaatagcaatgaaacaggccctaaggaaatctgcttgtcgagtttttgctatggaggctttcaactggcttctgtgtaatgtcatccaaaccacttctctccatgatattctgtggcattttgtggcatcactgactcctgcaccagtggaaccagaggaagaagaggatgaagaaaataaaacaagcaaagaaaattcagaacaagagaaagatacaagagtatgtgaacatccactctcagacatagtgattgccggggaagctgctcatcctttaccacacacctttcaccgcttgctgcagaccatctcagaccttatgatgtctctccccagcggcagttcattacagcaaatggccctgaggtgctggagtctcaaattcaagcaatctgatcaccagttccttcatcagagcaacgtctttcatcacattaacaatattttgtcaaagtcagatgatggcgatagtgaagagagttttagcatcagtatacagtctggctttgaagctatgagtcaggaattatgcatagtaatgtgcttaaaggacttaaccagcattgttgacataaaaacttcaagccgacctgccatgattggcagtttgacagacggctccacagaaaccttttgggaatcaggagatgaagataaaaacaaaactaagaacatcaccatcaactgtgtaaaaggaatcaatgcccgctatgtgtctgttcacgtggacaattcccgagatcttgggaataaagttacctcaatgaccttcttaactggcaaagcagtagaagatttgtgcagaataaagcaggttgatctggattccaggcacattggctgggtaacaagtgaacttccaggaggggataatcacatcataaaaattgaattaaaaggcccagaaaatacactgagagttcgacaagtcaaagtcctgggctggaaagatggtgaaagcacaaaaatagctggccagatttcagccagtgtggcccagcagaggaactgtgaagctgagactctgcgagtattcagactgattacgtctcaagtatttggaaagctcatctctggagatgctgaacctacaccagaacaagaggaaaaagcactattgtcatcacctgaaggagaagaaaaagtatacaatgcaacatcagatgctgacctgaaagaacatatggttggaatcatattcagcaggagtaagctgactaacttacaaaaacaggtgtgtgctcatattgtccaagctattcgcatggaagctaccagagtccgtgaagaatgggaacatgctatatcaagcaaagaaaatgccaattctcagccaaatgatgaagatgcctcctctgatgcctactgctttgagctgctctctatggttttagcactgagtggctctaacgttggccggcaatatctggctcaacagctaaccctgcttcaggatctcttctcgctgcttcacacagcctctcctagagtccagagacaggtaacctctttactaagaagagttttgcctgaagtaacccctagtcgtctggccagcatcataggagtgaaatccctccccccagcagatatcagtgatatcattcactcaacagagaaaggagactggaataagctgggtatcttggacatgtttctaggatgcattgccaaagcactcactgtacagctaaaagccaaaggaaccaccatcactggaacagctggtaccactgtgggcaaaggagttacaacagttactcttccgatgattttcaattccagttatctccgacgaggtgaaagtcattggtggatgaagggctcaacccctacccagatctcagagatcatcattaaacttatcaaggatatggcagcaggtcatctgtcagaagcttggtcccgagtgacaaaaaatgctattgcagaaaccatcattgccttgaccaagatggaagaagaatttaggtctccagtgagatgtattgcaacaactagactctggcttgctctcgcatccctatgtgttcttgatcaggaccacgtagatcgtctctcctcggggagatggatgggaaaggatggacaacaaaaacaaatgcctatgtgtgataaccatgatgatggtgaaactgcagcaatcattttatgcaatgtctgtggaaatttatgtacagactgtgacagattccttcaccttcatcgaagaaccaaaactcatcaaagacaggtcttcaaagaagaagaagaagctataaaggttgaccttcatgaaggttgtggtagaaccaaattgttctggttgatggcactggcagattctaaaacaatgaaggcaatggtggaattccgagaacacacaggcaaacccaccacgagtagctcagaagcatgtcgcttctgtggttccaggagtggaacagagttatctgctgttggcagtgtttgttctgatgcagattgccaggaatacgctaagatagcctgtagtaagacgcatccttgtggccatccatgcgggggtgttaaaaacgaagagcactgtctgccctgtctacacggctgtgacaaaagtgccacaagcctgaagcaagacgccgatgacatgtgcatgatatgtttcaccgaagcgctctcggcagcaccagccattcagctggattgtagtcacatattccacttacagtgctgtcggcgagtattagaaaatcgatggcttggcccaaggataacatttggatttatatcttgtcccatttgcaagaacaaaattaatcacatagtactaaaagacctacttgatccaataaaagaactctatgaggatgtcagaagaaaagccttaatgagattggaatatgaaggtctgcataagagtgaagctatcacaactcctggtgtgaggttttataatgacccagctggctatgcaatgaatagatatgcatattatgtgtgctacaaatgcagaaaggcatattttggtggtgaagctcgctgcgatgctgaggctggacggggagatgattatgatcccagagagctcatttgtggtgcctgttctgatgtttccagggctcagatgtgtcccaaacatggcacagactttttggaatataaatgtcgctactgctgttcagtggctgtttttttctgttttggaacaacacatttttgtaatgcttgtcatgatgattttcaaagaatgactagcattcctaaggaagaactaccacactgtcctgcaggtcccaaaggcaagcagttagaaggaactgaatgtccactccatgttgttcatccacccactggggaagagtttgctctgggatgtggagtgtgcagaaatgcccacactttttagaacacgcagatcctttgtctacagagagaaaaattgccttcatcccccaagaggatgcggtgaagtttaaactctgctcaggataaggacgggaccatttttacatccatgaaaatgaaccattcacagtgcaagaaggataccaaataccatgtacataattcttgctatgaaaagtttccccattattttggtttatcttcttttgaacaaatgacatcaaacttgtgaggtgtttgcatgtggccattaccgtcattggcctgtgaagcattggacatttatagataattgatataaaagaatcgccatgcccatggactaagaacgatgctggctttcaagcaaaaaagaaaaataatcattgtttattgtatactgcctttttgtaatcctgtacaattgcatcacgggtggggataaaaagaggaatattctggtttatttcctagactgttatttaaaaaaaaaaaaaacattgtgttaggacagcatataaatgtaataagtatcacactgtatataaacatatcaatgtttgtcctgtataagaattactaaattacaaatgcaatttcatttaaacttctaggttaagtttgagcctgaaattttaatgaagtgcaatactgagtgtgcctcattatcttgcagctgtaaacatattggaatgtacatgtcaataaaaccactgtacatttttatacagtgataaagtctacc

SEQ ID NO: 156247 - DNA, 364 bp, Homo sapiens
  Payload ID: 10657
  Gene Symbol: MYCBP2
  Gene Name: MYC binding protein 2, E3 ubiquitin protein ligase
  ENST ID: ENST00000466564
  CDS Start-End: 1-251
acagcatggtagagttctgtgagagtgatgaaggagaggcatggtccttagctagagacagaggcggaaaccagtacctccgacatgaagatgaacaagctcttctggatcagaattctcaaactcctcctccaagccctttctcagtgcaagcttttaataaaggggcaagttgcagtgcccaaggatttgattatggactcggaaatagcaaaggtaggtatttaaaagtaagtcttttacttacctaacttcaatattttttattaccttctcttttatacactttttatttgtgttcacccagaaatctttattaaattaaaatttgttcatggaaagctaataaaaaatgtttacaaag

SEQ ID NO: 156248 - DNA, 1542 bp, Homo sapiens
  Payload ID: 10657
  Gene Symbol: MYCBP2
  Gene Name: MYC binding protein 2, E3 ubiquitin protein ligase
  ENST ID: ENST00000612956
  CDS Start-End: 67-894
cactgtctgccctgtctacacggctgtgacaaaagtgccacaagcctgaagcaagacgccgatgacatgtgcatgatatgtttcaccgaagcgctctcggcagcaccagccattcagctggattgtagtcacatattccacttacagtgctgtcggcgagtattagaaaatcgatggcttggcccaaggataacatttggatttatatcttgtcccatttgcaagaacaaaattaatcacatagtactaaaagacctacttgatccaataaaagaactctatgaggatgtcagaagaaaagccttaatgagattggaatatgaaggtctgcataagagtgaagctatcacaactcctggtgtgaggttttataatgacccagctggctatgcaatgaatagatatgcatattatgtgtgctacaaatgcagaaaggcatattttggtggtgaagctcgctgcgatgctgaggctggacggggagatgattatgatcccagagagctcatttgtggtgcctgttctgatgtttccagggctcagatgtgtcccaaacatggcacagactttttggaatataaatgtcgctactgctgttcagtggctgtttttttctgttttggaacaacacatttttgtaatgcttgtcatgatgattttcaaagaatgactagcattcctaaggaagaactaccacactgtcctgcaggtcccaaaggcaagcagttagaaggaactgaatgtccactccatgttgttcatccacccactggggaagagtttgctctgggatgtggagtgtgcgaaatgcccacactttttagaacacgcagatcctttgtctacagagagaaaaattgccttcatcccccaagaggatgcggtgaagtttaaactctgctcaggataaggacgggaccatttttacatccatgaaaatgaaccattcacagtgcaagaaggataccaaataccatgtacataattcttgctatgaaaagtttccccattattttggtttatcttcttttgaacaaatgacatcaaacttgtgaggtgtttgcatgtggccattaccgtcattggcctgtgaagcattggacatttatagataattgatataaaagaatcgccatgcccatggactaagaacgatgctggctttcaagcaaaaaagaaaaataatcattgtttattgtatactgcctttttgtaatcctgtacaattgcatcacgggtggggataaaaagaggaatattctggtttatttcctagactgttatttaaaaaaaaaaaaaacattgtgttaggacagcatataaatgtaataagtatcacactgtatataaacatatcaatgtttgtcctgtataagaattactaaattacaaatgcaatttcatttaaacttctaggttaagtttgagcctgaaattttaatgaagtgcaatactgagtgtgcctcattatcttgcagctgtaaacatattggaatgtacatgtcaataaaaccactgtacatttttatacagtgataaagt

SEQ ID NO: 156249 - DNA, 5347 bp, Homo sapiens
  Payload ID: 10658
  Gene Symbol: MINA
  Gene Name: MYC induced nuclear antigen
  Uniprot ID: Q8IUF8
  ENST ID: ENST00000333396
  CDS Start-End: 584-1981
gtgcccacgctgccccgcctccagccgctgcgccgcaacgcagtgggctcgcggccgcgagcaacaggccgtgccgggtgagtggggcgctctcgtgggcatcccagcgccggggcaggccgggtagtgcccgatcccgcggggcgcgcgctgctgctttaggcacccgggctcgggtgcgggtctgggagacctgtcggtcggcgagaagcctcggtggccggcgctgtggttgcgggacctgggacgcgctcccaggcgtcccacctccccggagactggggcagggtgggtggggcccggatctaggggtagggtcgcggaagccttggttacagagagtcgcacacgtggcctgctaatggtcgcgacaccggtgacgagcgcacggaaagtttggaggcttagcaaggagggtggtgccggcctccgcccggtggtggcagaactgcctgtgcgagcacggcttccacgtgggctgcgccgccgggcgtcatgtcgggcctaagagacacgctctacagctgtgaaatctgaagttcaggtttgcatttccttactgctttgtcttgaagacagaacgatgccaaagaaagcaaagcctacagggagtgggaaggaagaggggccggctccctgtaagcagatgaagttagaagcagctggggggccttcagctttaaactttgacagtcccagtagtctctttgaaagtttaatctcgcccatcaagacagagacttttttcaaggaattctgggagcagaagccccttctcattcagagagatgaccctgcactggccacatactatgggtccctgttcaagctaacagatctgaagagtctgtgcagccgggggatgtactatggaagagatgtgaatgtctgccggtgtgtcaatgggaagaagaaggttttaaataaagatggcaaagcacactttcttcagctgagaaaagattttgatcagaaaagggcaacgattcagtttcaccaacctcagagatttaaggatgagctttggaggatccaggagaagctggaatgttactttggctccttggttggctcgaatgtgtacataactcccgcaggatctcagggcctgccgccccattatgatgatgtcgaggttttcatcctgcagctggagggagagaaacactggcgcctctaccaccccactgtgcccctggcacgagagtacagcgtggaggccgaggaaaggatcggcaggccggtgcatgagtttatgctgaagccgggtgatttgttgtactttcccagaggaaccattcatcaagcggacactcctgcggggctggcccactctactcacgtgaccatcagcacctaccagaacaattcatggggagatttccttttggataccatctcggggcttgtatttgatactgcaaaggaagacgtggagttacggaccggcataccccggcagctgctcctgcaggtggaatccacaactgttgctacaagacgattaagtggcttcctgaggacacttgcagaccggctggagggcaccaaagaactgctttcctcagacatgaagaaggattttattatgcacagactccccccttactctgcgggagatggggcagagctgtcaacaccaggtggaaagttaccgaggctggacagtgtagtgagactgcagtttaaagaccacattgtcctcacagtactgccggatcaagatcaatctgatgaagctcaagaaaagatggtgtacatctatcattccttaaagaatagtagagagacacacatgatgggaaatgaggaggaaacagagtttcatggacttcgcttccctttgtcacatttggatgcactgaagcaaatttggaatagtccagctatttctgtcaaggacctgaaacttactacagatgaggaaaaggaaagcctggtattatccctctggacagaatgtttaattcaagtagtctagtgcctttgcagaatcaaatgcctactattttatatgcatatattaaaagaaaagcaaagacctgagccgaggagaggatgaattcaagtttccttacctgcgtatctactaacaaacatgagacctccctgttacaggtggtcagttggccaaatgtactaacgggcacatgaaagaaagaacagcaaattaccaagtgtctcagaaaatgacaaaaccatattttgacaagtttatttaatccagtgtggtagaaaaggcacaattccaatgtatcatttagaattgaatgtcattaacctggctttgttctttggaagaaacaacttctttaaagagcttctttggctctagaaaaatttcaaacaattaaaataagaaaaaattttaaactggttttttataatgaaaatatacatacctttgtgtatagacaagcccatgcccattaaaataaagttatcctgtaacataaattttattaaataatacttccccacagatgagaggcacgcaacacctatggacaaaagggagttacagaggctgcttaaaagatggagaaaagcctgagattgaaggaggaaaaaaacccagtatttaaagtctataaaaaatactcaaaatagtgggtcttcgagtttaaaatagtcattgttattttacattctaaagtgcatgtaggttgatattttttaaaatatcattggagaatttaatctttctttataaaaatagagcatttttctgctttctggcaaaagttggggataaaaggaaaaaaagttgtcaaaatgtaattttcagtccaattcaccaggaaaacatgcttgtgaattgtgcagtaaaaggtggtaatgactactggaagctaagtcaaaggtgatttcctacctgattttacttacttaaataaaagttacttacaatgggagtgaaaaactgaggtttctgttatttagtagagaaatcaactccacgtttacttaaagagatggtaaggtcaaggttcaaatgctactgtgttttaatttggatatttgaaatttctcttgaggcaaaaaaaaaaaaaaattgatgcctctccttaaatctaggatgaagtgtcaacatggagacaggtaaccactgttatagagtcttgtcacctaaagggatgtcttggttaacacgtaacagtgcaagtttggccataggttatttatttgtacttttttagtttgaaggactgaggaaacaatagctacagaaaatacttcttgtgccttattcctaacaaagctgaggtccctgcctggggttagttacaagtataaatacttaacgaggtgcgttcattataaaagcctcagtatagaaaccttaaagtttatctaggaaagtttagtatattttcaggtgttgctaaaaaattactcatctgtttgcaaaagtatgacttgacctatagaaatctgtttctttatgctttgtactcatacaagcatctaggtaggatattaataaataatacaggataatagcatcaccagtgtccaataacgggccatcaggaacaggattcacgtttggtggatatgagagaaaataaacacttcaggaaacttgctcaccacagctggagatcaggaatagaacctttccaagatatcataatattttctttataggaacactgagtaatggcaagaatattttgagcttttccatggttaagagcgatagtctcagaggctggagaaaatgttcattctgctcagtgatccaggagtgtgaggacagtagcttcctttccacgtccacaagacaatgacagatgtgtttccttctttgctctttctagggatctttctagggatgttgattctctcacaatatttcaatgtcccatttctgtgtttcttctccctccaggggctgatttacaattacatgagtcttgtcacaataatttcctcctaaaatagaaattccaaaagaaaagattatttgttcaggcaggtgcttagcaatttcacaattttcacaagcttctgttcagctcaccatttcggtggatgaatgtgtcatttacaaagaagtctgaaatgggaagctgagtttgaacaggcttagccattattcacctcaaattggaccttattatgactcaaattgaaatactaaaaggtataatacatgattgtataagtggcgtgccttaatgtgattctttagaacaaagtgctcttgagagaactctggctgaatgtcaggtactgtgtttttgtttctacaccaacaaaactgtgactaacccaattaaagcaacagccatgaataatattggccctgaccttgctgaattcaaaaacaaggttaattgatacctaccataaattctacctgagggtttttaaggaccatggcaattcctggcaaaaagctagagatgtttctaagaaacagatgacattcatttcatggtttatggtgcttgaaatttagaactgttctgagttcacgtagcaaatgaaagttttacaactgtactaatgaacaaaaaccctaagctttgttgtttggctttttctgctaattgttttgtttgtaaaactgcctatcttaattttcttcaagcataattttaaatgacttaacatttctcttatacataaggatgtcctttacccaaaatgaggagatttggaactgaaactaatatccagggacacaacattgggtatcatcaaaggcccacctttaacatcaaggacaagttgatcactgagataagagctgatagttccatttttattcagtctccacttctgcctgaattgcccatgttcagtccatagagctactttagctccaggtgtgtcccggccaccaatcacatcaagacatgtatcactggcctaaaagggttaagaaatgattaattggcagtagtatgtttgctaaagtaagttgaattaggtcccttttatcttaggtaaacaagtcatagacatgaagtgtgtgtgtgtcttatctaaaaaaatactatatagtataatttcagtaagccttttttaatgtcttctttacggctgtgggtaggagatggtacagaaataaaccaactgaaatagaggtacttgtttttaataggatgtctacatctgacaacagatgttcaataaagatttggtgaattggaattaaatgttaaatccctgtttgcttaaaacgtattatgttgagcttggttttcttatgaaaacattgcatgatgggctaaagatatccagacaataattacttttaaaagtttttcatttttgaagcatgagaaaaagtagataatccattggtgatacaataaaacacagtttgaatgtt

SEQ ID NO: 156250 - DNA, 2232 bp, Homo sapiens
  Payload ID: 10658
  Gene Symbol: MINA
  Gene Name: MYC induced nuclear antigen
  Uniprot ID: Q8IUF8
  ENST ID: ENST00000360258
  CDS Start-End: 214-1608
acaccggtgacgagcgcacggaaagtttggaggcttagcaaggagggtggtgccggcctccgcccggtggtggcagaactgcctgtgcgagcacggcttccacgtgggctgcgccgccgggcgtcatgtcgggcctaagagacacgctctacagctgtgaaatctgaagttcaggtttgcatttccttactgctttgtcttgaagacagaacgatgccaaagaaagcaaagcctacagggagtgggaaggaagaggggccggctccctgtaagcagatgaagttagaagcagctggggggccttcagctttaaactttgacagtcccagtagtctctttgaaagtttaatctcgcccatcaagacagagacttttttcaaggaattctgggagcagaagccccttctcattcagagagatgaccctgcactggccacatactatgggtccctgttcaagctaacagatctgaagagtctgtgcagccgggggatgtactatggaagagatgtgaatgtctgccggtgtgtcaatgggaagaagaaggttttaaataaagatggcaaagcacactttcttcagctgagaaaagattttgatcagaaaagggcaacgattcagtttcaccaacctcagagatttaaggatgagctttggaggatccaggagaagctggaatgttactttggctccttggttggctcgaatgtgtacataactcccgcaggatctcagggcctgccgccccattatgatgatgtcgaggttttcatcctgcagctggagggagagaaacactggcgcctctaccaccccactgtgcccctggcacgagagtacagcgtggaggccgaggaaaggatcggcaggccggtgcatgagtttatgctgaagccgggtgatttgttgtactttcccagaggaaccattcatcaagcggacactcctgcggggctggcccactctactcacgtgaccatcagcacctaccagaacaattcatggggagatttccttttggataccatctcggggcttgtatttgatactgcaaaggaagacgtggagttacggaccggcataccccggcagctgctcctggtggaatccacaactgttgctacaagacgattaagtggcttcctgaggacacttgcagaccggctggagggcaccaaagaactgctttcctcagacatgaagaaggattttattatgcacagactccccccttactctgcgggagatggggcagagctgtcaacaccaggtggaaagttaccgaggctggacagtgtagtgagactgcagtttaaagaccacattgtcctcacagtactgccggatcaagatcaatctgatgaagctcaagaaaagatggtgtacatctatcattccttaaagaatagtagagagacacacatgatgggaaatgaggaggaaacagagtttcatggacttcgcttccctttgtcacatttggatgcactgaagcaaatttggaatagtccagctatttctgtcaaggacctgaaacttactacagatgaggaaaaggaaagcctggtattatccctctggacagaatgtttaattcaagtagtctagtgcctttgcagaatcaaatgcctactattttatatgcatatattaaaagaaaagcaaagacctgagccgaggagaggatgaattcaagtttccttacctgcgtatctactaacaaacatgagacctccctgttacaggtggtcagttggccaaatgtactaacgggcacatgaaagaaagaacagcaaattaccaagtgtctcagaaaatgacaaaaccatattttgacaagtttatttaatccagtgtggtagaaaaggcacaattccaatgtatcatttagaattgaatgtcattaacctggctttgttctttggaagaaacaacttctttaaagagcttctttggctctagaaaaatttcaaacaattaaaataagaaaaaattttaaactggttttttataatgaaaatatacatacctttgtgtatagacaagcccatgcccattaaaataaagttatcctgtaacataaattttattaaataatacttccccacagatgagaggcacgcaacacctatggacaaaagggagttacagaggctgcttaaaagatggagaaaagcctgagattgaaggaggaaaaaaacccagtatttaaagtctataaaaaatactcaa

SEQ ID NO: 156251 - DNA, 2341 bp, Homo sapiens
  Payload ID: 10658
  Gene Symbol: MINA
  Gene Name: MYC induced nuclear antigen
  Uniprot ID: Q8IUF8
  ENST ID: ENST00000394198
  CDS Start-End: 111-1508
acgctgccccgcctccagccgctgcgccgcaacgcagtgggctcgcggccgcgagcaacaggccgtgccgggtttgcatttccttactgctttgtcttgaagacagaacgatgccaaagaaagcaaagcctacagggagtgggaaggaagaggggccggctccctgtaagcagatgaagttagaagcagctggggggccttcagctttaaactttgacagtcccagtagtctctttgaaagtttaatctcgcccatcaagacagagacttttttcaaggaattctgggagcagaagccccttctcattcagagagatgaccctgcactggccacatactatgggtccctgttcaagctaacagatctgaagagtctgtgcagccgggggatgtactatggaagagatgtgaatgtctgccggtgtgtcaatgggaagaagaaggttttaaataaagatggcaaagcacactttcttcagctgagaaaagattttgatcagaaaagggcaacgattcagtttcaccaacctcagagatttaaggatgagctttggaggatccaggagaagctggaatgttactttggctccttggttggctcgaatgtgtacataactcccgcaggatctcagggcctgccgccccattatgatgatgtcgaggttttcatcctgcagctggagggagagaaacactggcgcctctaccaccccactgtgcccctggcacgagagtacagcgtggaggccgaggaaaggatcggcaggccggtgcatgagtttatgctgaagccgggtgatttgttgtactttcccagaggaaccattcatcaagcggacactcctgcggggctggcccactctactcacgtgaccatcagcacctaccagaacaattcatggggagatttccttttggataccatctcggggcttgtatttgatactgcaaaggaagacgtggagttacggaccggcataccccggcagctgctcctgcaggtggaatccacaactgttgctacaagacgattaagtggcttcctgaggacacttgcagaccggctggagggcaccaaagaactgctttcctcagacatgaagaaggattttattatgcacagactccccccttactctgcgggagatggggcagagctgtcaacaccaggtggaaagttaccgaggctggacagtgtagtgagactgcagtttaaagaccacattgtcctcacagtactgccggatcaagatcaatctgatgaagctcaagaaaagatggtgtacatctatcattccttaaagaatagtagagagacacacatgatgggaaatgaggaggaaacagagtttcatggacttcgcttccctttgtcacatttggatgcactgaagcaaatttggaatagtccagctatttctgtcaaggacctgaaacttactacagatgaggaaaaggaaagcctggtattatccctctggacagaatgtttaattcaagtagtctagtgcctttgcagaatcaaatgcctactattttatatgcatatattaaaagaaaagcaaagacctgagccgaggagaggatgaattcaagtttccttacctgcgtatctactaacaaacatgagacctccctgttacaggtggtcagttggccaaatgtactaacgggcacatgaaagaaagaacagcaaattaccaagtgtctcagaaaatgacaaaaccatattttgacaagtttatttaatccagtgtggtagaaaaggcacaattccaatgtatcatttagaattgaatgtcattaacctggctttgttctttggaagaaacaacttctttaaagagcttctttggctctagaaaaatttcaaacaattaaaataagaaaaaattttaaactggttttttataatgaaaatatacatacctttgtgtatagacaagcccatgcccattaaaataaagttatcctgtaacataaattttattaaataatacttccccacagatgagaggcacgcaacacctatggacaaaagggagttacagaggctgcttaaaagatggagaaaagcctgagattgaaggaggaaaaaaacccagtatttaaagtctataaaaaatactcaaaatagtgggtcttcgagtttaaaatagtcattgttattttacattctaaagtgcatgtaggttgatattttttaaaatatcattggagaatttaatctttctttataaaaatagagcatttttctgctttctggcaaaagttggggataaaaggaaaaaaagttgtcaaaatgtaattttcagtccaattcaccaggaaaacatgcttg

SEQ ID NO: 156252 - DNA, 591 bp, Homo sapiens
  Payload ID: 10658
  Gene Symbol: MINA
  Gene Name: MYC induced nuclear antigen
  ENST ID: ENST00000503097
  CDS Start-End: 1-84
accacattgtcctcacagtactgccggatcaagatcaatctgatgaagctcaagaaaagatggtgtacatctatcattccttaaagaatagtagagagacacacatgatgggaaatgaggaggaaacagaggtttgtttcaactgaaaacaaatgcctatcctgtgacttgggtggtggttgggaagaattgattatttttgatttacaggtaatatgctttttatggctgcactgtggacttaaccattttgcactactcacagagctcctgcatggggatgattaagtcagacatttctgtgatacatgcacaccagttttaagacatactagctgggacctgtagccttataggaatggtataatgtaaaacatttcaaattactaatatcacttactacataaattaggatgccttttatatagaagttggcatcttttatgttatctaattgtagtgtgtctaaaatactcatgaggggtatcaaaaataatgatgtatggagaataaatttacaggaaaatgctacttcaatgacataagtagtatacatatattttgacaaataaatttatcctttcagtttca

SEQ ID NO: 156253 - DNA, 664 bp, Homo sapiens
  Payload ID: 10658
  Gene Symbol: MINA
  Gene Name: MYC induced nuclear antigen
  ENST ID: ENST00000506099
  CDS Start-End: 328-664
gcttccaattcatttaccagcaaataattccgcaacgattggccgacagctgggttgtccaacaggttactgagaccaggttattcactgttttcaggaaggatagactgggaggaagaggatctgatttcgccactcattagctgtaaatctggtgcctcgggtttcatgtcactgggctcatctttgagcagaggaacctgatttactcagcttcttctgctggtactggtttttgcctcctggacatcaagctttgtaacctcatggtcacgaaaatacattgaggtttgcatttccttactgctttgtcttgaagacagaacgatgccaaagaaagcaaagcctacagggagtgggaaggaagaggggccggctccctgtaagcagatgaagttagaagcagctggggggccttcagctttaaactttgacagtcccagtagtctctttgaaagtttaatctcgcccatcaagacagagacttttttcaaggaattctgggagcagaagccccttctcattcagagagatgaccctgcactggccacatactatgggtccctgttcaagctaacagatctgaagagtctgtgcagccgggggatgtactatggaagagatgtgaatgtctgccggtgtgtcaatgggaagaagaaggttt

SEQ ID NO: 156254 - DNA, 708 bp, Homo sapiens
  Payload ID: 10658
  Gene Symbol: MINA
  Gene Name: MYC induced nuclear antigen
  ENST ID: ENST00000507612
  CDS Start-End: 1-327
gaatgttactttggctccttggttggctcgaatgtgtacataactcccgcaggatctcagggcctgccgccccattatgatgatgtcgaggttttcatcctgcagctggagggagagaaacactggcgcctctaccaccccactgtgcccctggcacgagagtacagcgtggaggccgaggaaaggatcggcaggccggtgcatgagtttatgctgaagccgggtgatttgttgtactttcccagaggaaccattcatcaagcggacactcctgcggggctggcccactctactcacgtgaccatcagcacctaccagaacaagtaaacactgcctcccagctgcacatgctaggacagctctgagtcctggcctgcagcagccacattcaggagggatatgagggagttggcccctacctcctatgcaaaccccagggtttatgtcctttactgacttccacattcctttgatgtcccatgtatgtgactggtccctctggacttgcttctggggacatcatgaacctgactctgtaggatgtggggcattgcccaaatagagagtcacatagtttggaaagaaagagactagctgtgggtacatcagtgtgttagtgatgccaggctgggctcatactctctctctttttttttaatatgataaaatatatagaacataaaatataccattttaaaccattttaaa

SEQ ID NO: 156255 - DNA, 1225 bp, Homo sapiens
  Payload ID: 10658
  Gene Symbol: MINA
  Gene Name: MYC induced nuclear antigen
  Uniprot ID: Q8IUF8
  ENST ID: ENST00000514314
  CDS Start-End: 31-873
tccttactgctttgtcttgaagacagaacgatgccaaagaaagcaaagcctacagggagtgggaaggaagaggggccggctccctgtaagcagatgaagttagaagcagctggggggccttcagctttaaactttgacagtcccagtagtctctttgaaagtttaatctcgcccatcaagacagagacttttttcaaggaattctgggagcagaagccccttctcattcagagagatgaccctgcactggccacatactatgggtccctgttcaagctaacagatctgaagagtctgtgcagccgggggatgtactatggaagagatgtgaatgtctgccggtgtgtcaatgggaagaagaaggttttaaataaagatggcaaagcacactttcttcagctgagaaaagattttgatcagaaaagggcaacgattcagtttcaccaacctcagagatttaaggatgagctttggaggatccaggagaagctggaatgttactttggctccttggttggctcgaatgtgtacataactcccgcaggatctcagggcctgccgccccattatgatgatgtcgaggttttcatcctgcagctggagggagagaaacactggcgcctctaccaccccactgtgcccctggcacgagagtacagcgtggaggccgaggaaaggatcggcaggccggtgcatgagtttatgctgaagccgggtgatttgttgtactttcccagaggaaccattcatcaagcggacactcctgcggggctggcccactctactcacgtgaccatcagcacctaccagaacaatgatgctggagctagaatgagaagatgtgacttgagggccattgctccccagaaatgatcctgtgttttgagcctaatgctccttcaggtaccatgtaaagttcatggggagatttccttttggataccatctcggggcttgtatttgatactgcaaaggaagacgtggagttacggaccggcataccccggcagctgctcctgcaggtggaatccacaactgttgctacaagacgattaagtggcttcctgaggacacttgcagaccggctggagggcaccaaagaactgctttcctcagacatgaagaaggattttattatgcacagactccccccttactctgcgggagatggggcagagctgtcaacaccaggtggaaagttaccgaggctggacagtgtagtgag

SEQ ID NO: 156256 - DNA, 3030 bp, Homo sapiens
  Payload ID: 10659
  Gene Symbol: MYCT1
  Gene Name: myc target 1
  Uniprot ID: Q8N699
  ENST ID: ENST00000367245
  CDS Start-End: 9-716
ttccttttatgcgaacacaagtatatgaggggttgtgtaaaaattatttttctcttgctgtactacaaagagatagaatcaaactgctttttttcgacatactggtttttctttctgtttttcttctctttcttctatttcttgtggatattatggctaataacacaacaagtttagggagtccatggccagaaaacttttgggaggaccttatcatgtccttcactgtatccatggcaatcgggctggtacttggaggatttatttgggctgtgttcatttgtctgtctcgaagaagaagagccagtgctcccatctcacagtggagttcaagcaggagatctaggtcttcttacacccacggcctcaacagaactggattttaccgccacagtggctgtgaacgtcgaagcaacctcagcctggccagtctcaccttccagcgacaagcttccctggaacaagcaaattcctttccaagaaaatcaagtttcagagcttctactttccatccctttctgcaatgtccaccacttcctgtggaaactgagagtcagctggtgactctcccttcttccaatatctctcccaccatcagcacttcccacagtctgagccgtcctgactactggtccagtaacagtcttcgagtgggcctttcaacaccgcccccacctgcctatgagtccatcatcaaggcattcccagattcctgagtagggtggcttttggtttttgtttctttcttgtcttgtcttttattgaaaggaaatcaaaaataggctaaacagaattttgagggcatggcccaaataactcatgagttccaagttgaaacatggttgtgcaagttggacattacaatgtaaaacacattttcttcaaacacgttttcccttttgtttcaaaaaatgtaatattttcccccaagcgttttatatttatgtattttgtattcaatgtgaggcttattaaaaatagtgattctaatgtaagaatcagctaagatgcattatatatattttaattaaaattaaaacttcagatatttgtggattacaatcctcatttacttccaatgtgactaaaaagagaaaaaaaatcactgtgtcactttaaagaaaaatcttctaagggatttggattttactttctttagaatgacaagtgaatcatattgacattttacaatcttagatttttctttttttttcttttgagacagggtcttgatccgtcgcccaggcgggagttgcagtagcatgatcaggactcactgcagcctctatctcccaggctcaagtaatcctcccatcttagtgccccaagtagctgggactacaggggtgcactaccacaccgggttgaatttttttttaattttagtagagatgaagtgtcactatgttaccaaggctggtctcaaactcctaaactcagatgatcctcctgcctcggcctcccaaagtgctggaattagcctggccaatcttggatttttaatggaatatgtgggcacaaaatgacagaacataggacattctaaagttccttgatttgatcattataagaagtgtgggactcaagcacaggaaactgaactcttttggtgtcattggatgtttcatttttgacactaattttttctggacaaactctttatgtgtttttcccaagaatagttatctacttcctggaggcaaaatccttggatttactaacatgatgatttaccttttcttcaccgttgtcgttacattgttagaaaagcaacaggaaaaaatccaattcatttgacctaaaaacaagcctcaagtttaaaaccaagctcacgtttttcttaagggaaaaattttctttcttaaacttacatctagcaacttggaaagcactttctctggggatcttcttttgtaactttgcagacaaataagtatgagtcactggggagagagtttgttattgaaatagatgttgcccatgaagaattctccttcctggattgactcttaatcatcaggcatcattcctggtttgcttctctacgaatctcaattccaacttctctgcagagtctgtacagtgattaagccatgccagatggtctttggtgcacacagttatttaagaatccacttccacaggtggctgcccttgtaaggaagaatgcatccctaaatgtggccaccagagagttccagtgggcagatgtctgtggctgcccttctcatttaaggacatgagttcactggagtattactcaaaaagtctgtggttcatttccagtattgtgaatatttagtttatgtggccgtttctttgtttctttgaacagtgggattttcagtgaaaaagtaccctctttttcatttcctattgcagtggtcacagctaatagtgtctgaacatggttcaagaataagagattccatgtagcattttctttattattttcatttcccttatattatccatcattccttaaggacaattattcttaataatgcttatagaaaatgttctctaattaaacatgccaaaaggaaaaagtaagagaaagagggagcaagaagaaaatggaagaaaaagggaaaaaagctaaccggataaccaatttgttataagttggttttcaacaaagaaatttagcagccaagtaaggtttcaagggaatattaacttggtatcagggctacttttttttttttttttttacttgcatgtcatccttaatgtctaacatgaaaaatcagcaaagagtatggtttttatcaagaatttgtgttgggagtaaaaactgctttatagctcccaaattaggaagagaagagcagaaatcctctggggcatttaaccatctggcagaattgttgctgcacccttatcccagttataagacagtcaaaatgactatttcctaaatattgtgagtgtatgaaatgtgaaattaaagcaaaaactggagacttttaatgtatttctttaatttgaaatgttttgtggattgtgaaataaaaataaatttatgtc

SEQ ID NO: 156257 - DNA, 724 bp, Homo sapiens
  Payload ID: 10659
  Gene Symbol: MYCT1
  Gene Name: myc target 1
  ENST ID: ENST00000529453
  CDS Start-End: 7-210
ccttttatgcgaacacaagtatatgaggggttgtgtaaaaattatttttctcttgctgtactacaaagagatagaatcaaactgctttttttcgacatactggtttttctttctgtttttcttctctttcttctatttcttgtggatattatggctaataacacaacaagtttagggagtccatggccagaaaacttttgggggtcttgatccgtcgcccaggcgggagttgcagtagcatgatcaggactcactgcagcctctatctcccaggctcaagtaatcctcccatcttagtgccccaagtagctgggactacaggggtgcactaccacaccgggttgaatttttttttaattttagtagagatgaagtgtcactatgttaccaaggctggtctcaaactcctaaactcagatgatcctcctgcctcggcctcccaaagtgctggaattagcctggccaatcttggatttttaatggaatatgtgggcacaaaatgacagaacataggacattctaaagttccttgatttgatcattataagaagtgtgggactcaagcacaggaaactgaactcttttggtgtcattggatgtttcatttttgacactaattttttctggacaaactctttatgtgtttttcccaagaatagttatctacttcctggaggcaaaatccttggatttactaacatgatgatttaccttttcttcaccg

SEQ ID NO: 156258 - DNA, 2389 bp, Homo sapiens
  Payload ID: 10659
  Gene Symbol: MYCT1
  Gene Name: myc target 1
  ENST ID: ENST00000532295
  CDS Start-End: 1-650
aaagagatagaatcaaactgctttttttcgacatactggtttttctttctgtttttcttctctttcttctatttcttgtggatattatggctaataacacaacaagtttagggagtccatggccagaaaacttttgggaggaccttatcatgtccttcactgtatccatggcaatcgggctggtacttggaggatttatttgggctgtgttcatttgtctgtctcgaagaagaagagccagtgctcccatctcacagtggagttcaagcaggagatctaggtcttcttacacccacggcctcaacagaactggattttaccgccacagtggctgtgaacgtcgaagcaacctcagcctggccagtctcaccttccagcgacaagcttccctggaacaagcaaattcctttccaagaaaatcaagtttcagagcttctactttccatccctttctgcaatgtccaccacttcctgtggaaactgagagtcagctggtgactctcccttcttccaatatctctcccaccatcagcacttcccacagtctgagccgtcctgactactggtccagtaacagtcttcgagtgggcctttcaacaccgcccccacctgcctatgagtccatcatcaaggcattcccagattcctgaggtcttgatccgtcgcccaggcgggagttgcagtagcatgatcaggactcactgcagcctctatctcccaggctcaagtaatcctcccatcttagtgccccaagtagctgggactacaggggtgcactaccacaccgggttgaatttttttttaattttagtagagatgaagtgtcactatgttaccaaggctggtctcaaactcctaaactcagatgatcctcctgcctcggcctcccaaagtgctggaattagcctggccaatcttggatttttaatggaatatgtgggcacaaaatgacagaacataggacattctaaagttccttgatttgatcattataagaagtgtgggactcaagcacaggaaactgaactcttttggtgtcattggatgtttcatttttgacactaattttttctggacaaactctttatgtgtttttcccaagaatagttatctacttcctggaggcaaaatccttggatttactaacatgatgatttaccttttcttcaccgttgtcgttacattgttagaaaagcaacaggaaaaaatccaattcatttgacctaaaaacaagcctcaagtttaaaaccaagctcacgtttttcttaagggaaaaattttctttcttaaacttacatctagcaacttggaaagcactttctctggggatcttcttttgtaactttgcagacaaataagtatgagtcactggggagagagtttgttattgaaatagatgttgcccatgaagaattctccttcctggattgactcttaatcatcaggcatcattcctggtttgcttctctacgaatctcaattccaacttctctgcagagtctgtacagtgattaagccatgccagatggtctttggtgcacacagttatttaagaatccacttccacaggtggctgcccttgtaaggaagaatgcatccctaaatgtggccaccagagagttccagtgggcagatgtctgtggctgcccttctcatttaaggacatgagttcactggagtattactcaaaaagtctgtggttcatttccagtattgtgaatatttagtttatgtggccgtttctttgtttctttgaacagtgggattttcagtgaaaaagtaccctctttttcatttcctattgcagtggtcacagctaatagtgtctgaacatggttcaagaataagagattccatgtagcattttctttattattttcatttcccttatattatccatcattccttaaggacaattattcttaataatgcttatagaaaatgttctctaattaaacatgccaaaaggaaaaagtaagagaaagagggagcaagaagaaaatggaagaaaaagggaaaaaagctaaccggataaccaatttgttataagttggttttcaacaaagaaatttagcagccaagtaaggtttcaagggaatattaacttggtatcagggctacttttttttttttttttttacttgcatgtcatccttaatgtctaacatgaaaaatcagcaaagagtatggtttttatcaagaatttgtgttgggagtaaaaactgctttatagctcccaaattaggaagagaagagcagaaatcctctggggcatttaaccatctggcagaattgttgctgcacccttatcccagttataagacagtcaaaatgactatttcctaaatattgtgagtgtatgaaatgtgaaattaaagcaaaaactgga

SEQ ID NO: 156259 - DNA, 2698 bp, Homo sapiens
  Payload ID: 10660
  Gene Symbol: MAZ
  Gene Name: MYC-associated zinc finger protein (purine-binding transcription factor)
  Uniprot ID: P56270
  ENST ID: ENST00000219782
  CDS Start-End: 107-1588
cgcggcccagcccggccggccgggggcggcgccccgagcccgggccccgcgcggcccgcgcccccggcccccgctgagccccgggggccccgctgcggccgaggccatgttcccggtgtttccttgcacgctgctggccccccccttccccgtgctgggcctggactcccggggggtgggcggcctcatgaactccttcccgccacctcagggtcacgcccagaaccccctgcaggtcggggctgagctccagtcccgcttctttgcctcccagggctgcgcccagagtccattccaggccgcgccggcgcccccgcccacgccccaggccccggcggccgagcccctccaggtggacttgctcccggtgctcgccgccgcccaggagtccgccgcggctgctgcggccgctgccgccgctgctgccgccgtcgctgccgcgcccccggcccctgccgccgcctctacggtggacacagcggccctgaagcagcctccggcgccccctccgccacccccgccagtgtcggcgcccgcggccgaggccgcgccccccgcctccgccgccactatcgccgcggcggcggccaccgccgtcgtagccccaacctcgacggtcgccgtggccccggtcgcgtctgccttggagaagaagacaaagagcaaggggccctacatctgcgctctgtgcgccaaggagttcaagaacggctacaatctccggaggcacgaagccatccacacgggagccaaggccggccgggtcccctcgggtgctatgaagatgccgaccatggtgcccctgagcctcctgagcgtgccccagctgagcggagccggcgggggagggggagaggcgggtgccggcggcggcgctgccgcagtggccgccggtggcgtggtgaccacgaccgcctcggggaagcgcatccggaagaaccatgcctgcgagatgtgtggcaaggccttccgcgacgtctaccacctgaaccgacacaagctgtcgcactcggacgagaagccctaccagtgcccggtgtgccagcagcgcttcaagcgcaaggaccgcatgagctaccacgtgcgctcacatgacggcgctgtgcacaagccctacaactgctcccactgtggcaagagcttctcccggccggatcacctcaacagtcacgtcagacaagtgcactcaacagaacggcccttcaaatgtgagaaatgtgaggcagctttcgccacgaaggatcggctgcgggcgcacacagtacgacacgaggagaaagtgccatgtcacgtgtgtggcaagatgctgagctcggcttatatttcggaccacatgaaggtgcacagccagggtcctcaccatgtctgtgagctctgcaacaaaggcttcaccacggcagcatacctgcgcatccacgcggtgaaggaccacgggctccaggccccgcgggctgaccgcatcctgtgcaagctgtgcagcgtgcactgcaagacccctgcccagctggccggccacatgcagacccatctggggggggccgccccccctgtcccgggagacgccccccagccacagcccacctgctgagggggacccccgcacccaccaggtactggtgaggtttgtccaatggcggcggcagcggcagcggcggcagcggcagcagcggcagcagtagcagcccctcccacagctgtgggctccctctcgggggcggagggggtgcctgtgagctctcagccacttccctcccaaccctggtgagctccaagttggttgcgggggagaggggagaatggagtagagtcccttggtacaagctcctctcccccctcttttcccaccaactcctatttccctaccaaccaaggagcctccagaaggaaaggaggaagaaatgttttcttaggggaattcgctaggttttaacgatttgtttctcctgctcctcttctgtcagacctgaccccacacaaacctgtcccctcggttgtgttgaagtcccctggacagtgggcaggggtggcagaggacacgagcagccactgcccgtaccccctctcctctctgtaagcccatgccctgtcttcccagggacttgtgagcctcttccctcgacggtcctcttctctccttccagtcctctccccctgctgtctgcagcccctccccggggagttggtgctttcttttccttttttttttttttccagggggagggaggagaggaaggagggggatcagagctgtcccaaagagggaaagcggtgaggtttgaggaggggcagaagcagggccggcaaaggttgtaccttcataaggtggtatggggggttggggtcaggccctgaacatcgtcctacttgagaatctgtcaggggaaaaagtcaaggggagcaggaggaagagccaggagggccagaggcagagaagagatggagtcttaggggccagggtgagcgaggggtccagggcctagaggtgcttcctgggggcgggggaatgcagccagtgtccccctcccctcttccaccccagctccagccctggtcttgtcttttcatccctcttccccacgacagaagaagttgtggccctggccatgtcatcgtgttcctgtgtcccctgcatgtaccccaccctccaccccttccttttgcgcggaccccattacaataaattttaaataaaatcctg

SEQ ID NO: 156260 - DNA, 2532 bp, Homo sapiens
  Payload ID: 10660
  Gene Symbol: MAZ
  Gene Name: MYC-associated zinc finger protein (purine-binding transcription factor)
  Uniprot ID: P56270
  ENST ID: ENST00000322945
  CDS Start-End: 166-1599
ctccctcccgccggccggggtgcgcgggcggcggggcggcccgcgggccatgcgttcggcgcggcccagcccggccggccgggggcggcgccccgagcccgggccccgcgcggcccgcgcccccggcccccgctgagccccgggggccccgctgcggccgaggccatgttcccggtgtttccttgcacgctgctggccccccccttccccgtgctgggcctggactcccggggggtgggcggcctcatgaactccttcccgccacctcagggtcacgcccagaaccccctgcaggtcggggctgagctccagtcccgcttctttgcctcccagggctgcgcccagagtccattccaggccgcgccggcgcccccgcccacgccccaggccccggcggccgagcccctccaggtggacttgctcccggtgctcgccgccgcccaggagtccgccgcggctgctgcggccgctgccgccgctgctgccgccgtcgctgccgcgcccccggcccctgccgccgcctctacggtggacacagcggccctgaagcagcctccggcgccccctccgccacccccgccagtgtcggcgcccgcggccgaggccgcgccccccgcctccgccgccactatcgccgcggcggcggccaccgccgtcgtagccccaacctcgacggtcgccgtggccccggtcgcgtctgccttggagaagaagacaaagagcaaggggccctacatctgcgctctgtgcgccaaggagttcaagaacggctacaatctccggaggcacgaagccatccacacgggagccaaggccggccgggtcccctcgggtgctatgaagatgccgaccatggtgcccctgagcctcctgagcgtgccccagctgagcggagccggcgggggagggggagaggcgggtgccggcggcggcgctgccgcagtggccgccggtggcgtggtgaccacgaccgcctcggggaagcgcatccggaagaaccatgcctgcgagatgtgtggcaaggccttccgcgacgtctaccacctgaaccgacacaagctgtcgcactcggacgagaagccctaccagtgcccggtgtgccagcagcgcttcaagcgcaaggaccgcatgagctaccacgtgcgctcacatgacggcgctgtgcacaagccctacaactgctcccactgtggcaagagcttctcccggccggatcacctcaacagtcacgtcagacaagtgcactcaacagaacggcccttcaaatgtgagaaatgtgaggcagctttcgccacgaaggatcggctgcgggcgcacacagtacgacacgaggagaaagtgccatgtcacgtgtgtggcaagatgctgagctcggcttatatttcggaccacatgaaggtgcacagccagggtcctcaccatgtctgtgagctctgcaacaaaggtactggtgaggtttgtccaatggcggcggcagcggcagcggcggcagcggcagcagcggcagcagtagcagcccctcccacagctgtgggctccctctcgggggcggagggggtgcctgtgagctctcagccacttccctcccaaccctggtgagctccaagttggttgcgggggagaggggagaatggagtagagtcccttggtacaagctcctctcccccctcttttcccaccaactcctatttccctaccaaccaaggagcctccagaaggaaaggaggaagaaatgttttcttaggggaattcgctaggttttaacgatttgtttctcctgctcctcttctgtcagacctgaccccacacaaacctgtcccctcggttgtgttgaagtcccctggacagtgggcaggggtggcagaggacacgagcagccactgcccgtaccccctctcctctctgtaagcccatgccctgtcttcccagggacttgtgagcctcttccctcgacggtcctcttctctccttccagtcctctccccctgctgtctgcagcccctccccggggagttggtgctttcttttccttttttttttttttccagggggagggaggagaggaaggagggggatcagagctgtcccaaagagggaaagcggtgaggtttgaggaggggcagaagcagggccggcaaaggttgtaccttcataaggtggtatggggggttggggtcaggccctgaacatcgtcctacttgagaatctgtcaggggaaaaagtcaaggggagcaggaggaagagccaggagggccagaggcagagaagagatggagtcttaggggccagggtgagcgaggggtccagggcctagaggtgcttcctgggggcgggggaatgcagccagtgtccccctcccctcttccaccccagctccagccctggtcttgtcttttcatccctcttccccacgacagaagaagttgtggccctggccatgtcatcgtgttcctgtgtcccctgcatgtaccccaccctccaccccttccttttgcgcggaccccattacaataaattttaaataaaatcctg

SEQ ID NO: 156261 - DNA, 2333 bp, Homo sapiens
  Payload ID: 10660
  Gene Symbol: MAZ
  Gene Name: MYC-associated zinc finger protein (purine-binding transcription factor)
  Uniprot ID: P56270
  ENST ID: ENST00000545521
  CDS Start-End: 40-1404
ccagggtgagcgcgagccacctccctccctccctccgccatggatcccagcaactggagcagcttcatcttccagggtcacgcccagaaccccctgcaggtcggggctgagctccagtcccgcttctttgcctcccagggctgcgcccagagtccattccaggccgcgccggcgcccccgcccacgccccaggccccggcggccgagcccctccaggtggacttgctcccggtgctcgccgccgcccaggagtccgccgcggctgctgcggccgctgccgccgctgctgccgccgtcgctgccgcgcccccggcccctgccgccgcctctacggtggacacagcggccctgaagcagcctccggcgccccctccgccacccccgccagtgtcggcgcccgcggccgaggccgcgccccccgcctccgccgccactatcgccgcggcggcggccaccgccgtcgtagccccaacctcgacggtcgccgtggccccggtcgcgtctgccttggagaagaagacaaagagcaaggggccctacatctgcgctctgtgcgccaaggagttcaagaacggctacaatctccggaggcacgaagccatccacacgggagccaaggccggccgggtcccctcgggtgctatgaagatgccgaccatggtgcccctgagcctcctgagcgtgccccagctgagcggagccggcgggggagggggagaggcgggtgccggcggcggcgctgccgcagtggccgccggtggcgtggtgaccacgaccgcctcggggaagcgcatccggaagaaccatgcctgcgagatgtgtggcaaggccttccgcgacgtctaccacctgaaccgacacaagctgtcgcactcggacgagaagccctaccagtgcccggtgtgccagcagcgcttcaagcgcaaggaccgcatgagctaccacgtgcgctcacatgacggcgctgtgcacaagccctacaactgctcccactgtggcaagagcttctcccggccggatcacctcaacagtcacgtcagacaagtgcactcaacagaacggcccttcaaatgtgagaaatgtgaggcagctttcgccacgaaggatcggctgcgggcgcacacagtacgacacgaggagaaagtgccatgtcacgtgtgtggcaagatgctgagctcggcttatatttcggaccacatgaaggtgcacagccagggtcctcaccatgtctgtgagctctgcaacaaaggtactggtgaggtttgtccaatggcggcggcagcggcagcggcggcagcggcagcagcggcagcagtagcagcccctcccacagctgtgggctccctctcgggggcggagggggtgcctgtgagctctcagccacttccctcccaaccctggtgagctccaagttggttgcgggggagaggggagaatggagtagagtcccttggtacaagctcctctcccccctcttttcccaccaactcctatttccctaccaaccaaggagcctccagaaggaaaggaggaagaaatgttttcttaggggaattcgctaggttttaacgatttgtttctcctgctcctcttctgtcagacctgaccccacacaaacctgtcccctcggttgtgttgaagtcccctggacagtgggcaggggtggcagaggacacgagcagccactgcccgtaccccctctcctctctgtaagcccatgccctgtcttcccagggacttgtgagcctcttccctcgacggtcctcttctctccttccagtcctctccccctgctgtctgcagcccctccccggggagttggtgctttcttttccttttttttttttttccagggggagggaggagaggaaggagggggatcagagctgtcccaaagagggaaagcggtgaggtttgaggaggggcagaagcagggccggcaaaggttgtaccttcataaggtggtatggggggttggggtcaggccctgaacatcgtcctacttgagaatctgtcaggggaaaaagtcaaggggagcaggaggaagagccaggagggccagaggcagagaagagatggagtcttaggggccagggtgagcgaggggtccagggcctagaggtgcttcctgggggcgggggaatgcagccagtgtccccctcccctcttccaccccagctccagccctggtcttgtcttttcatccctcttccccacgacagaagaagttgtggccctggccatgtcatcgtgttcctgtgtcccctgcatgtaccccaccctccaccccttccttttgcgcggaccccattacaataaattttaaataaaat

SEQ ID NO: 156262 - DNA, 1464 bp, Homo sapiens
  Payload ID: 10660
  Gene Symbol: MAZ
  Gene Name: MYC-associated zinc finger protein (purine-binding transcription factor)
  ENST ID: ENST00000568544
  CDS Start-End: 334-570
aggcggcggcggcggcagcggctgctgggctccaggggagggatttcctgcttaagtgtcgctgtgacggcctgggctccgggaggaggcgcagggatcctcggaaaggcctgtggtgcggtttggtggatttggggcgcaccacctccgccctaaccccaaccccaacgtgtccccaggccggatcacctcaacagtcacgtcagacaagtgcactcaacagaacggcccttcaaatgtgagaaatgtgaggcagctttcgccacgaaggatcggctgcgggcgcacacagtacgacacgaggagaaagtgccatgtcacgtgtgtggcaagatgctgagctcggcttatatttcggaccacatgaaggtgcacagccagggtcctcaccatgtctgtgagctctgcaacaaaggtactggtgaggtttgtccaatggcggcggcagcggcagcggcggcagcggcagcagcggcagcagtagcagcccctcccacagctgtgggctccctctcgggggcggagggggtgcctgtgagctctcagccacttccctcccaaccctggtgagctccaagttggttgcgggggagaggggagaatggagtagagtcccttggtacaagctcctctcccccctcttttcccaccaactcctatttccctaccaaccaaggagcctccagaaggaaaggaggaagaaatgttttcttaggggaattcgctaggttttaacgatttgtttctcctgctcctcttctgtcagacctgaccccacacaaacctgtcccctcggttgtgttgaagtcccctggacagtgggcaggggtggcagaggacacgagcagccactgcccgtaccccctctcctctctgtaagcccatgccctgtcttcccagggacttgtgagcctcttccctcgacggtcctcttctctccttccagtcctctccccctgctgtctgcagcccctccccggggagttggtgctttcttttccttttttttttttttccagggggagggaggagaggaaggagggggatcagagctgtcccaaagagggaaagcggtgaggtttgaggaggggcagaagcagggccggcaaaggttgtaccttcataaggtggtatggggggttggggtcaggccctgaacatcgtcctacttgagaatctgtcaggggaaaaagtcaaggggagcaggaggaagagccaggagggccagaggcagagaagagatggagtcttaggggccagggtgagcgaggggtccagggcctagaggtgcttcctgggggcgggggaatgcagccagtgtccccctcccctcttccaccccagctccagccctggtcttgtcttttcatccctcttccccacgacagaagaagttgtggccctggccatgtcatcgtgttcctgtgtcccctgcatgtaccccaccctccaccccttcctttt

SEQ ID NO: 156263 - DNA, 1574 bp, Homo sapiens
  Payload ID: 10660
  Gene Symbol: MAZ
  Gene Name: MYC-associated zinc finger protein (purine-binding transcription factor)
  Uniprot ID: P56270
  ENST ID: ENST00000562337
  CDS Start-End: 153-671
gccggggtgcgcgggcggcggggcggcccgcgggccatgcgttcggcgcggcccagcccggccggccgggggcggcgccccgagcccgggccccgcgcggcccgcgcccccggcccccgctgagccccgggggccccgctgcggccgaggccatgttcccggtgtttccttgcacgctgctggccccccccttccccgtgctgggcctggactcccggggggtgggcggcctcatgaactccttcccgccacctcagggtcacgcccagaaccccctgcaggtcggggctgagctccagtcccgcttctttgcctcccagggctgcgcccagagtccattccagaaatgtgaggcagctttcgccacgaaggatcggctgcgggcgcacacagtacgacacgaggagaaagtgccatgtcacgtgtgtggcaagatgctgagctcggcttatatttcggaccacatgaaggtgcacagccagggtcctcaccatgtctgtgagctctgcaacaaaggtactggtgaggtttgtccaatggcggcggcagcggcagcggcggcagcggcagcagcggcagcagtagcagcccctcccacagctgtgggctccctctcgggggcggagggggtgcctgtgagctctcagccacttccctcccaaccctggtgagctccaagttggttgcgggggagaggggagaatggagtagagtcccttggtacaagctcctctcccccctcttttcccaccaactcctatttccctaccaaccaaggagcctccagaaggaaaggaggaagaaatgttttcttaggggaattcgctaggttttaacgatttgtttctcctgctcctcttctgtcagacctgaccccacacaaacctgtcccctcggttgtgttgaagtcccctggacagtgggcaggggtggcagaggacacgagcagccactgcccgtaccccctctcctctctgtaagcccatgccctgtcttcccagggacttgtgagcctcttccctcgacggtcctcttctctccttccagtcctctccccctgctgtctgcagcccctccccggggagttggtgctttcttttccttttttttttttttccagggggagggaggagaggaaggagggggatcagagctgtcccaaagagggaaagcggtgaggtttgaggaggggcagaagcagggccggcaaaggttgtaccttcataaggtggtatggggggttggggtcaggccctgaacatcgtcctacttgagaatctgtcaggggaaaaagtcaaggggagcaggaggaagagccaggagggccagaggcagagaagagatggagtcttaggggccagggtgagcgaggggtccagggcctagaggtgcttcctgggggcgggggaatgcagccagtgtccccctcccctcttccaccccagctccagccctggtcttgtcttttcatccctcttccccacgacagaagaagttgtggccctggccatgtcatcgtgttcctgtgtcccctgcatgtaccccaccctccaccccttccttttgcgcggacc

SEQ ID NO: 156264 - DNA, 599 bp, Homo sapiens
  Payload ID: 10660
  Gene Symbol: MAZ
  Gene Name: MYC-associated zinc finger protein (purine-binding transcription factor)
  ENST ID: ENST00000568411
  CDS Start-End: 1-589
cggcgctgtgcacaagccctacaactgctcccactgtggcaagagcttctcccggccggatcacctcaacagtcacgtcagacaagtgcactcaacagaacggcccttcaaatgtgagaaatgtgaggcagctttcgccacgaaggatcggctgcgggcgcacacagtacgacacgaggagaaagtgccatgtcacgtgtgtggcaagatgctgagctcggcttatatttcggaccacatgaaggtgcacagccagggtcctcaccatgtctgtgagctctgcaacaaaggtactggtgaggtttgtccaatggcggcggcagcggcagcggcggcagcggcagcagcggcagcagtagcagcccctcccacagctgtgggctccctctcgggggcggagggggtgcctgtgagctctcagccacttccctcccaaccctgctccagccctggtcttgtcttttcatccctcttccccacgacagaagaagttgtggccctggccatgtcatcgtgttcctgtgtcccctgcatgtaccccaccctccaccccttccttttgcgcggaccccattacaataaattttaaataaaatcct

SEQ ID NO: 156265 - DNA, 646 bp, Homo sapiens
  Payload ID: 10660
  Gene Symbol: MAZ
  Gene Name: MYC-associated zinc finger protein (purine-binding transcription factor)
  ENST ID: ENST00000563012
  CDS Start-End: 1-459
agcttctcccggtgtgcacggggcctcggccgcccgctaggccgtggggagggagggacgcgacggaggccggatcacctcaacagtcacgtcagacaagtgcactcaacagaacggcccttcaaatgtgagaaatgtgaggcagctttcgccacgaaggatcggctgcgggcgcacacagtacgacacgaggagaaagtgccatgtcacgtgtgtggcaagatgctgagctcggcttatatttcggaccacatgaaggtgcacagccagggtcctcaccatgtctgtgagctctgcaacaaaggtactggtgaggtttgtccaatggcggcggcagcggcagcggcggcagcggcagcagcggcagcagtagcagcccctcccacagctgtgggctccctctcgggggcggagggggtgcctgtgagctctcagccacttccctcccaaccctggtgagctccaagttggttgcgggggagaggggagaatggagtagagtcccttggtacaagctcctctcccccctcttttcccaccaactcctatttccctaccaaccaaggagcctccagaaggaaaggaggaagaaatgttttcttaggggaattcgctaggttttaacgatttgtttctcctgctcctc

SEQ ID NO: 156266 - DNA, 672 bp, Homo sapiens
  Payload ID: 10660
  Gene Symbol: MAZ
  Gene Name: MYC-associated zinc finger protein (purine-binding transcription factor)
  ENST ID: ENST00000561855
  CDS Start-End: 55-309
ggcccgcgcccccggcccccgctgagccccgggggccccgctgcggccgaggccatgttcccggtgtttccttgcacgctgctggccccccccttccccgtgctgggcctggactcccggggggtgggcggcctcatgaactccttcccgccacctcagggtcacgcccagaaccccctgcaggtcggggctgagctccagtcccgcttctttgcctcccagggctgcgcccagagtccattccaggccggatcacctcaacagtcacgtcagacaagtgcactcaacagaacggcccttcaaatgtgagaaatgtgaggcagctttcgccacgaaggatcggctgcgggcgcacacagtacgacacgaggagaaagtgccatgtcacgtgtgtggcaagatgctgagctcggcttatatttcggaccacatgaaggtgcacagccagggtcctcaccatgtctgtgagctctgcaacaaaggtactggtgaggtttgtccaatggcggcggcagcggcagcggcggcagcggcagcagcggcagcagtagcagcccctcccacagctgtgggctccctctcgggggcggagggggtgcctgtgagctctcagccacttccctcccaaccctggtgagctccaagttggttgcgggggagaggggagaatgg

SEQ ID NO: 156267 - DNA, 1461 bp, Homo sapiens
  Payload ID: 10660
  Gene Symbol: MAZ
  Gene Name: MYC-associated zinc finger protein (purine-binding transcription factor)
  ENST ID: ENST00000563402
  CDS Start-End: 132-692
ggcggcccgcgggccatgcgttcggcgcggcccagcccggccggccgggggcggcgccccgagcccgggccccgcgcggcccgcgcccccggcccccgctgagccccgggggccccgctgcggccgaggccatgttcccggtgtttccttgcacgctgctggccccccccttccccgtgctgggcctggactcccggggggtgggcggcctcatgaactccttcccgccacctcagggtcacgcccagaaccccctgcaggtcggggctgagctccagtcccgcttctttgcctcccagggctgcgcccagagtccattccaggccgcgccggcgcccccgcccacgccccaggccccggcggccgagcccctccaggtggacttgctcccggtgctcgccgccgcccaggacggcagcggcggcagcggcagcagcggcagcagtagcagcccctcccacagctgtgggctccctctcgggggcggagggggtgcctgtgagctctcagccacttccctcccaaccctggtgagctccaagttggttgcgggggagaggggagaatggagtagagtcccttggtacaagctcctctcccccctcttttcccaccaactcctatttccctaccaaccaaggagcctccagaaggaaaggaggaagaaatgttttcttaggggaattcgctaggttttaacgatttgtttctcctgctcctcttctgtcagacctgaccccacacaaacctgtcccctcggttgtgttgaagtcccctggacagtgggcaggggtggcagaggacacgagcagccactgcccgtaccccctctcctctctgtaagcccatgccctgtcttcccagggacttgtgagcctcttccctcgacggtcctcttctctccttccagtcctctccccctgctgtctgcagcccctccccggggagttggtgctttcttttccttttttttttttttccagggggagggaggagaggaaggagggggatcagagctgtcccaaagagggaaagcggtgaggtttgaggaggggcagaagcagggccggcaaaggttgtaccttcataaggtggtatggggggttggggtcaggccctgaacatcgtcctacttgagaatctgtcaggggaaaaagtcaaggggagcaggaggaagagccaggagggccagaggcagagaagagatggagtcttaggggccagggtgagcgaggggtccagggcctagaggtgcttcctgggggcgggggaatgcagccagtgtccccctcccctcttccaccccagctccagccctggtcttgtcttttcatccctcttccccacgacagaagaagttgtggccctggccatgtcatcgtgttcctgtgtcccctgcatgtaccccaccctccaccccttccttttgcgcggaccccattacaataaattttaaataaa

SEQ ID NO: 156268 - DNA, 1593 bp, Homo sapiens
  Payload ID: 10660
  Gene Symbol: MAZ
  Gene Name: MYC-associated zinc finger protein (purine-binding transcription factor)
  ENST ID: ENST00000568282
  CDS Start-End: 239-523
gatcctcggaaaggcctgtggtgcggtttggtggatttggggcgcaccacctccgccctaaccccaaccccaacgtgtccccaggccggatcacctcaacagtcacgtcagacaagtgcactcaacagaacggcccttcaaatgtgagaaatgtgaggcagctttcgccacgaaggatcggctgcgggcgcacacagtacgacacgaggagaaagtgccatgtcacgtgtgtggcaagatgctgagctcggcttatatttcggaccacatgaaggtgcacagccagggtcctcaccatgtctgtgagctctgcaacaaaggcttcaccacggcagcatacctgcgcatccacgcggtgaaggaccacgggctccaggccccgcgggctgaccgcatcctgtgcaagctgtgcagcgtgcactgcaagacccctgcccagctggccggccacatgcagacccatctggggggggccgccccccctgtcccgggagacgccccccagccacagcccacctgctgagggggacccccgcacccaccaggcaaggcgtttgtccaatggcggcggcagcggcagcggcggcagcggcagcagcggcagcagtagcagcccctcccacagctgtgggctccctctcgggggcggagggggtgcctgtgagctctcagccacttccctcccaaccctggtgagctccaagttggttgcgggggagaggggagaatggagtagagtcccttggtacaagctcctctcccccctcttttcccaccaactcctatttccctaccaaccaaggagcctccagaaggaaaggaggaagaaatgttttcttaggggaattcgctaggttttaacgatttgtttctcctgctcctcttctgtcagacctgaccccacacaaacctgtcccctcggttgtgttgaagtcccctggacagtgggcaggggtggcagaggacacgagcagccactgcccgtaccccctctcctctctgtaagcccatgccctgtcttcccagggacttgtgagcctcttccctcgacggtcctcttctctccttccagtcctctccccctgctgtctgcagcccctccccggggagttggtgctttcttttccttttttttttttttccagggggagggaggagaggaaggagggggatcagagctgtcccaaagagggaaagcggtgaggtttgaggaggggcagaagcagggccggcaaaggttgtaccttcataaggtggtatggggggttggggtcaggccctgaacatcgtcctacttgagaatctgtcaggggaaaaagtcaaggggagcaggaggaagagccaggagggccagaggcagagaagagatggagtcttaggggccagggtgagcgaggggtccagggcctagaggtgcttcctgggggcgggggaatgcagccagtgtccccctcccctcttccaccccagctccagccctggtcttgtcttttcatccctcttccccacgacagaagaagttgtggccctggccatgtcatcgtgttcctgtgtcccctgcatgtaccccaccctccaccccttccttttgcg

SEQ ID NO: 156269 - DNA, 635 bp, Homo sapiens
  Payload ID: 10660
  Gene Symbol: MAZ
  Gene Name: MYC-associated zinc finger protein (purine-binding transcription factor)
  ENST ID: ENST00000567444
  CDS Start-End: 1-609
gcgggtgccggcggcggcgctgccgcagtggccgccggtggcgtggtgaccacgaccgcctcggggaagcgcatccggaagaaccatgcctgcgagatgtgtggcaaggccttccgcgacgtctaccacctgaaccgacacaagctgtcgcactcggacgagaagccctaccagtgcccggtgtgccagcagcgcttcaagcgcaaggaccgcatgagctaccacgtgcgctcacatgacggcgctgtgcacaagccctacaactgctcccactgtggcaagagcttctcccggccggatcacctcaacagtcacgtcagacaagtgcactcaacagaacggcccttcaaatgtgagaaatgtgaggcagctttcgccacgaaggatcggctgcgggcgcacacagtacgacacgaggagaaagtgccatgtcacgtgtgtggcaagatgctgagctcggcttatatttcggaccacatgaaggtgcacagccagggtcctcaccatgtctgtgagctctgcaacaaaggtacatgccgagggctgccgggagggccaggggcagagggtgggcgcctggccagacgccttgccacggatacgggttaagggtgctgtagccaagagctcgtggc

SEQ ID NO: 156270 - DNA, 567 bp, Homo sapiens
  Payload ID: 10660
  Gene Symbol: MAZ
  Gene Name: MYC-associated zinc finger protein (purine-binding transcription factor)
  ENST ID: ENST00000569978
  CDS Start-End: 292-453
atttcctgcttaagtgtcgctgtgacggcctgggctccgggaggaggcgcagggatcctcggaaaggcctgtggtgcggtttggtggatttggggcgcaccacctccgccctaaccccaaccccaacgtgtccccaggccggatcacctcaacagtcacgtcagacaagtgcactcaacagaacggcccttcaaatgtgagaaatgtgaggcagctttcgccacgaaggatcggctgcgggcgcacacagtacgacacgaggagaaagtgccatgtcacgtgtgtggcaagatgctgagctcggcttatatttcggaccacatgaaggtgcacagccagggtcctcaccatgtctgtgagctctgcaacaaaggtacatgccgagggctgccgggagggccaggggcagagggtgggcgcctggccagacgccttgccacggatacgggttaagggtgctgtagccaagagctcgtggcgtctagattcctacaagaggtcaagggagcagcggggggacacctgaatgaacatcattagactctaagaagtcctggttggaagaga

SEQ ID NO: 156271 - DNA, 1455 bp, Homo sapiens
  Payload ID: 10660
  Gene Symbol: MAZ
  Gene Name: MYC-associated zinc finger protein (purine-binding transcription factor)
  ENST ID: ENST00000566906
  CDS Start-End: 132-686
ggcggcccgcgggccatgcgttcggcgcggcccagcccggccggccgggggcggcgccccgagcccgggccccgcgcggcccgcgcccccggcccccgctgagccccgggggccccgctgcggccgaggccatgttcccggtgtttccttgcacgctgctggccccccccttccccgtgctgggcctggactcccggggggtgggcggcctcatgaactccttcccgccacctcagggtcacgcccagaaccccctgcaggtcggggctgagctccagtcccgcttctttgcctcccagggctgcgcccagagtccattccaggccgcgccggcgcccccgcccacgccccaggccccggcggccgagcccctccaggtggacttgctcccggtgctcgccgccgcccaggacggcggcagcggcagcagcggcagcagtagcagcccctcccacagctgtgggctccctctcgggggcggagggggtgcctgtgagctctcagccacttccctcccaaccctggtgagctccaagttggttgcgggggagaggggagaatggagtagagtcccttggtacaagctcctctcccccctcttttcccaccaactcctatttccctaccaaccaaggagcctccagaaggaaaggaggaagaaatgttttcttaggggaattcgctaggttttaacgatttgtttctcctgctcctcttctgtcagacctgaccccacacaaacctgtcccctcggttgtgttgaagtcccctggacagtgggcaggggtggcagaggacacgagcagccactgcccgtaccccctctcctctctgtaagcccatgccctgtcttcccagggacttgtgagcctcttccctcgacggtcctcttctctccttccagtcctctccccctgctgtctgcagcccctccccggggagttggtgctttcttttccttttttttttttttccagggggagggaggagaggaaggagggggatcagagctgtcccaaagagggaaagcggtgaggtttgaggaggggcagaagcagggccggcaaaggttgtaccttcataaggtggtatggggggttggggtcaggccctgaacatcgtcctacttgagaatctgtcaggggaaaaagtcaaggggagcaggaggaagagccaggagggccagaggcagagaagagatggagtcttaggggccagggtgagcgaggggtccagggcctagaggtgcttcctgggggcgggggaatgcagccagtgtccccctcccctcttccaccccagctccagccctggtcttgtcttttcatccctcttccccacgacagaagaagttgtggccctggccatgtcatcgtgttcctgtgtcccctgcatgtaccccaccctccaccccttccttttgcgcggaccccattacaataaattttaaataaa

SEQ ID NO: 156272 - DNA, 475 bp, Homo sapiens
  Payload ID: 10660
  Gene Symbol: MAZ
  Gene Name: MYC-associated zinc finger protein (purine-binding transcription factor)
  ENST ID: ENST00000562557
  CDS Start-End: 240-475
ctggggaaggggagccactcccagggcggagggaggaagcctctcccggttaccagggagcaaggggtggtcctttgtcgaggaggccggatcacctcaacagtcacgtcagacaagtgcactcaacagaacggcccttcaaatgtgagaaatgtgaggcagctttcgccacgaaggatcggctgcgggcgcacacagtacgacacgaggagaaagtgccatgtcacgtgtgtggcaagatgctgagctcggcttatatttcggaccacatgaaggtgcacagccagggtcctcaccatgtctgtgagctctgcaacaaaggcttcaccacggcagcatacctgcgcatccacgcggtgaaggaccacgggctccaggccccgcgggctgaccgcatcctgtgcaagctgtgcagcgtgcactgcaagacccctgcccagctggccggccacatgcagacccatctggggggggc

SEQ ID NO: 156273 - DNA, 991 bp, Homo sapiens
  Payload ID: 10660
  Gene Symbol: MAZ
  Gene Name: MYC-associated zinc finger protein (purine-binding transcription factor)
  ENST ID: ENST00000616501
  CDS Start-End: 85-843
aaggagttcaagaacggctacaatctccggaggcacgaagccatccacacgggagccaaggccggccgggtcccctcgggtgctatgaagatgccgaccatggtgcccctgagcctcctgagcgtgccccagctgagcggagccggcgggggagggggagaggcgggtgccggcggcggcgctgccgcagtggccgccggtggcgtggtgaccacgaccgcctcggggaagcgcatccggaagaaccatgcctgcgagatgtgtggcaaggccttccgcgacgtctaccacctgaaccgacacaagctgtcgcactcggacgagaagccctaccagtgcccggtgtgccagcagcgcttcaagcgcaaggaccgcatgagctaccacgtgcgctcacatcggcgctgtgcaaagccctacaactgctcccactgtggcaagagcttctcccggccggatcacctcaacagtcacgtcagacaagtgcactcaacagaacggcccttcaaatgtgagaaatgtgaggcagctttcgccacgaaggatcggctgcgggcgcacacagtacgacacgaggagaaagtgccatgtcacgtgtgtggcaagatgctgagctcggcttatatttcggaccacatgaaggtgcacagccagggtcctcaccatgtctgtgagctctgcaacaaaggtactggtgaggtttgtccaatggcggcggcagcggcagcggcggcagcggcagcagcggcagcagtagcagcccctcccacagctgtgggctccctctcgggggcggagggggtgcctgtgagctctcagccacttccctcccaaccctggtgagctccaagttggttgcgggggagaggggagaatggagtagagtcccttggtacaagctcctctcccccctcttttcccaccaactcctatttccctaccaaccaaggagcctccagaaggaaaggaggaagaaatgttttcttagggg

SEQ ID NO: 156274 - DNA, 3186 bp, Homo sapiens
  Payload ID: 10661
  Gene Symbol: MYCBPAP
  Gene Name: MYCBP associated protein
  Uniprot ID: Q8TBZ2
  ENST ID: ENST00000323776
  CDS Start-End: 163-3117
tggtgacgtcacggcgctcgtcggcgccgcctgtggcgtcacaggccgggcccgcagggctttctaggggtccgtcgctcttgaagccgccggcggcgggcgcgtgcgcggcccgatgaagaaggaggtttccaagccgtctccgcccaagttgatcggtggatgcgcgcccccgcgcggggcaccggttgctgtggacgcagtggcggccgttggctggcgggtgcggcgcagcctcggtgtctctgggccggcggtgcagggcaacgtttcatggtgccgggcggcaccatgaagtctctaaagaaggattcccgcctcagaataactccgaccagattattagaggcctcagagaatgtcaaagaaaagaagcgggcaaagggacctgaacaacccacacccacaattcaggaagagcctgaacctgttagcaatgtcctacaaggagatgacattcttgccttggccattaagaaggaagacttgaaggagcaacacattcctcgccttactgaaaaggaagataaacgtgtcatcacccagaaatttatcatccgtaaactcaaacccatggatcctaggaggaaggtctgccaccttgtagcacgtcctgcgaatcctgatgaagccacaaagcctctggactactccggtcccggtgacagcttcgatggcagtgaccagatcctgccccaccacatcttggggagtctccaggattttaagagaattgcacttgctcgagggaacacccagctggctgagcggatacctacctcaccctgtctgatgaccctcatctctgctgaaggagagtcaaagcaaaaagccccaaaagaagagaagagacctccctgggccccacctcctcagcacaactttctgaaaaactggcagcgtaacacagccctgcggaagaagcagcaggaagccctcagcgaacacctaaagaagccagtgagtgagctgctcatgcacaccggggagacctacagacggatccaggaggagcgggagctcattgactgcacacttccaacccggcgtgataggaaaagctgggagaacagtgggttctggagtcgactggaatacttgggagatgagatgacaggtctggtcatgaccaagacaaaaactcagcgtggcctcatggagcccatcactcacatcaggaagccccactccatccgggtggagacaggattaccagcccagagggacgcttcataccgctacacctgggatcggagtctgtttctgatctaccgacgcaaggagctgcagagaatcatggaagagctggatttcagccagcaggatattgatggcctggaggtggtgggcaaagggtggcccttctcggctgttactgtggaagactacacagtgtttgaaagaagtcagggaagctcctctgaagacacagcatacttaggcacattggccagttcctctgatgtctccatgcctattctcggcccttctctgctgttctgtgggaagccagcttgctggatcagaggcagtaatccacaggacaagaggcaggttgggattgctgctcacttgacctttgaaaccctagaaggcgagaaaacctcctcagaactgactgtggtcaataatggcaccgtggccatttggtatgactggcgacggcagcaccagccggacactttccaagaccttaagaaaaacaggatgcagcgattttactttgacaaccgggaaggtgtgattctgcctggagaaattaaaacatttaccttcttcttcaagtctttgactgctggggtcttcagggaattttgggagtttcgaacccatcctactctattaggaggtgctatactgcaggtcaatctccacgcggtctccctgacccaggacgtttttgaggatgagaggaaagtactggagagcaagctgactgcccatgaggcagtcaccgtcgttcgcgaagtgctgcaggagctgctgatgggggtcttgaccccggagcgcacaccatcacctgtggatgcctatctcaccgaggaagacttgttccggcacagaaatcctccgctgcattatgagcaccaagtggtgcaaagcctgcaccaactgtggcgccagtacatgaccctgcccgccaaggctgaggaggccaggccaggggacaaggagcacgtcagccccatagccacagagaaggcctctgtgaatgctgagctgttaccacgctttaggagccccatctccgaaactcaagtgccccggcctgagaacgaggccctcagggaatccgggtcccagaaggccagagtggggaccaagagtcctcagcggaagagcatcatggaggagatcctggtggaggaaagcccagatgtggacagcaccaagagcccctgggagccggatggccttcccctgctggagtggaacctctgcttggaggacttcagaaaggcagtgatggtgctccctgatgagaaccacagagaggatgcgttgatgaggctcaacaaagcagccctggagctgtgccagaagccaaggccattgcagtccaacctcctgcaccagatgtgtttgcagctgtggcgagatgtgattgacagcctggtgggccattccatgtggctgaggtctgtgctgggcctgcctgagaaggagaccatctatttgaatgtgcctgaagagcaagatcaaaaatcacctcctatcatggaagtgaaggtacctgtggggaaagctgggaaggaggagcggaaaggagcagcccaggaaaagaagcaactggggatcaaagacaaagaagacaagaaaggagccaagctgctcgggaaagaggaccgtcccaacagcaagaagcacaaggcaaaggatgacaagaaagtcataaaatctgcaagtcaggacaggttttctttggaagaccctacccctgacatcatcctctcttctcaagaacccatagaccccctggtcatggggaaatacacccagagcctgcacagtgaggtccgtgggctgctggacaccctggtgactgacctgatggtcctggctgatgagctcagccccataaagaatgtcgaggaggctttgcgcctctgcaggtgactctcgggcccaagcaaccttctggaaaacgggttaataaataaatcaataaagaaccttcaagtttct

SEQ ID NO: 156275 - DNA, 3102 bp, Homo sapiens
  Payload ID: 10661
  Gene Symbol: MYCBPAP
  Gene Name: MYCBP associated protein
  Uniprot ID: Q8TBZ2
  ENST ID: ENST00000436259
  CDS Start-End: 274-3102
tggtgacgtcacggcgctcgtcggcgccgcctgtggcgtcacaggccgggcccgcagggctttctaggggtccgtcgctcttgaagccgccggcggcgggcgcgtgcgcggcccgatgaagaaggaggtttccaagccgtctccgcccaagttgatcggtggatgcgcgcccccgcgcggggcaccggttgctgtggacgcagtggcggccgttggctggcgggtgcggcgcagcctcggtgtctctgggccggcggtgcagggcaacgtttcatggtgccgggcggcaccatgaagtctctaaagaaggattcccgcctcagaataactccgaccagattattagaggcctcagagaatgtcaaagaaaagaagcgggcaaagggacctgaacaacccacacccacaattcaggaagagcctgaacctgttagcaatgtcctacaaggagatgacattcttgccttggccattaagaaggaagacttgaaggagcaacacattcctcgccttactgaaaaggaagataaacgtgtcatcacccagaaatttatcatccgtaaactcaaacccatggatcctaggaggaaggtctgccaccttgtagcacgtcctgcgaatcctgatgaagccacaaagcctctggactactccggtcccggtgacagcttcgatggcagtgaccagatcctgccccaccacatcttggggagtctccaggattttaagagaattgcacttgctcgagggaacacccagctggctgagcggatacctacctcaccctgtctgatgaccctcatctctgctgaaggagagtcaaagcaaaaagccccaaaagaagagaagagacctccctgggccccacctcctcagcacaactttctgaaaaactggcagcgtaacacagccctgcggaagaagcagcaggaagccctcagcgaacacctaaagaagccagtgagtgagctgctcatgcacaccggggagacctacagacggatccaggaggagcgggagctcattgactgcacacttccaacccggcgtgataggaaaagctgggagaacagtgggttctggagtcgactggaatacttgggagatgagatgacaggtctggtcatgaccaagacaaaaactcagcgtggcctcatggagcccatcactcacatcaggaagccccactccatccgggtggagacaggattaccagcccagagggacgcttcataccgctacacctgggatcggagtctgtttctgatctaccgacgcaaggagctgcagagaatcatggaagagctggatttcagccagcaggatattgatggcctggaggtggtgggcaaagggtggcccttctcggctgttactgtggaagactacacagtgtttgaaagaagtcagggaagctcctctgaagacacagcatacttaggcacattggccagttcctctgatgtctccatgcctattctcggcccttctctgctgttctgtgggaagccagcttgctggatcagaggcagtaatccacaggacaagaggcaggttgggattgctgctcacttgacctttgaaaccctagaaggcgagaaaacctcctcagaactgactgtggtcaataatggcaccgtggccatttggtatgactggcgacggcagcaccagccggacactttccaagaccttaagaaaaacaggatgcagcgattttactttgacaaccgggaaggtgtgattctgcctggagaaattaaaacatttaccttcttcttcaagtctttgactgctggggtcttcagggaattttgggagtttcgaacccatcctactctattaggaggtgctatactgcaggtcaatctccacgcggtctccctgacccaggacgtttttgaggatgagaggaaagtactggagagcaagctgactgcccatgaggcagtcaccgtcgttcgcgaagtgctgcaggagctgctgatgggggtcttgaccccggagcgcacaccatcacctgtggatgcctatctcaccgaggaagacttgttccggcacagaaatcctccgctgcattatgagcaccaagtggtgcaaagcctgcaccaactgtggcgccagtacatgaccctgcccgccaaggctgaggaggccaggccaggggacaaggagcacgtcagccccatagccacagagaaggcctctgtgaatgctgagctgttaccacgctttaggagccccatctccgaaactcaagtgccccggcctgagaacgaggccctcagggaatccgggtcccagaaggccagagtggggaccaagagtcctcagcggaagagcatcatggaggagatcctggtggaggaaagcccagatgtggacagcaccaagagcccctgggagccggatggccttcccctgctggagtggaacctctgcttggaggacttcagaaaggcagtgatggtgctccctgatgagaaccacagagaggatgcgttgatgaggctcaacaaagcagccctggagctgtgccagaagccaaggccattgcagtccaacctcctgcaccagatgtgtttgcagctgtggcgagatgtgattgacagcctggtgggccattccatgtggctgaggtctgtgctgggcctgcctgagaaggagaccatctatttgaatgtgcctgaagagcaagatcaaaaatcacctcctatcatggaagtgaaggtacctgtggggaaagctgggaaggaggagcggaaaggagcagcccaggaaaagaagcaactggggatcaaagacaaagaagacaagaaaggagccaagctgctcgggaaagaggaccgtcccaacagcaagaagcacaaggcaaaggatgacaagaaagtcataaaatctgcaagtcaggacaggttttctttggaagaccctacccctgacatcatcctctcttctcaagaacccatagaccccctggtcatggggaaatacacccagagcctgcacagtgaggtgcatcctggcagatgcgttccttgggagaacaccatgcagggtgcattcccatcaactaccaggtgcggtggctcgtgcctgtaa

SEQ ID NO: 156276 - DNA, 753 bp, Homo sapiens
  Payload ID: 10661
  Gene Symbol: MYCBPAP
  Gene Name: MYCBP associated protein
  ENST ID: ENST00000458692
  CDS Start-End: 1-293
ggcggccgttggctggcgggtgcggcgcagcctcggtgtctctgggccggcggtgcagggcaacgtttcatggtgccgggcggcaccatgaagtctctaaagaaggattcccgcctcagaataactccgaccagattattagaggcctcagagaatgtcaaagagcccagactggtcttgaactcctgggctcaagcgatctgcctgccttggcctcccaagatcttgcaactcttaatccattccttggcatgccattgcccatgggaaaagaagcgggcaaagggacctgaacaacccacacccacaattcaggaagagcctgaacctgttagcaatgtcctacaaggagatgacattcttgccttggccattaagaaggaagacttgaaggagcaacacattcctcgccttactgaaaaggaagataaacgtgtcatcacccagaaatttatcatccgtaaactcaaacccatggatcctaggaggaaggtctgccaccttgtagcacgtcctgcgaatcctgatgaagccacaaagcctctggactactccggtcccggtgacagcttcgatggcagtgaccagatcctgccccaccacatcttggggagtctccaggattttaagagaattgcacttgctcgagggaacacccagctggctgagcggatacctacctcaccctgtctgatgaccctcatctctgctgaaggagagtcaaagcaaaaagccccaaaagaagagaagaga

SEQ ID NO: 156277 - DNA, 947 bp, Homo sapiens
  Payload ID: 10661
  Gene Symbol: MYCBPAP
  Gene Name: MYCBP associated protein
  ENST ID: ENST00000452039
  CDS Start-End: 6-947
ggtggatgcgcgcccccgcgcggggcaccggttgctgtggacgcagtggcggccgttggctggcgggtgcggcgcagcctcggtgtctctgggccggcggtgcagggcaacgtttcatggtgccgggcggcaccatgaagtctctaaagaaggattcccgcctcagaataactccgaccagattattagaggcctcagagaatgtcaaagaaaagaagcgggcaaagggacctgaacaacccacacccacaattcaggaagagcctgaacctgttagcaatgtcctacaaggagatgacattcttgccttggccattaagaaggaagacttgaaggagcaacacattcctcgccttactgaaaaggaagataaacgtgtcatcacccagaaatttatcatccgtaaactcaaacccatggatcctaggaggaaggtctgccaccttgtagcacgtcctgcgaatcctgatgaagccacaaagcctctggactactccggtacacccagtctcagccctggcttcactgtctttcaactcatgggtcccggtgacagcttcgatggcagtgaccagatcctgccccaccacatcttggggagtctccaggattttaagagaattgcacttgctcgagggaacacccagctggctgagcggatacctacctcaccctgtctgatgaccctcatctctgctgaaggagagtcaaagcaaaaagccccaaaagaagagaagagacctccctgggccccacctcctcagcacaactttctgaaaaactggcagcgtaacacagccctgcggaagaagcagcaggaagccctcagcgaacacctaaagaagccagtgagtgagctgctcatgcacaccggggagacctacagacggatccaggaggagcgggagctcattgactgcacacttccaacccggcgtgataggaaa

SEQ ID NO: 156278 - DNA, 1640 bp, Homo sapiens
  Payload ID: 10661
  Gene Symbol: MYCBPAP
  Gene Name: MYCBP associated protein
  ENST ID: ENST00000419930
  CDS Start-End: 57-326
cgcggcccgatgaagaaggaggtttccaagccgtctccgcccaagttgatcggtggatgcgcgcccccgcgcggggcaccggttgctgtggacgcagtggcggccgttggctggcgggtgcggcgcagcctcggtgtctctgggccggcggtgcagggcaacgtttcatggtgccgggcggcaccatgaagtctctaaagaaggattcccgcctcagaataactccgaccagattattagaggcctcagagaatgtcaaagggtggcatgcaggaggcaggatccccggactggatgaagtgcagaagagccaggaaagagtttaagggtagaagggccaggaattggggtccttgggaagaggaaagaatgaagtgttgaaaccagccaccttgatgggattatttggtagaggagggtcggggagcggggcaggcgtcacttaggattcctgctggaaaaacccagaagaaaggccttgcttggctagttctctttttgactgccttttcctaccacgtgcactttccagctggatgacacttatccagctcctttagcctggaaagaatcgctagatatgactgcttcctaccctctacagctttcttctggttgcacctgggagagccacagggcgtctgatagcggactgacttccatggacatgttctcacttgcaacccacccccttttgatcttttttggctgtttccatttatttatttttaaatttaatttttagctttttttttctgtgtgtgtgtgtgtgtgtgtgtgtgtgtgtgtgtgtgtttgtaaacagggctctcgctgtgttgccccagctagtgtcaaattcttggcctcaagcgatcctcctgcctcggcctcacagactgctaggattccaggcatggaccactgcgcccagcctatttttgtttactgagagctgattttgtgtggtactgtggctcaccagaagggtatcggtattaactgtgtgaccctggtcctcaagaaactcagtctaatgaacacctggaggagtaacctgacaaaggtagaaatacaaatgctgtgatgtaggtgcccatcgggcttaagggggctcagagcacctgagccagaccagggatggttgtaggggtacgtcttctgaagaaggtgacatctatggcagacaagaaaaaaaaggagaggtttgcttctctaggtctaggaagcagcatgagtttatggaactgtaaatgtgggaaccagaagaggctgcacaggtgggtaggtcaggggccagaccatgaaagggctttatgtactaggtcagaaagcctggatgtgctcttgcaggccctggggagacccagcctcagagttgtgaaagctcattgtgaggagaggggaccctcagaaaactaacaggagcttagtcgcttttcagtatggctttatgtttcttcacgtataaaagtccaacgttgagccgggcatggtggtgcacatctgcagtctcagctgctcaggaggctgtggcaggaggattgttccaggccaggagtttatgatcacacctgtgaatagccactgcattccagactgggcaacacagtgagacccccattattaaaaaaataaaagtccaatgctgttttatgaca

SEQ ID NO: 156279 - DNA, 3108 bp, Homo sapiens
  Payload ID: 10661
  Gene Symbol: MYCBPAP
  Gene Name: MYCBP associated protein
  ENST ID: ENST00000437498
  CDS Start-End: 1-2864
ggtgtctctgggccggcggtgcagggcaacgtttcatggtgccgggcggcaccatgaagtctctaaagaaggattcccgcctcagaataactccgaccagattattagaggcctcagagaatgtcaaagaaaagaagcgggcaaagggacctgaacaacccacacccacaattcaggaagagcctgaacctgttagcaatgtcctacaaggagatgacattcttgccttggccattaagaaggaagacttgaaggagcaacacattcctcgccttactgaaaaggaagataaacgtgtcatcacccagaaatttatcatccgtaaactcaaacccatggatcctaggaggaaggtctgccaccttgtagcacgtcctgcgaatcctgatgaagccacaaagcctctggactactccggtcccggtgacagcttcgatggcagtgaccagatcctgccccaccacatcttggggagtctccaggattttaagagaattgcacttgctcgagggaacacccagctggctgagcggatacctacctcaccctgtctgatgaccctcatctctgctgaaggagagtcaaagcaaaaagccccaaaagaagagaagagacctccctgggccccacctcctcagcacaactttctgaaaaactggcagcgtaacacagccctgcggaagaagcagcaggaagccctcagcgaacacctaaagaagccagtgagtgagctgctcatgcacaccggggagacctacagacggatccaggaggagcgggagctcattgactgcacacttccaacccggcgtgataggaaaagctgggagaacagtgggttctggagtcgactggaatacttgggagatgagatgacaggtctggtcatgaccaagacaaaaactcagcgtggcctcatggagcccatcactcacatcaggaagccccactccatccgggtggagacaggattaccagcccagagggacgcttcataccgctacacctgggatcggagtctgtttctgatctaccgacgcaaggagctgcagagaatcatggaagagctggatttcagccagcaggatattgatggcctggaggtggtgggcaaagggtggcccttctcggctgttactgtggaagactacacagtgtttgaaagaagtcagggaagctcctctgaagacacagcatacttaggcacattggccagttcctctgatgtctccatgcctattctcggcccttctctgctgttctgtgggaagccagcttgctggatcagaggcagtaatccacaggacaagaggcaggttgggattgctgctcacttgacctttgaaaccctagaaggcgagaaaacctcctcagaactgactgtggtcaataatggcaccgtggccatttggtatgactggcgacggcagcaccagccggacactttccaagaccttaagaaaaacaggatgcagcgattttactttgacaaccgggaaggtgtgattctgcctggagaaattaaaacatttaccttcttcttcaagtctttgactgctggggtcttcagggaattttgggagtttcgaacccatcctactctattaggaggtgctatactgcaggtcaatctccacgcggtctccctgacccaggacgtttttgaggatgagaggaaagtactggagagcaagctgactgcccatgaggcagtcaccgtcgttcgcgaagtgctgcaggagctgctgatgggggtcttgaccccggagcgcacaccatcacctgtggatgcctatctcaccgaggaagacttgttccggcacagaaatcctccgctgcattatgagcaccaagtggtgcaaagcctgcaccaactgtggcgccagtacatgaccctgcccgccaaggctgaggaggccaggccaggggacaaggagcacgtcagccccatagccacagagaaggcctctgtgaatgctgagctgttaccacgctttaggagccccatctccgaaactcaagtgccccggcctgagaacgaggccctcagggaatccgggtcccagaaggccagagtggggaccaagagtcctcagcggaagagcatcatggaggagatcctggtggaggaaagcccagatgtggacagcaccaagagcccctgggagccggatggccttcccctgctggagtggaacctctgcttggaggacttcagaaaggcagtgatggtgctccctgatgagaaccacagagaggatgcgttgatgaggctcaacaaagcagccctggagctgtgccagaagccaaggccattgcagtccaacctcctgcaccagatgtgtttgcagctgtggcgagatgtgattgacagcctggtgggccattccatgtggctgaggtctgtgctgggcctgcctgagaaggagaccatctatttgaatgtgcctgaagagcaagatcaaaaatcacctcctatcatggaagtgaaggtacctgtggggaaagctgggaaggaggagcggaaaggagcagcccaggaaaagaagcaactggggatcaaagacaaagaagacaagaaaggagccaagctgctcgggaaagaggaccgtcccaacagcaagaagcacaaggcaaaggatgacaagaaagtcataaaatctgcaagtcaggacaggttttctttggaagaccctacccctgacatcatcctctcttctcaagaacccatagaccccctggtcatggggaaatacacccagagcctgcacagtgaggtgcatcctggcagatgcgttccttgggagaacaccatgcagggtgcattcccatcaactaccaggtgcggtggctcgtgcctgtaatcccagcactttgggaggccaaggtgggcagattgcctgagctcaggagttcaagaccagcctgggcaacatggtccgtgggctgctggacaccctggtgactgacctgatggtcctggctgatgagctcagccccataaagaatgtcgaggaggctttgcgcctctgcaggtgactctcgggcccaagcaaccttctggaaaacgggttaataaataaatcaataaagaaccttcaagtttct

SEQ ID NO: 156280 - DNA, 467 bp, Homo sapiens
  Payload ID: 10661
  Gene Symbol: MYCBPAP
  Gene Name: MYCBP associated protein
  ENST ID: ENST00000488432
  CDS Start-End: 1-320
aggtcaatctccacgcggtctccctgacccaggacgtttttgaggatgagaggaaagtactggagagcaagctgactgcccatgaggcagtcaccgtcgttcgcgaagtgctgcaggagctgctgatgggggtcttgaccccggagcgcacaccatcacctgtggatgcctatctcaccgaggaagacttgttccggcacagaaatcctccggtgaggcccagcgccagcccctgccccctcatgtgtgccctgcgtcaagggtccccaacccgcaggccgcacagcggcaggtccgtgggctgctggacaccctggtgactgacctgatggtcctggctgatgagctcagccccataaagaatgtcgaggaggctttgcgcctctgcaggtgactctcgggcccaagcaaccttctggaaaacgggttaataaataaatcaataaagaaccttcaagtttctacta

SEQ ID NO: 156281 - DNA, 427 bp, Homo sapiens
  Payload ID: 10661
  Gene Symbol: MYCBPAP
  Gene Name: MYCBP associated protein
  ENST ID: ENST00000477744
  CDS Start-End: 1-146
tgcacagtgaggtgaagggaagcgcccagcagccattcccctgcctcccacctgccttattcattccgttcagtctgcagacaataagtgcccactccatcatggtggaagcagagctgcttcaggaagggcatcctcgtgtgtgagacaggcctcatgaataaggaatgcgcctagcatgttaggtgatgagtacgacgggagagaagatagaccaggcagggaatggaggcacagaggcctcagtgaggaggtccgtgggctgctggacaccctggtgactgacctgatggtcctggctgatgagctcagccccataaagaatgtcgaggaggctttgcgcctctgcaggtgactctcgggcccaagcaaccttctggaaaacgggttaataaataaatcaataaagaaccttcaagtttctact

SEQ ID NO: 156282 - DNA, 702 bp, Homo sapiens
  Payload ID: 10661
  Gene Symbol: MYCBPAP
  Gene Name: MYCBP associated protein
  ENST ID: ENST00000485169
  CDS Start-End: 1-325
ggacaaggagcacgtcagccccatagccacagagaaggcctctgtgaatgctgagctgttaccacgctttaggagccccatctccgaaactcaagtgccccggcctgagaacgaggccctcagggaatccgggtcccagaaggccagagtggggaccaagagtcctcagcggaagagcatcatggaggagatcctggtggaggaaagcccagatgtggacagcaccaagagcccctgggagccggatggccttcccctgctggagtggaacctctgcttggaggacttcagaaagaatggtgcccatgaccctgccaggcagtgatggtgctccctgatgagaaccacagagaggatgcgttgatgaggctcaacaaagcagccctggagctgtgccagaagccaaggccattgcagtccaacctcctgcaccagatgtgtttgcagctgtggcgagatgtgattgacagcctggtgggccattccatgtggctgaggtctgtgctgggcctgcctgagaaggagaccatctatttgaatgtgcctgaagagcaagatcaaaaatcacctcctatcatggaagtgaaggtacctgtggggaaagctgggaaggaggagcggaaaggagcagcccaggaaaagaagcaactggggatcaaagacaaagaagacaagaaaggagccaagctgctcgggaaagag

SEQ ID NO: 156283 - DNA, 4433 bp, Homo sapiens
  Payload ID: 10662
  Gene Symbol: MAATS1
  Gene Name: MYCBP-associated, testis expressed 1
  Uniprot ID: Q7Z4T9
  ENST ID: ENST00000273390
  CDS Start-End: 78-2381
gttaccatagcgacgtgcacgcagtagccaggcctgacccgctggtcccttgctggcgggaggaaagaggcggcaccatgagccacgcagtaaccatcgaggagccccaggcccagccgcaggtgtctcaaactcggtaccgggagaggtcgcgggctgggagccacatctcctccaatcgagcgtatgattttctgtacgatccattgtttattgtgtcaagtgagaaagaccatacacaggcaaatatccaagctaccctgattcgcagcagactgagaaaagttcccaggtttaaaaccatgttcagtaacctgatccattatccaagatattctctatattggagcaagtcagatcctgtcccaccatttatcagtcgggaatggaagggacataaggagaaacacagagaagccctccggcagctcaccacaactgacgcttcttttcagatgcctaaagaagtttatgaagatcctgaagttactggaaagaatcgctataaatactttgaaaggccttttctcccattttttcagcagatgccattcaatgttgtttatgccgtatccaaggcagaaccatacacttttcctcctacttctactaagcacctatccatcccttcaaagtctactgtgggcactcagactgattatcgggatgctgacgttcaaacagatccatactctgcagaatatgtagtatgtcaggactcaatccctgagctcttgaccctggctacgcttacttggggtcggggtctcccagcaggacaagctgaggtggagatgatagaaagagcccgcgagaagcgtgcttgggaagcctctctccccgctctgagtgacacctcccagtttgagaagaggaggaaaatgatgaatgaaatggagaggaaggagtgggccttcagagagcaggagattgaaaaactgcaggagattcgcctggaagttctaaaagagctgttgaggaagcgtgaagagaatcagaatgaagtgaatatgaagcacttgaatgcccggtggtctaaactgcaggagggaaaagaggcaaaaatggcaaaaattcagcgcacgcatgtatcaacaatcagaaaacttgtaggaaagagaaagaatatagaagggaagttggagagaagaaatatcatcaaggattattctgattatgcatcacaggtctatggacctctgtctcgtcttgggtgtttcccagacaacaactcagaggactttgtagtaaaaaactactatctcaacacctatgaaggattagtggaacttgagtcatgtctcccagattttgtgacacaaccccaaatcagagctccaaaacctaaagtcattaccaccaaagctggttttctgaagagggcagcaaggttggactatgagttggcagaggttcataaggcactgttggataagaagaataaagttcttgaagtaaagaaaccccctcgcttccttcaaagaaacccaatacctcaacctcggcttccaactccaaccttggaaatgacgtccaatgaagaagaagaaatggaaatggctgtgatctaccttcaaaagttactccggggcagagtcgttcagaacatgatgtttgaagggaaagaaaagcgactggagttgatccaggagttgcgcacctgccacgcactacaagaagatgaaaagctggtgaaaaaagccgagaagcaagtgaccctggccttacagcggcagaggaacttgcatgagcacaaggtgtcactggttgaaaaccatttggccggactggaaggaagggcactagcagacatgtttgacttcctgtccaaagagctggtgagactgcaggaggagaggaggatccatgcctttgtcatgctggctgagcgccagcggcgggtacgagaggctgaagagagtggtcggcgccaggtggaaaaacagcgcctgcgggaggaggacgagatatttaaggaggtggttaaagttcaccatagtactataagctcctacctagaagacataatactgaataccgaagcgaatactgcagaagaacaagccagggcagaaatagagaagatggctgagaaaatcaatgacattgcttatgaaatggaaagccgccgaacctatcttcagtcagaggagattgttgctgagttggtttatagttttctgatcccagaggtgcaaaaatactttgtcaaagaaaaagtgaggaacgcacagcggaaacatattcttgcagcccatcagatcatccacagttacacggaaagcatggttcaaaagaaattaactgagggagagcaagatgaggcctcaaatgctgccatgttacttgagaaagaaactcaaaatgagaacaacagctaagattgtgatttttttgtaaaagaagctgtacgaatcatcataaataattccaatagtctgcacttctcccaaggtgtgcactgctcataaacttgccagtgtgtgattcatgagaaaggagatttattttccttaaacatccaataatttaaaatgattttcaataataataatcaaatgaaaaagcttcattctcttcagtgtcttctagatgccctacttaaagagaacattttcttatgtctcatttcaatattttgttaactatgaggatgtgctggtttgttgaatcaaacaaaaggaaatgttgtggaatatttttccaagtagttttggttcactattcacaggacattggcattatctactaaggctgaaaatgtgcatattccatgactcaggattttatctcctagatatatattcaacagaaatgcatgagtatgtgcaccaacaggcatgacaaaaatatttatagtagtggtgttcacaatagtcccaaactggaaacccaagtgtccatctccatcggaacagaaaactatactttggtctgcttctacagtggcacatcaacccacctttgagctttagatctaagaagtgtgttcatgcaacagccatagagatggtgctattgaaaggcaatctgcccatcctgtgtattgacaagcatcaggattccaggaggattcttcctgattcaaagactgtcaaataggaaaaaagaaaacagtaaatgaacaaaaacatcaacatggagtccaagtaatgaatttatagaggaaaatgtatgctactctgaaaacaaagcttatgttagagaatatcttactgtaagaaacaaggaaaattgcagaaacatttgctgagtgtttttaataggagtcaaaaagaaagggtcttttcagaaactgaagtaggaaataataacagacaaggtcaaaaaatagatgcaggctgaaaagaaaaggaagtgggctaagatgggaaaaatataaaaagatttaaaatccagcaacaaaatttacacattcatttggatgcagtgaaaagggcagaaataccacagcagagaataaaattgataatgttggcaacacatttattaagtgatccaacatgggatgggaaggaatgggcaaagagattaaaatgacagaagttagctgtagatgacctatcccacagcaatcggagttcttgaagaagaaaccagaacaaataaaatagaaacaataatcagagtttaataattaattttctgagtttttttttaaaaaaactaattatacaaacttgaaagggttcaccttgccctagcaaaactaggattgggacacctttttttccccctgaggatcactgacaaaaaacactgcaccagtaaggaagcaactaaattttgttttgttctttgaaaaaggctaacctgagctaggtaaaggttatatcattcacttttgaaataaaccatcgagaacacaaaatgacaagtgagttaggttgggctgatgggatagaaggtgggaggggaatgctatacagctgggaacagcagactttctctgaagggccagatggtaactacattagggtttgcgggtctgatggtcgccatcataactgcatactcaactctgccgttgtagggtaagagcagcactcgatgacacagaaatgaatgcacatgactgtgttccagtaaaattttattttaattaaaatcaattcatgtttgaaaaaggatttaaagtagcttctaataaaggacatgtgtaatgaaacttaaaatatgatattttctttaaaaatctttatccttatgtagacttctaaaactatgttttgcatttagacagtcaaggaaaatacaagttgttatacaattctcattgactaattgaagtttactaggagaggaaaactttttcttgataccggcaatcttttacttataatggcttgagttaaaatgctccaacttttctaatttttgcttttgaaaataaaacacctatagtgacaataaaaacacacatttaaagccaa

SEQ ID NO: 156284 - DNA, 2712 bp, Homo sapiens
  Payload ID: 10662
  Gene Symbol: MAATS1
  Gene Name: MYCBP-associated, testis expressed 1
  ENST ID: ENST00000482927
  CDS Start-End: 64-231
gtgcacgcagtagccaggcctgacccgctggtcccttgctggcgggaggaaagaggcggcaccatgagccacgcagtaaccatcgaggagccccaggcccagccgcaggtgtctcaaactcggtaccgggagaggtcgcgggctgggagccacatctcctccaatcgagcgtatgattttctgtacggtaaggaccgccgcagaccttcctccgcgtccgtcgcctcctaggccagatccattgtttattgtgtcaagtgagaaagaccatacacaggcaaatatccaagctaccctgattcgcagcagactgagaaaagttcccaggtttaaaaccatgttcagtaacctgatccattatccaagatattctctatattggagcaagtcagatcctgtcccaccatttatcagtcgggaatggaagggacataaggagaaacacagagaagccctccggcagctcaccacaactgacgcttcttttcagatgcctaaagaagtttatgaagatcctgaagttactggaaagaatcgctataaatactttgaaaggccttttctcccattttttcagcagatgccattcaatgttgtttatgccgtatccaaggcagaaccatacacttttcctcctacttctactaagcacctatccatcccttcaaagtctactgtgggcactcagactgattatcgggatgctgacgttcaaacagatccatactctgcagaatatgtagtatgtcaggactcaatccctgagctcttgaccctggctacgcttacttggggtcggggtctcccagcaggacaagctgaggtggagatgatagaaagagcccgcgagaagcgtgcttgggaagcctctctccccgctctgagtgacacctcccagtttgagaagaggaggaaaatgatgaatgaaatggagaggaaggagtgggccttcagagagcaggagattgaaaaactgcaggagattcgcctggaagttctaaaagagctgttgaggaagcgtgaagagaatcagaatgaagtgaatatgaagcacttgaatgcccggtggtctaaactgcaggagggaaaagaggcaaaaatggcaaaaattcagcgcacgcatgtatcaacaatcagaaaacttgtaggaaagagaaagaatatagaagggaagttggagagaagaaatatcatcaaggattattctgattatgcatcacaggtctatggacctctgtctcgtcttgggtgtttcccagacaacaactcagaggactttgtagtaaaaaactactatctcaacacctatgaaggattagtggaacttgagtcatgtctcccagattttgtgacacaaccccaaatcagagctccaaaacctaaagtcattaccaccaaagctggttttctgaagagggcagcaaggttggactatgagttggcagaggttcataaggcactgttggataagaagaataaagttcttgaagtaaagaaaccccctcgcttccttcaaagaaacccaatacctcaacctcggcttccaactccaaccttggaaatgacgtccaatgaagaagaagaaatggaaatggctgtgatctaccttcaaaagttactccggggcagagtcgttcagaacatgatgtttgaagggaaagaaaagcgactggagttgatccaggagttgcgcacctgccacgcactacaagaagatgaaaagctggtgaaaaaagccgagaagcaagtgaccctggccttacagcggcagaggaacttgcatgagcacaaggtgtcactggttgaaaaccatttggccggactggaaggaagggcactagcagacatgtttgacttcctgtccaaagagctggtgagactgcaggaggagaggaggatccatgcctttgtcatgctggctgagcgccagcggcgggtacgagaggctgaagagagtggtcggcgccaggtggaaaaacagcgcctgcgggaggaggacgagatatttaaggaggtggttaaagttcaccatagtactataagctcctacctagaagacataatactgaataccgaagcgaatactgcagaagaacaagccagggcagaaatagagaagatggctgagaaaatcaatgacattgcttatgaaatggaaagccgccgaacctatcttcagtcagaggagattgttgctgagttggtttatagttttctgatcccagaggtgcaaaaatactttgtcaaagaaaaagtgaggaacgcacagcggaaacatattcttgcagcccatcagatcatccacagttacacggaaagcatggttcaaaagaaattaactgagggagagcaagatgaggcctcaaatgctgccatgttacttgagaaagaaactcaaaatgagaacaacagctaagattgtgatttttttgtaaaagaagctgtacgaatcatcataaataattccaatagtctgcacttctcccaaggtgtgcactgctcataaacttgccagtgtgtgattcatgagaaaggagatttattttccttaaacatccaataatttaaaatgattttcaataataataatcaaatgaaaaagcttcattctcttcagtgtcttctagatgccctacttaaagagaacattttcttatgtctcatttcaatattttgttaactatgaggatgtgctggtttgttgaatcaaac

SEQ ID NO: 156285 - DNA, 939 bp, Homo sapiens
  Payload ID: 10662
  Gene Symbol: MAATS1
  Gene Name: MYCBP-associated, testis expressed 1
  Uniprot ID: Q7Z4T9
  ENST ID: ENST00000463700
  CDS Start-End: 67-783
gacgtgcacgcagtagccaggcctgacccgctggtcccttgctggcgggaggaaagaggcggcaccatgagccacgcagtaaccatcgaggagccccaggcccagccgcaggtgtctcaaactcggtaccgggagaggtcgcgggctgggagccacatctcctccaatcgagcgtatgattttctgtacgatccattgtttattgtgtcaagtgagaaagaccatacacaggcaaatatccaagctaccctgattcgcagcagactgagaaaagttcccaggtttaaaaccatgttcagtaacctgatccattatccaagatattctctatattggagcaagtcagatcctgtcccaccatttatcagtcgggaatggaagggacataaggagaaacacagagaagccctccggcagctcaccacaactgacgcttcttttcagatgcctaaagaagtttatgaagatcctgaagttactggaaagaatcgctataaatactttgaaaggccttttctcccattttttcagcagatgccattcaatgttgtttatgccgtatccaaggcagaaccatacacttttcctcctacttctactaagcacctatccatcccttcaaagtctactgtgggcactcagactgattatcgggatgctgacgttcaaacagatccatactctgcagaatatgtagtatgtcaggactcaatccctgagctcttgaccctggctacgcttacttggggtgagttggtaaatctcctgactattggcagatgacgatgctgataaccacgcatgctgttcaaatggcccatgtacaggcaattgtggtttacagtgttgctatataaagtgtcttagtacagcaacttcatagactcataatttttctgatacttctggtcaaataaagatactatctttttattgtga

SEQ ID NO: 156286 - DNA, 4356 bp, Homo sapiens
  Payload ID: 10662
  Gene Symbol: MAATS1
  Gene Name: MYCBP-associated, testis expressed 1
  ENST ID: ENST00000482573
  CDS Start-End: 78-221
gttaccatagcgacgtgcacgcagtagccaggcctgacccgctggtcccttgctggcgggaggaaagaggcggcaccatgagccacgcagtaaccatcgaggagccccaggcccagccgcaggtgtctcaaactcggtaccgggagaggtcgcgggctgggagccacatctcctccaatcgagcgtatgattttctgtacgagaaaagttcccaggtttaaaaccatgttcagtaacctgatccattatccaagatattctctatattggagcaagtcagatcctgtcccaccatttatcagtcgggaatggaagggacataaggagaaacacagagaagccctccggcagctcaccacaactgacgcttcttttcagatgcctaaagaagtttatgaagatcctgaagttactggaaagaatcgctataaatactttgaaaggccttttctcccattttttcagcagatgccattcaatgttgtttatgccgtatccaaggcagaaccatacacttttcctcctacttctactaagcacctatccatcccttcaaagtctactgtgggcactcagactgattatcgggatgctgacgttcaaacagatccatactctgcagaatatgtagtatgtcaggactcaatccctgagctcttgaccctggctacgcttacttggggtcggggtctcccagcaggacaagctgaggtggagatgatagaaagagcccgcgagaagcgtgcttgggaagcctctctccccgctctgagtgacacctcccagtttgagaagaggaggaaaatgatgaatgaaatggagaggaaggagtgggccttcagagagcaggagattgaaaaactgcaggagattcgcctggaagttctaaaagagctgttgaggaagcgtgaagagaatcagaatgaagtgaatatgaagcacttgaatgcccggtggtctaaactgcaggagggaaaagaggcaaaaatggcaaaaattcagcgcacgcatgtatcaacaatcagaaaacttgtaggaaagagaaagaatatagaagggaagttggagagaagaaatatcatcaaggattattctgattatgcatcacaggtctatggacctctgtctcgtcttgggtgtttcccagacaacaactcagaggactttgtagtaaaaaactactatctcaacacctatgaaggattagtggaacttgagtcatgtctcccagattttgtgacacaaccccaaatcagagctccaaaacctaaagtcattaccaccaaagctggttttctgaagagggcagcaaggttggactatgagttggcagaggttcataaggcactgttggataagaagaataaagttcttgaagtaaagaaaccccctcgcttccttcaaagaaacccaatacctcaacctcggcttccaactccaaccttggaaatgacgtccaatgaagaagaagaaatggaaatggctgtgatctaccttcaaaagttactccggggcagagtcgttcagaacatgatgtttgaagggaaagaaaagcgactggagttgatccaggagttgcgcacctgccacgcactacaagaagatgaaaagctggtgaaaaaagccgagaagcaagtgaccctggccttacagcggcagaggaacttgcatgagcacaaggtgtcactggttgaaaaccatttggccggactggaaggaagggcactagcagacatgtttgacttcctgtccaaagagctggtgagactgcaggaggagaggaggatccatgcctttgtcatgctggctgagcgccagcggcgggtacgagaggctgaagagagtggtcggcgccaggtggaaaaacagcgcctgcgggaggaggacgagatatttaaggaggtggttaaagttcaccatagtactataagctcctacctagaagacataatactgaataccgaagcgaatactgcagaagaacaagccagggcagaaatagagaagatggctgagaaaatcaatgacattgcttatgaaatggaaagccgccgaacctatcttcagtcagaggagattgttgctgagttggtttatagttttctgatcccagaggtgcaaaaatactttgtcaaagaaaaagtgaggaacgcacagcggaaacatattcttgcagcccatcagatcatccacagttacacggaaagcatggttcaaaagaaattaactgagggagagcaagatgaggcctcaaatgctgccatgttacttgagaaagaaactcaaaatgagaacaacagctaagattgtgatttttttgtaaaagaagctgtacgaatcatcataaataattccaatagtctgcacttctcccaaggtgtgcactgctcataaacttgccagtgtgtgattcatgagaaaggagatttattttccttaaacatccaataatttaaaatgattttcaataataataatcaaatgaaaaagcttcattctcttcagtgtcttctagatgccctacttaaagagaacattttcttatgtctcatttcaatattttgttaactatgaggatgtgctggtttgttgaatcaaacaaaaggaaatgttgtggaatatttttccaagtagttttggttcactattcacaggacattggcattatctactaaggctgaaaatgtgcatattccatgactcaggattttatctcctagatatatattcaacagaaatgcatgagtatgtgcaccaacaggcatgacaaaaatatttatagtagtggtgttcacaatagtcccaaactggaaacccaagtgtccatctccatcggaacagaaaactatactttggtctgcttctacagtggcacatcaacccacctttgagctttagatctaagaagtgtgttcatgcaacagccatagagatggtgctattgaaaggcaatctgcccatcctgtgtattgacaagcatcaggattccaggaggattcttcctgattcaaagactgtcaaataggaaaaaagaaaacagtaaatgaacaaaaacatcaacatggagtccaagtaatgaatttatagaggaaaatgtatgctactctgaaaacaaagcttatgttagagaatatcttactgtaagaaacaaggaaaattgcagaaacatttgctgagtgtttttaataggagtcaaaaagaaagggtcttttcagaaactgaagtaggaaataataacagacaaggtcaaaaaatagatgcaggctgaaaagaaaaggaagtgggctaagatgggaaaaatataaaaagatttaaaatccagcaacaaaatttacacattcatttggatgcagtgaaaagggcagaaataccacagcagagaataaaattgataatgttggcaacacatttattaagtgatccaacatgggatgggaaggaatgggcaaagagattaaaatgacagaagttagctgtagatgacctatcccacagcaatcggagttcttgaagaagaaaccagaacaaataaaatagaaacaataatcagagtttaataattaattttctgagtttttttttaaaaaaactaattatacaaacttgaaagggttcaccttgccctagcaaaactaggattgggacacctttttttccccctgaggatcactgacaaaaaacactgcaccagtaaggaagcaactaaattttgttttgttctttgaaaaaggctaacctgagctaggtaaaggttatatcattcacttttgaaataaaccatcgagaacacaaaatgacaagtgagttaggttgggctgatgggatagaaggtgggaggggaatgctatacagctgggaacagcagactttctctgaagggccagatggtaactacattagggtttgcgggtctgatggtcgccatcataactgcatactcaactctgccgttgtagggtaagagcagcactcgatgacacagaaatgaatgcacatgactgtgttccagtaaaattttattttaattaaaatcaattcatgtttgaaaaaggatttaaagtagcttctaataaaggacatgtgtaatgaaacttaaaatatgatattttctttaaaaatctttatccttatgtagacttctaaaactatgttttgcatttagacagtcaaggaaaatacaagttgttatacaattctcattgactaattgaagtttactaggagaggaaaactttttcttgataccggcaatcttttacttataatggcttgagttaaaatgctccaacttttctaatttttgcttttgaaaataaaacacctatagtgacaataaaaacacacatttaaagccaa

SEQ ID NO: 156287 - DNA, 535 bp, Homo sapiens
  Payload ID: 10662
  Gene Symbol: MAATS1
  Gene Name: MYCBP-associated, testis expressed 1
  ENST ID: ENST00000498167
  CDS Start-End: 1-306
gaatggaagggacataaggagaaacacagagaagccctccggcagctcaccacatgcctaaagaagtttatgaagatcctgaagttactggaaagaatcgctataaatactttgaaaggccttttctcccattttttcagcagatgccattcaatgttgtttatgccgtatccaaggcagaaccatacacttttcctcctacttctactaagcacctatccatcccttcaaagtctactgtgggcactcagactgattatcgggatgctgacgttcaaacagatccatactctgcagaatatgtagtatgtcaggactcaatccctgagctcttgaccctggctacgcttacttggggtcggggtctcccagcaggacaagctgaggtggagatgatagaaagagcccgcgagaagcgtgcttgggaagcctctctccccgctctgagtgacacctcccagtttgagaagaggaggaaaatgatgaatgaaatggagaggaaggagtgggccttcagagagcaggagattgaaaa

SEQ ID NO: 156288 - DNA, 2353 bp, Homo sapiens
  Payload ID: 10662
  Gene Symbol: MAATS1
  Gene Name: MYCBP-associated, testis expressed 1
  ENST ID: ENST00000475093
  CDS Start-End: 49-444
aggcctgacccgctggtcccttgctggcgggaggaaagaggcggcaccatgagccacgcagtaaccatcgaggagccccaggcccagccgcaggtgtctcaaactcggtaccgggagaggtcgcgggctgggagccacatctcctccaatcgagcgtatgattttctgtacgaactgacgcttcttttcagatgcctaaagaagtttatgaagatcctgaagttactggaaagaatcgctataaatactttgaaaggccttttctcccattttttcagcagatgccattcaatgttgtttatgccgtatccaaggcagaaccatacacttttcctcctacttctactaagcacctatccatcccttcaaagtctactgtgggcactcagactgattatcgggatgctgacgttcaaacagatccatactctgcagaatatgtagtatgtcaggactcaatccctgagctcttgaccctggctacgcttacttggggtcggggtctcccagcaggacaagctgaggtggagatgatagaaagagcccgcgagaagcgtgcttgggaagcctctctccccgctctgagtgacacctcccagtttgagaagaggaggaaaatgatgaatgaaatggagaggaaggagtgggccttcagagagcaggagattgaaaaactgcaggagattcgcctggaagttctaaaagagctgttgaggaagcgtgaagagaatcagaatgaagtgaatatgaagcacttgaatgcccggtggtctaaactgcaggagggaaaagaggcaaaaatggcaaaaattcagcgcacgcatgtatcaacaatcagaaaacttgtaggaaagagaaagaatatagaagggaagttggagagaagaaatatcatcaaggattattctgattatgcatcacaggtctatggacctctgtctcgtcttgggtgtttcccagacaacaactcagaggactttgtagtaaaaaactactatctcaacacctatgaaggattagtggaacttgagtcatgtctcccagattttgtgacacaaccccaaatcagagctccaaaacctaaagtcattaccaccaaagctggttttctgaagagggcagcaaggttggactatgagttggcagaggttcataaggcactgttggataagaagaataaagttcttgaagtaaagaaaccccctcgcttccttcaaagaaacccaatacctcaacctcggcttccaactccaaccttggaaatgacgtccaatgaagaagaagaaatggaaatggctgtgatctaccttcaaaagttactccggggcagagtcgttcagaacatgatgtttgaagggaaagaaaagcgactggagttgatccaggagttgcgcacctgccacgcactacaagaagatgaaaagctggtgaaaaaagccgagaagcaagtgaccctggccttacagcggcagaggaacttgcatgagcacaaggtgtcactggttgaaaaccatttggccggactggaaggaagggcactagcagacatgtttgacttcctgtccaaagagctggtgagactgcaggaggagaggaggatccatgcctttgtcatgctggctgagcgccagcggcgggtacgagaggctgaagagagtggtcggcgccaggtggaaaaacagcgcctgcgggaggaggacgagatatttaaggaggtggttaaagttcaccatagtactataagctcctacctagaagacataatactgaataccgaagcgaatactgcagaagaacaagccagggcagaaatagagaagatggctgagaaaatcaatgacattgcttatgaaatggaaagccgccgaacctatcttcagtcagaggagattgttgctgagttggtttatagttttctgatcccagaggtgcaaaaatactttgtcaaagaaaaagtgaggaacgcacagcggaaacatattcttgcagcccatcagatcatccacagttacacggaaagcatggttcaaaagaaattaactgagggagagcaagatgaggcctcaaatgctgccatgttacttgagaaagaaactcaaaatgagaacaacagctaagattgtgatttttttgtaaaagaagctgtacgaatcatcataaataattccaatagtctgcacttctcccaaggtgtgcactgctcataaacttgccagtgtgtgattcatgagaaaggagatttattttccttaaacatccaataatttaaaatgattttcaataataataatcaaatgaaaaagcttcattctcttcagtgtcttctagatgccctacttaaagagaacatttt

SEQ ID NO: 156289 - DNA, 2426 bp, Homo sapiens
  Payload ID: 10663
  Gene Symbol: MAG
  Gene Name: myelin associated glycoprotein
  Uniprot ID: P20916
  ENST ID: ENST00000361922
  CDS Start-End: 151-1899
cctagaccctggaaggcaggggactgcgagctgggctggcggagcagaggtgcagaagcaactgagtccaagttgtctggcggcttcaggtggacccagaagacgtccccaactcagggagattcagcgatcactcactcgctgtacagaatgatattcctcacggcactgcctctgttctggattatgatttcagcctcccgagggggtcactggggtgcctggatgccctcgtccatctcggccttcgaaggcacgtgcgtctccatcccctgccgctttgacttcccggatgagctgcggcccgctgtggtgcatggtgtctggtacttcaatagcccctaccccaagaactaccccccggtggtcttcaagtcgcgcacccaagtagtccacgagagcttccagggccgcagccgcctcctgggggacctgggcctgcgaaactgcaccctcctgctcagcaacgtcagccccgagctgggcgggaagtactacttccgtggggacctgggcggctacaaccagtacaccttctcagagcacagcgtcctggatatcgtcaacacccccaacatcgtggtgcccccagaggtggtggcaggcacggaggtggaggtcagctgcatggtgccggacaactgcccagagctgcgccctgagctgagctggctgggccacgaggggctgggggagcccgctgtgctgggccggctgcgggaggacgagggcacctgggtgcaggtgtcactgctgcacttcgtgcccacgagggaggccaacggccacaggctgggctgccaggcctccttccccaacaccaccctgcagttcgagggctacgccagcatggacgtcaagtaccccccggtgattgtggagatgaactcctcggtggaggccatcgagggctcccacgtgagcctgctctgtggggctgacagcaaccccccgccgctgctgacctggatgcgggacgggacagtcctccgggaggcggtggccgagagcctgctcctggagctggaggaggtgacccccgccgaagacggcgtctatgcctgcctggccgagaatgcctatggccaggacaaccgcaccgtggggctcagtgtcatgtatgcaccctggaagccaacagtgaacgggacaatggtggccgtagagggggagacggtctctatcttgtgctccacacagagcaacccggaccctattctcaccatcttcaaggagaagcagatcctgtccacggtcatctacgagagcgagctgcagctggagctgccggccgtgtcacccgaggatgatggagagtactggtgtgtggctgagaaccagtatggccagagggccaccgccttcaacctgtctgtggagttcgcccctgtgctcctcctggagtcccactgcgcggcagcccgagacacggtgcagtgcctgtgcgtggtgaagtccaacccggagccgtccgtggcctttgagctgccatcgcgcaatgtgaccgtgaacgagagcgagcgggagttcgtgtactcggagcgcagcggcctcgtgctcaccagcatcctcacgctgcgggggcaggcccaggccccgccccgcgtcatctgcaccgcgaggaacctctatggcgccaagagcctggagctgcccttccagggagcccatcgactgatgtgggccaagatcgggcctgtgggcgccgtggtcgcctttgccatcctgattgccatcgtctgctacattacccagacacgcaggaaaaagaacgtgacagagagccccagcttctcggcaggggacaaccctcccgtcctgttcagcagcgacttccgcatctctggggcaccagagaagtacgagtccaaagaggtttctaccctggaatctcactgagtgccccaggagagcgagaggcgcctgggatctgagaggaggctgctgggccttcggggtgagcccccagagctggacctgagctattctcactcggacctggggaaacggcccaccaaggacagctacacgctgacggaggagctagctgagtatgctgaaatccgggtcaagtgaaggagctgggggcagcctgcgtggctgacccccctcaggaccctcgctggcccccactggctgtgggctcccttcctcccaaaagtatcgggggctggggcaggaggggagtgaggcaggtgacagtgaggtcctgggggcctgacctccccctccttcccagctgcccctccctgccagcacccccacgccctcattacggctcctctctaacctcctttaccctcatctgtctggaggggagctctgtctgtccgtgttatttattgctacttcctgcctggtctcctgcccccacacctggccctggggcctgtacaaaagggacatgaaataaatgccccaaagcc

SEQ ID NO: 156290 - DNA, 2390 bp, Homo sapiens
  Payload ID: 10663
  Gene Symbol: MAG
  Gene Name: myelin associated glycoprotein
  Uniprot ID: P20916
  ENST ID: ENST00000392213
  CDS Start-End: 160-2040
aagtgggggcctagaccctggaaggcaggggactgcgagctgggctggcggagcagaggtgcagaagcaactgagtccaagttgtctggcggcttcaggtggacccagaagacgtccccaactcagggagattcagcgatcactcactcgctgtacagaatgatattcctcacggcactgcctctgttctggattatgatttcagcctcccgagggggtcactggggtgcctggatgccctcgtccatctcggccttcgaaggcacgtgcgtctccatcccctgccgctttgacttcccggatgagctgcggcccgctgtggtgcatggtgtctggtacttcaatagcccctaccccaagaactaccccccggtggtcttcaagtcgcgcacccaagtagtccacgagagcttccagggccgcagccgcctcctgggggacctgggcctgcgaaactgcaccctcctgctcagcaacgtcagccccgagctgggcgggaagtactacttccgtggggacctgggcggctacaaccagtacaccttctcagagcacagcgtcctggatatcgtcaacacccccaacatcgtggtgcccccagaggtggtggcaggcacggaggtggaggtcagctgcatggtgccggacaactgcccagagctgcgccctgagctgagctggctgggccacgaggggctgggggagcccgctgtgctgggccggctgcgggaggacgagggcacctgggtgcaggtgtcactgctgcacttcgtgcccacgagggaggccaacggccacaggctgggctgccaggcctccttccccaacaccaccctgcagttcgagggctacgccagcatggacgtcaagtaccccccggtgattgtggagatgaactcctcggtggaggccatcgagggctcccacgtgagcctgctctgtggggctgacagcaaccccccgccgctgctgacctggatgcgggacgggacagtcctccgggaggcggtggccgagagcctgctcctggagctggaggaggtgacccccgccgaagacggcgtctatgcctgcctggccgagaatgcctatggccaggacaaccgcaccgtggggctcagtgtcatgtatgcaccctggaagccaacagtgaacgggacaatggtggccgtagagggggagacggtctctatcttgtgctccacacagagcaacccggaccctattctcaccatcttcaaggagaagcagatcctgtccacggtcatctacgagagcgagctgcagctggagctgccggccgtgtcacccgaggatgatggagagtactggtgtgtggctgagaaccagtatggccagagggccaccgccttcaacctgtctgtggagttcgcccctgtgctcctcctggagtcccactgcgcggcagcccgagacacggtgcagtgcctgtgcgtggtgaagtccaacccggagccgtccgtggcctttgagctgccatcgcgcaatgtgaccgtgaacgagagcgagcgggagttcgtgtactcggagcgcagcggcctcgtgctcaccagcatcctcacgctgcgggggcaggcccaggccccgccccgcgtcatctgcaccgcgaggaacctctatggcgccaagagcctggagctgcccttccagggagcccatcgactgatgtgggccaagatcgggcctgtgggcgccgtggtcgcctttgccatcctgattgccatcgtctgctacattacccagacacgcaggaaaaagaacgtgacagagagccccagcttctcggcaggggacaaccctcccgtcctgttcagcagcgacttccgcatctctggggcaccagagaagtacgagagcgagaggcgcctgggatctgagaggaggctgctgggccttcggggtgagcccccagagctggacctgagctattctcactcggacctggggaaacggcccaccaaggacagctacacgctgacggaggagctagctgagtatgctgaaatccgggtcaagtgaaggagctgggggcagcctgcgtggctgacccccctcaggaccctcgctggcccccactggctgtgggctcccttcctcccaaaagtatcgggggctggggcaggaggggagtgaggcaggtgacagtgaggtcctgggggcctgacctccccctccttcccagctgcccctccctgccagcacccccacgccctcattacggctcctctctaacctcctttaccctcatctgtctggaggggagctctgtctgtccgtgttatttattgctacttcctgcctggtctcctgcccccacacctggccctggggcctgtacaaaagggacatgaaataaatgccccaaagcc

SEQ ID NO: 156291 - DNA, 2341 bp, Homo sapiens
  Payload ID: 10663
  Gene Symbol: MAG
  Gene Name: myelin associated glycoprotein
  Uniprot ID: P20916
  ENST ID: ENST00000537831
  CDS Start-End: 186-1991
gagctgggctggcggagcagaggtgcagaagcaactgagtccaagttgtctggcggcttcaggtggacccagaagacgtccccaactcagggagattcaggtaacggctgacaggtgctggggacctaaaggctttggcccctgagcaggttggagcctcccgagggggtcactggggtgcctggatgccctcgtccatctcggccttcgaaggcacgtgcgtctccatcccctgccgctttgacttcccggatgagctgcggcccgctgtggtgcatggtgtctggtacttcaatagcccctaccccaagaactaccccccggtggtcttcaagtcgcgcacccaagtagtccacgagagcttccagggccgcagccgcctcctgggggacctgggcctgcgaaactgcaccctcctgctcagcaacgtcagccccgagctgggcgggaagtactacttccgtggggacctgggcggctacaaccagtacaccttctcagagcacagcgtcctggatatcgtcaacacccccaacatcgtggtgcccccagaggtggtggcaggcacggaggtggaggtcagctgcatggtgccggacaactgcccagagctgcgccctgagctgagctggctgggccacgaggggctgggggagcccgctgtgctgggccggctgcgggaggacgagggcacctgggtgcaggtgtcactgctgcacttcgtgcccacgagggaggccaacggccacaggctgggctgccaggcctccttccccaacaccaccctgcagttcgagggctacgccagcatggacgtcaagtaccccccggtgattgtggagatgaactcctcggtggaggccatcgagggctcccacgtgagcctgctctgtggggctgacagcaaccccccgccgctgctgacctggatgcgggacgggacagtcctccgggaggcggtggccgagagcctgctcctggagctggaggaggtgacccccgccgaagacggcgtctatgcctgcctggccgagaatgcctatggccaggacaaccgcaccgtggggctcagtgtcatgtatgcaccctggaagccaacagtgaacgggacaatggtggccgtagagggggagacggtctctatcttgtgctccacacagagcaacccggaccctattctcaccatcttcaaggagaagcagatcctgtccacggtcatctacgagagcgagctgcagctggagctgccggccgtgtcacccgaggatgatggagagtactggtgtgtggctgagaaccagtatggccagagggccaccgccttcaacctgtctgtggagttcgcccctgtgctcctcctggagtcccactgcgcggcagcccgagacacggtgcagtgcctgtgcgtggtgaagtccaacccggagccgtccgtggcctttgagctgccatcgcgcaatgtgaccgtgaacgagagcgagcgggagttcgtgtactcggagcgcagcggcctcgtgctcaccagcatcctcacgctgcgggggcaggcccaggccccgccccgcgtcatctgcaccgcgaggaacctctatggcgccaagagcctggagctgcccttccagggagcccatcgactgatgtgggccaagatcgggcctgtgggcgccgtggtcgcctttgccatcctgattgccatcgtctgctacattacccagacacgcaggaaaaagaacgtgacagagagccccagcttctcggcaggggacaaccctcccgtcctgttcagcagcgacttccgcatctctggggcaccagagaagtacgagagcgagaggcgcctgggatctgagaggaggctgctgggccttcggggtgagcccccagagctggacctgagctattctcactcggacctggggaaacggcccaccaaggacagctacacgctgacggaggagctagctgagtatgctgaaatccgggtcaagtgaaggagctgggggcagcctgcgtggctgacccccctcaggaccctcgctggcccccactggctgtgggctcccttcctcccaaaagtatcgggggctggggcaggaggggagtgaggcaggtgacagtgaggtcctgggggcctgacctccccctccttcccagctgcccctccctgccagcacccccacgccctcattacggctcctctctaacctcctttaccctcatctgtctggaggggagctctgtctgtccgtgttatttattgctacttcctgcctggtctcctgcccccacacctggccctggggcctgtacaaaagggacatgaaataaatgccccaaagcc

SEQ ID NO: 156292 - DNA, 559 bp, Homo sapiens
  Payload ID: 10663
  Gene Symbol: MAG
  Gene Name: myelin associated glycoprotein
  ENST ID: ENST00000600291
  CDS Start-End: 166-559
aagtgggggcctagaccctggaaggcaggggactgcgagctgggctggcggagcagaggtgcagaagcaactgagtccaagttgtctggcggcttcaggtggacccagaagacgtccccaactcagggagattcagcctcccgagggggtcactggggtgcctggatgccctcgtccatctcggccttcgaaggcacgtgcgtctccatcccctgccgctttgacttcccggatgagctgcggcccgctgtggtgcatggtgtctggtacttcaatagcccctaccccaagaactaccccccggtggtcttcaagtcgcgcacccaagtagtccacgagagcttccagggccgcagccgcctcctgggggacctgggcctgcgaaactgcaccctcctgctcagcaacgtcagccccgagctgggcgggaagtactacttccgtggggacctgggcggctacaaccagtacaccttctcagagcacagcgtcctggatatcgtcaacacccccaacatcgtggtgcccccagaggtggtggcaggcacggaggtggagg

SEQ ID NO: 156293 - DNA, 585 bp, Homo sapiens
  Payload ID: 10663
  Gene Symbol: MAG
  Gene Name: myelin associated glycoprotein
  ENST ID: ENST00000595791
  CDS Start-End: 111-585
actgcgagctgggctggcggagcagaggtgcagaagcaactgagtccaagtggacccagaagacgtccccaactcagggagattcagcgatcactcactcgctgtacagaatgatattcctcacggcactgcctctgttctggattatgatttcagcctcccgagggggtcactggggtgcctggatgccctcgtccatctcggccttcgaaggcacgtgcgtctccatcccctgccgctttgacttcccggatgagctgcggcccgctgtggtgcatggtgtctggtacttcaatagcccctaccccaagaactaccccccggtggtcttcaagtcgcgcacccaagtagtccacgagagcttccagggccgcagccgcctcctgggggacctgggcctgcgaaactgcaccctcctgctcagcaacgtcagccccgagctgggcgggaagtactacttccgtggggacctgggcggctacaaccagtacaccttctcagagcacagcgtcctggatatcgtcaacacccccaacatcgtggtgcccccagaggtggtggcaggcacggaggtggaggtcagct

SEQ ID NO: 156294 - DNA, 542 bp, Homo sapiens
  Payload ID: 10663
  Gene Symbol: MAG
  Gene Name: myelin associated glycoprotein
  ENST ID: ENST00000597035
  CDS Start-End: 124-300
gagctgggctggcggagcagaggtgcagaagcaactgagtccaagttgtctggcggcttcaggtggacccagaagacgtccccaactcagggagattcagcgatcactcactcgctgtacagaatgatattcctcacggcactgcctctgttctggattatgatttcagcctcccgagggggtcactggggtgcctggatgccctcgtccatctcggccttcgaaggcacgtgcgtctccatcccctgccgctttgacttcccggatgagctgcggcccgctgtggtgcatggtgtctgacacccccaacatcgtggtgcccccagaggtggtggcaggcacggaggtggaggtcagctgcatggtgccggacaactgcccagagctgcgccctgagctgagctggctgggccacgaggggctgggggagcccgctgtgctgggccggctgcgggaggacgagggcacctgggtgcaggtgtcactgctgcacttcgtgcccacgagggaggccaacggccacaggctgggctgccaggcct

SEQ ID NO: 156295 - DNA, 575 bp, Homo sapiens
  Payload ID: 10664
  Gene Symbol: MBP
  Gene Name: myelin basic protein
  ENST ID: ENST00000354542
  CDS Start-End: 254-475
agatgcgaaccagaacaatgggacctcctctcaggacacagcggtgactgactccaagcgcacagcggacccgaagaatgcctggcaggatgcccacccagctgacccagggagccgcccccacttgatccgcctcttttcccgagatgccccggggagggaggacaacaccttcaaagacaggccctctgagtccgacgagctccagaccatccaagaagacagtgcagccacctccgagagcctggatgtgatggcgtcacagaagagaccctcccagaggcacggatccaagtacctggccacagcaagtaccatggaccatgccaggcatggcttcctcccaaggcacagagacacgggcatccttgactccatcgggcgcttctttggcggtgacaggggtgcgcccaagcggggctctggcaagggaggaagagatagtcgctctggatcacccatggctagacgctgaaaacccacctggttccggaatcctgtcctcagcttcttaatataactgccttaaaactttaatcccacttgcccctgttacctaattagagcagatgacc

SEQ ID NO: 156296 - DNA, 2772 bp, Homo sapiens
  Payload ID: 10664
  Gene Symbol: MBP
  Gene Name: myelin basic protein
  Uniprot ID: P02686
  ENST ID: ENST00000355994
  CDS Start-End: 265-1179
tgggtgcgcgcccgtccctcggagccgccgccgtcagtcaccgccgccgcgcgccagagagaagcagcctccggccccggcggcccctgtctcccgaccccggaaggcgaagcaggctgcccggggaccccgcgcgtgggcgcttgaagccgagaccagcctgcccgggcctgggcaggcggagcagggccttggaccccgcggcgcccctcggcctcggagcaacgagcgcagcgccgcctctgaagagccaatccattcaggatgggaaaccacgcaggcaaacgagaattaaatgccgagaaggccagtacgaatagtgaaactaacagaggagaatctgaaaaaaagagaaacctgggtgaactttcacggacaacctcagaggacaacgaagtgttcggagaggcagatgcgaaccagaacaatgggacctcctctcaggacacagcggtgactgactccaagcgcacagcggacccgaagaatgcctggcaggatgcccacccagctgacccagggagccgcccccacttgatccgcctcttttcccgagatgccccggggagggaggacaacaccttcaaagacaggccctctgagtccgacgagctccagaccatccaagaagacagtgcagccacctccgagagcctggatgtgatggcgtcacagaagagaccctcccagaggcacggatccaagtacctggccacagcaagtaccatggaccatgccaggcatggcttcctcccaaggcacagagacacgggcatccttgactccatcgggcgcttctttggcggtgacaggggtgcgcccaagcggggctctggcaaggactcacaccacccggcaagaactgctcactacggctccctgccccagaagtcacacggccggacccaagatgaaaaccccgtagtccacttcttcaagaacattgtgacgcctcgcacaccacccccgtcgcagggaaaggggagaggactgtccctgagcagatttagctggggggccgaaggccagagaccaggatttggctacggaggcagagcgtccgactataaatcggctcacaagggattcaagggagtcgatgcccagggcacgctttccaaaatttttaagctgggaggaagagatagtcgctctggatcacccatggctagacgctgaaaacccacctggttccggaatcctgtcctcagcttcttaatataactgccttaaaactttaatcccacttgcccctgttacctaattagagcagatgacccctcccctaatgcctgcggagttgtgcacgtagtagggtcaggccacggcagcctaccggcaatttccggccaacagttaaatgagaacatgaaaacagaaaacggttaaaactgtccctttctgtgtgaagatcacgttccttcccccgcaatgtgcccccagacgcacgtgggtcttcagggggccaggtgcacagacgtccctccacgttcacccctccacccttggactttcttttcgccgtggctgcggcacccttgcgcttttgctggtcactgccatggaggcacacagctgcagagacagagaggacgtgggcggcagagaggactgttgacatccaagcttcctttgtttttttttcctgtccttctctcacctcctaaagtagacttcatttttcctaacaggattagacagtcaaggagtggcttactacatgtgggagcttttggtatgtgacatgcgggctgggcagctgttagagtccaacgtggggcagcacagagagggggccacctccccaggccgtggctgcccacacaccccaattagctgaattcgcgtgtggcagagggaggaaaaggaggcaaacgtgggctgggcaatggcctcacataggaaacagggtcttcctggagatttggtgatggagatgtcaagcaggtggcctctggacgtcaccgttgccctgcatggtggccccagagcagcctctatgaacaacctcgtttccaaaccacagcccacagccggagagtccaggaagacttgcgcactcagagcagaagggtaggagtcctctagacagcctcgcagccgcgccagtcgcccatagacactggctgtgaccgggcgtgctggcagcggcagtgcacagtggccagcactaaccctccctgagaagataaccggctcattcacttcctcccagaagacgcgtggtagcgagtaggcacaggcgtgcacctgctcccgaattactcaccgagacacacgggctgagcagacggccccgtggatggagacaaagagctcttctgaccatatccttcttaacacccgctggcatctcctttcgcgcctccctccctaacctactgacccaccttttgattttagcgcacctgtgattgataggccttccaaagagtcccacgctggcatcaccctccccgaggacggagatgaggagtagtcagcgtgatgccaaaacgcgtcttcttaatccaattctaattctgaatgtttcgtgtgggcttaataccatgtctattaatatatagcctcgatgatgagagagttacaaagaacaaaactccagacacaaacctccaaatttttcagcagaagcactctgcgtcgctgagctgaggtcggctctgcgatccatacgtggccgcacccacacagcacgtgctgtgacgatggctgaacggaaagtgtacactgttcctgaatattgaaataaaacaataaacttttaatggt

SEQ ID NO: 156297 - DNA, 1255 bp, Homo sapiens
  Payload ID: 10664
  Gene Symbol: MBP
  Gene Name: myelin basic protein
  Uniprot ID: P02686
  ENST ID: ENST00000359645
  CDS Start-End: 35-595
agacagtgcagccacctccgagagcctggatgtgatggcgtcacagaagagaccctcccagaggcacggatccaagtacctggccacagcaagtaccatggaccatgccaggcatggcttcctcccaaggcacagagacacgggcatccttgactccatcgggcgcttctttggcggtgacaggggtgcgcccaagcggggctctggcaaggtaccctggctaaagccgggccggagccctctgccctctcatgcccgcagccagcctgggctgtgcaacatgtacaaggactcacaccacccggcaagaactgctcactacggctccctgccccagaagtcacacggccggacccaagatgaaaaccccgtagtccacttcttcaagaacattgtgacgcctcgcacaccacccccgtcgcagggaaagggggccgaaggccagagaccaggatttggctacggaggcagagcgtccgactataaatcggctcacaagggattcaagggagtcgatgcccagggcacgctttccaaaatttttaagctgggaggaagagatagtcgctctggatcacccatggctagacgctgaaaacccacctggttccggaatcctgtcctcagcttcttaatataactgccttaaaactttaatcccacttgcccctgttacctaattagagcagatgacccctcccctaatgcctgcggagttgtgcacgtagtagggtcaggccacggcagcctaccggcaatttccggccaacagttaaatgagaacatgaaaacagaaaacggttaaaactgtccctttctgtgtgaagatcacgttccttcccccgcaatgtgcccccagacgcacgtgggtcttcagggggccaggtgcacagacgtccctccacgttcacccctccacccttggactttcttttcgccgtggctgcggcacccttgcgcttttgctggtcactgccatggaggcacacagctgcagagacagagaggacgtgggcggcagagaggactgttgacatccaagcttcctttgtttttttttcctgtccttctctcacctcctaaagtagacttcatttttcctaacaggattagacagtcaaggagtggcttactacatgtgggagcttttggtatgtgacatgcgggctgggcagctgttagagtccaacgtggggcagcacagagagggggccacctccccaggccgtggctgcccacacaccccaattagctg

SEQ ID NO: 156298 - DNA, 2281 bp, Homo sapiens
  Payload ID: 10664
  Gene Symbol: MBP
  Gene Name: myelin basic protein
  Uniprot ID: P02686
  ENST ID: ENST00000382582
  CDS Start-End: 88-681
aacaccttcaaagacaggccctctgagtccgacgagctccagaccatccaagaagacagtgcagccacctccgagagcctggatgtgatggcgtcacagaagagaccctcccagaggcacggatccaagtacctggccacagcaagtaccatggaccatgccaggcatggcttcctcccaaggcacagagacacgggcatccttgactccatcgggcgcttctttggcggtgacaggggtgcgcccaagcggggctctggcaaggtaccctggctaaagccgggccggagccctctgccctctcatgcccgcagccagcctgggctgtgcaacatgtacaaggactcacaccacccggcaagaactgctcactacggctccctgccccagaagtcacacggccggacccaagatgaaaaccccgtagtccacttcttcaagaacattgtgacgcctcgcacaccacccccgtcgcagggaaaggggagaggactgtccctgagcagatttagctggggggccgaaggccagagaccaggatttggctacggaggcagagcgtccgactataaatcggctcacaagggattcaagggagtcgatgcccagggcacgctttccaaaatttttaagctgggaggaagagatagtcgctctggatcacccatggctagacgctgaaaacccacctggttccggaatcctgtcctcagcttcttaatataactgccttaaaactttaatcccacttgcccctgttacctaattagagcagatgacccctcccctaatgcctgcggagttgtgcacgtagtagggtcaggccacggcagcctaccggcaatttccggccaacagttaaatgagaacatgaaaacagaaaacggttaaaactgtccctttctgtgtgaagatcacgttccttcccccgcaatgtgcccccagacgcacgtgggtcttcagggggccaggtgcacagacgtccctccacgttcacccctccacccttggactttcttttcgccgtggctgcggcacccttgcgcttttgctggtcactgccatggaggcacacagctgcagagacagagaggacgtgggcggcagagaggactgttgacatccaagcttcctttgtttttttttcctgtccttctctcacctcctaaagtagacttcatttttcctaacaggattagacagtcaaggagtggcttactacatgtgggagcttttggtatgtgacatgcgggctgggcagctgttagagtccaacgtggggcagcacagagagggggccacctccccaggccgtggctgcccacacaccccaattagctgaattcgcgtgtggcagagggaggaaaaggaggcaaacgtgggctgggcaatggcctcacataggaaacagggtcttcctggagatttggtgatggagatgtcaagcaggtggcctctggacgtcaccgttgccctgcatggtggccccagagcagcctctatgaacaacctcgtttccaaaccacagcccacagccggagagtccaggaagacttgcgcactcagagcagaagggtaggagtcctctagacagcctcgcagccgcgccagtcgcccatagacactggctgtgaccgggcgtgctggcagcggcagtgcacagtggccagcactaaccctccctgagaagataaccggctcattcacttcctcccagaagacgcgtggtagcgagtaggcacaggcgtgcacctgctcccgaattactcaccgagacacacgggctgagcagacggccccgtggatggagacaaagagctcttctgaccatatccttcttaacacccgctggcatctcctttcgcgcctccctccctaacctactgacccaccttttgattttagcgcacctgtgattgataggccttccaaagagtcccacgctggcatcaccctccccgaggacggagatgaggagtagtcagcgtgatgccaaaacgcgtcttcttaatccaattctaattctgaatgtttcgtgtgggcttaataccatgtctattaatatatagcctcgatgatgagagagttacaaagaacaaaactccagacacaaacctccaaatttttcagcagaagcactctgcgtcgctgagctgaggtcggctctgcgatccatacgtggccgcacccacacagcacgtgctgtgacgatggctgaacggaaagtgtacactgttcctgaatattgaaataaaacaataaacttttaatggtatttgca

SEQ ID NO: 156299 - DNA, 4844 bp, Homo sapiens
  Payload ID: 10664
  Gene Symbol: MBP
  Gene Name: myelin basic protein
  Uniprot ID: P02686
  ENST ID: ENST00000397860
  CDS Start-End: 216-809
cgcgccagagagaagcagcctccggccccggcggcccctgtctcccgaccccggaaggcgaagcaggctgcccggggaccccgcgcgtgggcgcttgaagccgagaccagcctgcccgggcctgggcaggcggagcagggccttggaccccgcggcgcccctcggcctcggagcaacgagcgcagcgccgcctctgaagagccaatccattcaggatgggaaaccacgcaggcaaacgagaattaaatgccgagaaggccagtacgaatagtgaaactaacagaggagaatctgaaaaaaagagaaacctgggtgaactttcacggacaacctcagaggacaacgaagtgttcggagaggcagatgcgaaccagaacaatgggacctcctctcaggacacagcggtgactgactccaagcgcacagcggacccgaagaatgcctggcaggatgcccacccagctgacccagggagccgcccccacttgatccgcctcttttcccgagatgccccggggagggaggacaacaccttcaaagacaggccctctgagtccgacgagctccagaccatccaagaagacagtgcagccacctccgagagcctggatgtgatggcgtcacagaagagaccctcccagaggcacggatccaagtacctggccacagcaagtaccatggaccatgccaggcatggcttcctcccaaggcacagagacacgggcatccttgactccatcgggcgcttctttggcggtgacaggggtgcgcccaagcggggctctggcaaggtgagctctgaggagtagaggagttttagtttaaatggaaaaagcaaaggagaaatcagtaggtgaactcagccattagaggaagaactggcacgtagcctcttgctgtctaaggtctcgttccgtgctggagaatgcatatgagcccaagagtgtgggcctgagtggctgcttaggacgttttcgtttaactcaccccctcttttcctcacaagggatggtggccggggtgtggctcaggaatgtaaggacatgctgaattctggatctctaagggtgcctggacatgggcgttgcagaaagagagccacattctcagggtctctggtggtgtgtgcttgcggacttgatgactgatgttgcctctgcagcccacacgctggggttcaacactgggttatgctcgttttttcctggagtcagtgctgctagcttcatgttgctctgcgacaatcataggattgaggtcgaggaagacttttgaacaaactcctcaatttaaatccgccttgagcaaacgttctctgtggtctgagaagtggaaggggggagggataaatgagtgtctatgaatcaaagctttattatcttgtgattccattaatttgcatacagagtcttagaagtttctttattcaaaagcaaatgtggataaaaatgtattacaaaaaaaaaaaactctgctatggggtccagagtctaggagtggtttctgcagttgattgtcagtggagaacctgtggctgctggttcatcaaagcgctggtccctgagtgccattcagattgcagatgcagtattttacgtgatgtttagagtgtttggtggttgtgtaattttggagagaaagaagtttttcccaaaaaagtccctagtttattgggtgttctcacacaacctgtaagatgaagctgtttttctgcctgtgtgcagggctgattctggaattccagaaggccttgtgggagcgtaaaaggcttttgaataaagtgtggaacagagcgcctcattctgataacatgcaatcataaaaaccatagggcaacttggagttaaggagtttctagaatttgctttagtctccaactgcaattctttattgatcatgaaattgttgaagagaaacacaaatgtcagttttacctttcctgtgggcgtgaaagcacatcgaagtttcaggcaactgttaacatctctaccatctgtctgagttgagatttcaggttgtgacacttgccgtgacttatttgtaaatgacattttgtgtgtcttagatactaatggaattcatattctggctagttctttcagtgcatttgtagacatgttcttttcctttgtagcagtcctccctcaccctgaaatgttggtgttctaaccgatttctaatgctaatttcaactggaagcactttttcaagcccagctatcaaaccacaccagacatgtatggattcgggttgcccaataaagcgttgctattatgtaagcatccctcacgcatacagcatcaccagttttgaaagcttgaactattctgcttacttcaaggtacagaaaaaaaaaatgtacttaaactgtgcagaaaagatgaaatcactggataatatgtattataaaataagcttcatgtgagtgacactggtttaagttgaaataaaatggtgaaagcattgatatcaatcattgtgactttatctcaaaacaatattgacacacatagatgtttttcttcctttatggtaagattacagcctttattgtcttaaatctcttatactcttcaatattttcaaagaaaacattctagtctcagaaatagtccatctctttgcaaaacagggctggccaattatcaaggacccataaaaatcaaaacactttcaaaaattttaaaaataaaaataattttcacatgattgctttaggaattttgaagtatccattcttttcactatggagtgttgaatatagaagattttttaatgaacaggcttgccctttgatgccaaaggcaaaaaataataataataacatttgcacgtgtgatcacagagcagctgtgaggcatcccgggggagcgcacgcagtggggatgtgattgctccactcaactattttatcacaaagtgttgtaaacatgggagatgaaagcttaactctctctacacccagctacagacccgcaatggccctaaaaatctggggtattcattgggtgggctgccatggaggaatttttggttttgtttttatttttatttgttgttctgtttacaaatcaggagagcccctgtttttatatgctaggaaggtccttgggataggccgaagaggtgtgcaaacgagcagtggaaggcccgggccctgtctctcaggaccacggcggcctgccccacacacagttctgcttctccctatctagaacgaggttttcctggcagattcctgccagactctgagtggagcccccccatgaccctataaaaggggctgtttgtcctcctcccaccctcctgtgctcttcctccctccccttgagggcacatggccgctggtaccacatgttggagcggccgcccccgagcccgggaatgccctaacaacacccatgcttgtgttgctgggagctgacattcaagaaaagtgcattaaaaattccttgagaaggcatattcttttgagagccgtaaatgaaaagtgcattcacggagaacatgctcctttgttgtgagaggaaagaaaggactgttgttgcctttaaggaacaggtttcccagttccccggaatgtcagggtcacatgaggaatgggtgagcacttagggccaagattgtcgtgtgcttggcccggcagcttctctctaagtgacctctccagcatcactctgtgccagtgctcatatctgaggccacttgagtgtcacgaggcagagcctggaaacattagctttggaaaccgttccttcctttttatgtggaggaagtaaggtttcacaagacacctaagctggacatggtgatgtgccacttggatagttcccaaagcagaaagcagccaggacatcccagtaccccacttctccgtgccgtgtacttttagggaggttttcgaaagctagcttcttaccgatgattttgtctatttttctgttttatgtgaaaaccttcatttataacctgctcttctcagtgttcttctattcagcattcagtatgacttctatgcctctaattgcgactgtatggagaagaactgtttgtcattcagtgccgtgggatataatcagtcctgtaaattcatcagaatgttctgttgcctgattttttttccattgcattttaatttcattaaacatattttagttctacagtaacctaattcctcattgttaccatgagatcctaattctgtagctgtgttctgtaatcccatggggcgtgtaccatttggagacacatgaaggatacagtagacagcacggaaggcagcagcaacacacaggggtgtcctccctccccagagcccagtgtgcacacagaaccaaattcaatctcattcatcgtgagcttgcatggtaactgatccagccactcagtacctccattggataagagatttggccacagattcttctagagaaaatccaaatgtggagggtgcatttgtttctgcacccaaacaaataccttttgagatttcttataggcattcctctcaaagtctcattactctgatcagttattgatcggaggctaccctggctcagtcaccagctgctcactgtgtccttctgtggtctcaggagctgcagttgttgctgttgtatgaatagacgatagttaattagactggatgtgtctgtactggcagtgattttgcaacttcctctgtataagcgatacatttgtaaatcatgggaatgtatttgatggtaattgcctgtggtggttgtatcatgatttaattttattatgagcttttggctttatatatttttctgcctttttatgcattcattaaacagtttaacagaccaaggacagtgtactaa

SEQ ID NO: 156300 - DNA, 4800 bp, Homo sapiens
  Payload ID: 10664
  Gene Symbol: MBP
  Gene Name: myelin basic protein
  Uniprot ID: P02686
  ENST ID: ENST00000397863
  CDS Start-End: 172-765
tcctttcgcgtccacctgagcccccccgttttggaaggtggagtggggcttgggaaaaggttcaagcgtctttggggacccccgtgcgactctggctggaaacaggcgagctctggttccttgttccgttttccaattgcaacaaccctctgaagagccaatccattcaggatgggaaaccacgcaggcaaacgagaattaaatgccgagaaggccagtacgaatagtgaaactaacagaggagaatctgaaaaaaagagaaacctgggtgaactttcacggacaacctcagaggacaacgaagtgttcggagaggcagatgcgaaccagaacaatgggacctcctctcaggacacagcggtgactgactccaagcgcacagcggacccgaagaatgcctggcaggatgcccacccagctgacccagggagccgcccccacttgatccgcctcttttcccgagatgccccggggagggaggacaacaccttcaaagacaggccctctgagtccgacgagctccagaccatccaagaagacagtgcagccacctccgagagcctggatgtgatggcgtcacagaagagaccctcccagaggcacggatccaagtacctggccacagcaagtaccatggaccatgccaggcatggcttcctcccaaggcacagagacacgggcatccttgactccatcgggcgcttctttggcggtgacaggggtgcgcccaagcggggctctggcaaggtgagctctgaggagtagaggagttttagtttaaatggaaaaagcaaaggagaaatcagtaggtgaactcagccattagaggaagaactggcacgtagcctcttgctgtctaaggtctcgttccgtgctggagaatgcatatgagcccaagagtgtgggcctgagtggctgcttaggacgttttcgtttaactcaccccctcttttcctcacaagggatggtggccggggtgtggctcaggaatgtaaggacatgctgaattctggatctctaagggtgcctggacatgggcgttgcagaaagagagccacattctcagggtctctggtggtgtgtgcttgcggacttgatgactgatgttgcctctgcagcccacacgctggggttcaacactgggttatgctcgttttttcctggagtcagtgctgctagcttcatgttgctctgcgacaatcataggattgaggtcgaggaagacttttgaacaaactcctcaatttaaatccgccttgagcaaacgttctctgtggtctgagaagtggaaggggggagggataaatgagtgtctatgaatcaaagctttattatcttgtgattccattaatttgcatacagagtcttagaagtttctttattcaaaagcaaatgtggataaaaatgtattacaaaaaaaaaaaactctgctatggggtccagagtctaggagtggtttctgcagttgattgtcagtggagaacctgtggctgctggttcatcaaagcgctggtccctgagtgccattcagattgcagatgcagtattttacgtgatgtttagagtgtttggtggttgtgtaattttggagagaaagaagtttttcccaaaaaagtccctagtttattgggtgttctcacacaacctgtaagatgaagctgtttttctgcctgtgtgcagggctgattctggaattccagaaggccttgtgggagcgtaaaaggcttttgaataaagtgtggaacagagcgcctcattctgataacatgcaatcataaaaaccatagggcaacttggagttaaggagtttctagaatttgctttagtctccaactgcaattctttattgatcatgaaattgttgaagagaaacacaaatgtcagttttacctttcctgtgggcgtgaaagcacatcgaagtttcaggcaactgttaacatctctaccatctgtctgagttgagatttcaggttgtgacacttgccgtgacttatttgtaaatgacattttgtgtgtcttagatactaatggaattcatattctggctagttctttcagtgcatttgtagacatgttcttttcctttgtagcagtcctccctcaccctgaaatgttggtgttctaaccgatttctaatgctaatttcaactggaagcactttttcaagcccagctatcaaaccacaccagacatgtatggattcgggttgcccaataaagcgttgctattatgtaagcatccctcacgcatacagcatcaccagttttgaaagcttgaactattctgcttacttcaaggtacagaaaaaaaaaatgtacttaaactgtgcagaaaagatgaaatcactggataatatgtattataaaataagcttcatgtgagtgacactggtttaagttgaaataaaatggtgaaagcattgatatcaatcattgtgactttatctcaaaacaatattgacacacatagatgtttttcttcctttatggtaagattacagcctttattgtcttaaatctcttatactcttcaatattttcaaagaaaacattctagtctcagaaatagtccatctctttgcaaaacagggctggccaattatcaaggacccataaaaatcaaaacactttcaaaaattttaaaaataaaaataattttcacatgattgctttaggaattttgaagtatccattcttttcactatggagtgttgaatatagaagattttttaatgaacaggcttgccctttgatgccaaaggcaaaaaataataataataacatttgcacgtgtgatcacagagcagctgtgaggcatcccgggggagcgcacgcagtggggatgtgattgctccactcaactattttatcacaaagtgttgtaaacatgggagatgaaagcttaactctctctacacccagctacagacccgcaatggccctaaaaatctggggtattcattgggtgggctgccatggaggaatttttggttttgtttttatttttatttgttgttctgtttacaaatcaggagagcccctgtttttatatgctaggaaggtccttgggataggccgaagaggtgtgcaaacgagcagtggaaggcccgggccctgtctctcaggaccacggcggcctgccccacacacagttctgcttctccctatctagaacgaggttttcctggcagattcctgccagactctgagtggagcccccccatgaccctataaaaggggctgtttgtcctcctcccaccctcctgtgctcttcctccctccccttgagggcacatggccgctggtaccacatgttggagcggccgcccccgagcccgggaatgccctaacaacacccatgcttgtgttgctgggagctgacattcaagaaaagtgcattaaaaattccttgagaaggcatattcttttgagagccgtaaatgaaaagtgcattcacggagaacatgctcctttgttgtgagaggaaagaaaggactgttgttgcctttaaggaacaggtttcccagttccccggaatgtcagggtcacatgaggaatgggtgagcacttagggccaagattgtcgtgtgcttggcccggcagcttctctctaagtgacctctccagcatcactctgtgccagtgctcatatctgaggccacttgagtgtcacgaggcagagcctggaaacattagctttggaaaccgttccttcctttttatgtggaggaagtaaggtttcacaagacacctaagctggacatggtgatgtgccacttggatagttcccaaagcagaaagcagccaggacatcccagtaccccacttctccgtgccgtgtacttttagggaggttttcgaaagctagcttcttaccgatgattttgtctatttttctgttttatgtgaaaaccttcatttataacctgctcttctcagtgttcttctattcagcattcagtatgacttctatgcctctaattgcgactgtatggagaagaactgtttgtcattcagtgccgtgggatataatcagtcctgtaaattcatcagaatgttctgttgcctgattttttttccattgcattttaatttcattaaacatattttagttctacagtaacctaattcctcattgttaccatgagatcctaattctgtagctgtgttctgtaatcccatggggcgtgtaccatttggagacacatgaaggatacagtagacagcacggaaggcagcagcaacacacaggggtgtcctccctccccagagcccagtgtgcacacagaaccaaattcaatctcattcatcgtgagcttgcatggtaactgatccagccactcagtacctccattggataagagatttggccacagattcttctagagaaaatccaaatgtggagggtgcatttgtttctgcacccaaacaaataccttttgagatttcttataggcattcctctcaaagtctcattactctgatcagttattgatcggaggctaccctggctcagtcaccagctgctcactgtgtccttctgtggtctcaggagctgcagttgttgctgttgtatgaatagacgatagttaattagactggatgtgtctgtactggcagtgattttgcaacttcctctgtataagcgatacatttgtaaatcatgggaatgtatttgatggtaattgcctgtggtggttgtatcatgatttaattttattatgagcttttggctttatatatttttctgcctttttatgcattcattaaacagtttaacagaccaaggacagtgtactaa

SEQ ID NO: 156301 - DNA, 2127 bp, Homo sapiens
  Payload ID: 10664
  Gene Symbol: MBP
  Gene Name: myelin basic protein
  Uniprot ID: P02686
  ENST ID: ENST00000397865
  CDS Start-End: 79-561
aaagacaggccctctgagtccgacgagctccagaccatccaagaagacagtgcagccacctccgagagcctggatgtgatggcgtcacagaagagaccctcccagaggcacggatccaagtacctggccacagcaagtaccatggaccatgccaggcatggcttcctcccaaggcacagagacacgggcatccttgactccatcgggcgcttctttggcggtgacaggggtgcgcccaagcggggctctggcaaggactcacaccacccggcaagaactgctcactacggctccctgccccagaagtcacacggccggacccaagatgaaaaccccgtagtccacttcttcaagaacattgtgacgcctcgcacaccacccccgtcgcagggaaagggggccgaaggccagagaccaggatttggctacggaggcagagcgtccgactataaatcggctcacaagggattcaagggagtcgatgcccagggcacgctttccaaaatttttaagctgggaggaagagatagtcgctctggatcacccatggctagacgctgaaaacccacctggttccggaatcctgtcctcagcttcttaatataactgccttaaaactttaatcccacttgcccctgttacctaattagagcagatgacccctcccctaatgcctgcggagttgtgcacgtagtagggtcaggccacggcagcctaccggcaatttccggccaacagttaaatgagaacatgaaaacagaaaacggttaaaactgtccctttctgtgtgaagatcacgttccttcccccgcaatgtgcccccagacgcacgtgggtcttcagggggccaggtgcacagacgtccctccacgttcacccctccacccttggactttcttttcgccgtggctgcggcacccttgcgcttttgctggtcactgccatggaggcacacagctgcagagacagagaggacgtgggcggcagagaggactgttgacatccaagcttcctttgtttttttttcctgtccttctctcacctcctaaagtagacttcatttttcctaacaggattagacagtcaaggagtggcttactacatgtgggagcttttggtatgtgacatgcgggctgggcagctgttagagtccaacgtggggcagcacagagagggggccacctccccaggccgtggctgcccacacaccccaattagctgaattcgcgtgtggcagagggaggaaaaggaggcaaacgtgggctgggcaatggcctcacataggaaacagggtcttcctggagatttggtgatggagatgtcaagcaggtggcctctggacgtcaccgttgccctgcatggtggccccagagcagcctctatgaacaacctcgtttccaaaccacagcccacagccggagagtccaggaagacttgcgcactcagagcagaagggtaggagtcctctagacagcctcgcagccgcgccagtcgcccatagacactggctgtgaccgggcgtgctggcagcggcagtgcacagtggccagcactaaccctccctgagaagataaccggctcattcacttcctcccagaagacgcgtggtagcgagtaggcacaggcgtgcacctgctcccgaattactcaccgagacacacgggctgagcagacggccccgtggatggagacaaagagctcttctgaccatatccttcttaacacccgctggcatctcctttcgcgcctccctccctaacctactgacccaccttttgattttagcgcacctgtgattgataggccttccaaagagtcccacgctggcatcaccctccccgaggacggagatgaggagtagtcagcgtgatgccaaaacgcgtcttcttaatccaattctaattctgaatgtttcgtgtgggcttaataccatgtctattaatatatagcctcgatgatgagagagttacaaagaacaaaactccagacacaaacctccaaatttttcagcagaagcactctgcgtcgctgagctgaggtcggctctgcgatccatacgtggccgcacccacacagcacgtgctgtgacgatggctgaacggaaagtgtacactgttcctgaatatt

SEQ ID NO: 156302 - DNA, 2145 bp, Homo sapiens
  Payload ID: 10664
  Gene Symbol: MBP
  Gene Name: myelin basic protein
  Uniprot ID: P02686
  ENST ID: ENST00000397866
  CDS Start-End: 55-570
gagctccagaccatccaagaagacagtgcagccacctccgagagcctggatgtgatggcgtcacagaagagaccctcccagaggcacggatccaagtacctggccacagcaagtaccatggaccatgccaggcatggcttcctcccaaggcacagagacacgggcatccttgactccatcgggcgcttctttggcggtgacaggggtgcgcccaagcggggctctggcaaggactcacaccacccggcaagaactgctcactacggctccctgccccagaagtcacacggccggacccaagatgaaaaccccgtagtccacttcttcaagaacattgtgacgcctcgcacaccacccccgtcgcagggaaaggggagaggactgtccctgagcagatttagctggggggccgaaggccagagaccaggatttggctacggaggcagagcgtccgactataaatcggctcacaagggattcaagggagtcgatgcccagggcacgctttccaaaatttttaagctgggaggaagagatagtcgctctggatcacccatggctagacgctgaaaacccacctggttccggaatcctgtcctcagcttcttaatataactgccttaaaactttaatcccacttgcccctgttacctaattagagcagatgacccctcccctaatgcctgcggagttgtgcacgtagtagggtcaggccacggcagcctaccggcaatttccggccaacagttaaatgagaacatgaaaacagaaaacggttaaaactgtccctttctgtgtgaagatcacgttccttcccccgcaatgtgcccccagacgcacgtgggtcttcagggggccaggtgcacagacgtccctccacgttcacccctccacccttggactttcttttcgccgtggctgcggcacccttgcgcttttgctggtcactgccatggaggcacacagctgcagagacagagaggacgtgggcggcagagaggactgttgacatccaagcttcctttgtttttttttcctgtccttctctcacctcctaaagtagacttcatttttcctaacaggattagacagtcaaggagtggcttactacatgtgggagcttttggtatgtgacatgcgggctgggcagctgttagagtccaacgtggggcagcacagagagggggccacctccccaggccgtggctgcccacacaccccaattagctgaattcgcgtgtggcagagggaggaaaaggaggcaaacgtgggctgggcaatggcctcacataggaaacagggtcttcctggagatttggtgatggagatgtcaagcaggtggcctctggacgtcaccgttgccctgcatggtggccccagagcagcctctatgaacaacctcgtttccaaaccacagcccacagccggagagtccaggaagacttgcgcactcagagcagaagggtaggagtcctctagacagcctcgcagccgcgccagtcgcccatagacactggctgtgaccgggcgtgctggcagcggcagtgcacagtggccagcactaaccctccctgagaagataaccggctcattcacttcctcccagaagacgcgtggtagcgagtaggcacaggcgtgcacctgctcccgaattactcaccgagacacacgggctgagcagacggccccgtggatggagacaaagagctcttctgaccatatccttcttaacacccgctggcatctcctttcgcgcctccctccctaacctactgacccaccttttgattttagcgcacctgtgattgataggccttccaaagagtcccacgctggcatcaccctccccgaggacggagatgaggagtagtcagcgtgatgccaaaacgcgtcttcttaatccaattctaattctgaatgtttcgtgtgggcttaataccatgtctattaatatatagcctcgatgatgagagagttacaaagaacaaaactccagacacaaacctccaaatttttcagcagaagcactctgcgtcgctgagctgaggtcggctctgcgatccatacgtggccgcacccacacagcacgtgctgtgacgatggctgaacggaaagtgtacactgttcctgaatattgaaataaaa

SEQ ID NO: 156303 - DNA, 884 bp, Homo sapiens
  Payload ID: 10664
  Gene Symbol: MBP
  Gene Name: myelin basic protein
  ENST ID: ENST00000397869
  CDS Start-End: 48-758
agaccatccaagaagacagtgcagccacctccgagagcctggatgtgatggcgtcacagaagagaccctcccagaggcacggatccaagtacctggccacagcaagtaccatggaccatgccaggcatggcttcctcccaaggcacagagacacgggcatccttgactccatcgggcgcttctttggcggtgacaggggtgcgcccaagcggggctctggcaaggactcacaccacccggcaagaactgctcactacggctccctgccccagaagtcacacggccggacccaagatgaaaaccccgtagtccacttcttcaagaacattgtgacgcctcgcacaccacccccgtcgcagggaaaggggagaggactgtccctgagcagatttagctgggtaggtgacgaacgcacttccatcggcttcctcttccgtcccagtcctcacagccccgcaacttttgtgttctgctctgtttcggttgcttcctggcctccttttctctcctctcgagacctctctgcccacagctgggatcgggccgccttgtcttccactggggaaatgaaacgtggtcttcccttccggaagggggccgaaggccagagaccaggatttggctacggaggcagagcgtccgactataaatcggctcacaagggattcaagggagtcgatgcccagggcacgctttccaaaatttttaagctgggaggaagagatagtcgctctggatcacccatggctagacgctgaaaacccacctggttccggaatcctgtcctcagcttcttaatataactgccttaaaactttaatcccacttgcccctgttacctaattagagcagatgacccctcccctaatgcctgcggagttgtg

SEQ ID NO: 156304 - DNA, 2168 bp, Homo sapiens
  Payload ID: 10664
  Gene Symbol: MBP
  Gene Name: myelin basic protein
  ENST ID: ENST00000397875
  CDS Start-End: 48-593
agaccatccaagaagacagtgcagccacctccgagagcctggatgtgatggcgtcacagaagagaccctcccagaggcacggatccaagtacctggccacagcaagtaccatggaccatgccaggcatggcttcctcccaaggcacagagacacgggcatccttgactccatcgggcgcttctttggcggtgacaggggtgcgcccaagcggggctctggcaaggactcacaccacccggcaagaactgctcactacggctccctgccccagaagtcacacggccggacccaagatgaaaaccccgtagtccacttcttcaagaacatttgcagcccacggttctctgtgtctttccaggtgacgcctcgcacaccacccccgtcgcagggaaaggggagaggactgtccctgagcagatttagctggggggccgaaggccagagaccaggatttggctacggaggcagagcgtccgactataaatcggctcacaagggattcaagggagtcgatgcccagggcacgctttccaaaatttttaagctgggaggaagagatagtcgctctggatcacccatggctagacgctgaaaacccacctggttccggaatcctgtcctcagcttcttaatataactgccttaaaactttaatcccacttgcccctgttacctaattagagcagatgacccctcccctaatgcctgcggagttgtgcacgtagtagggtcaggccacggcagcctaccggcaatttccggccaacagttaaatgagaacatgaaaacagaaaacggttaaaactgtccctttctgtgtgaagatcacgttccttcccccgcaatgtgcccccagacgcacgtgggtcttcagggggccaggtgcacagacgtccctccacgttcacccctccacccttggactttcttttcgccgtggctgcggcacccttgcgcttttgctggtcactgccatggaggcacacagctgcagagacagagaggacgtgggcggcagagaggactgttgacatccaagcttcctttgtttttttttcctgtccttctctcacctcctaaagtagacttcatttttcctaacaggattagacagtcaaggagtggcttactacatgtgggagcttttggtatgtgacatgcgggctgggcagctgttagagtccaacgtggggcagcacagagagggggccacctccccaggccgtggctgcccacacaccccaattagctgaattcgcgtgtggcagagggaggaaaaggaggcaaacgtgggctgggcaatggcctcacataggaaacagggtcttcctggagatttggtgatggagatgtcaagcaggtggcctctggacgtcaccgttgccctgcatggtggccccagagcagcctctatgaacaacctcgtttccaaaccacagcccacagccggagagtccaggaagacttgcgcactcagagcagaagggtaggagtcctctagacagcctcgcagccgcgccagtcgcccatagacactggctgtgaccgggcgtgctggcagcggcagtgcacagtggccagcactaaccctccctgagaagataaccggctcattcacttcctcccagaagacgcgtggtagcgagtaggcacaggcgtgcacctgctcccgaattactcaccgagacacacgggctgagcagacggccccgtggatggagacaaagagctcttctgaccatatccttcttaacacccgctggcatctcctttcgcgcctccctccctaacctactgacccaccttttgattttagcgcacctgtgattgataggccttccaaagagtcccacgctggcatcaccctccccgaggacggagatgaggagtagtcagcgtgatgccaaaacgcgtcttcttaatccaattctaattctgaatgtttcgtgtgggcttaataccatgtctattaatatatagcctcgatgatgagagagttacaaagaacaaaactccagacacaaacctccaaatttttcagcagaagcactctgcgtcgctgagctgaggtcggctctgcgatccatacgtggccgcacccacacagcacgtgctgtgacgatggctgaacggaaagtgtacactgttcctgaatattgaaataaaa

SEQ ID NO: 156305 - DNA, 569 bp, Homo sapiens
  Payload ID: 10664
  Gene Symbol: MBP
  Gene Name: myelin basic protein
  ENST ID: ENST00000447114
  CDS Start-End: 266-569
gctcttccttccatcatccatcatctgcacatgccttcttctctccctgtcgtccttcatcctccaccccccgctcactcctcctcactctgggctcttgccaagccagctctagaggagatttgctggaggactttggggcattgccggcggcgcccacccggactcacgcagcccactctgtgtcccccggcaggtaccctggctaaagccgggccggagccctctgccctctcatgcccgcagccagcctgggctgtgcaacatgtacaaggactcacaccacccggcaagaactgctcactacggctccctgccccagaagtcacacggccggacccaagatgaaaaccccgtagtccacttcttcaagaacattgtgacgcctcgcacaccacccccgtcgcagggaaaggggagaggactgtccctgagcagatttagctggggggccgaaggccagagaccaggatttggctacggaggcagagcgtccgactataaatcggctcacaagggattcaagggagtcgatgcccagggcacgctttccaaaatttttaagctgg

SEQ ID NO: 156306 - DNA, 566 bp, Homo sapiens
  Payload ID: 10664
  Gene Symbol: MBP
  Gene Name: myelin basic protein
  ENST ID: ENST00000527975
  CDS Start-End: 51-149
tccagaccatccaagaagacagtgcagccacctccgagagcctggatgtgatggcgtcacagaagagaccctcccagaggcacggatccaagtacctggccacagcaagtaccatggaccatgccaggcatggcttcctcccaagatgaaaaccccgtagtccacttcttcaagaacattgtgacgcctcgcacaccacccccgtcgcagggaaaggggagaggactgtccctgagcagatttagctggggggccgaaggccagagaccaggatttggctacggaggcagagcgtccgactataaatcggctcacaagggattcaagggagtcgatgcccagggcacgctttccaaaatttttaagctgggaggaagagatagtcgctctggatcacccatggctagacgctgaaaacccacctggttccggaatcctgtcctcagcttcttaatataactgccttaaaactttaatcccacttgcccctgttacctaattagagcagatgacccctcccctaatgcctgcggagttgtgcacgtagtagggtcaggccacggcag

SEQ ID NO: 156307 - DNA, 581 bp, Homo sapiens
  Payload ID: 10664
  Gene Symbol: MBP
  Gene Name: myelin basic protein
  ENST ID: ENST00000531144
  CDS Start-End: 58-237
gacgagctccagaccatccaagaagacagtgcagccacctccgagagcctggatgtgatggcgtcacagaagagaccctcccagaggcacggatccaagtacctggccacagcaagtaccatggaccatgccaggcatggcttcctcccaaggactcacaccacccggcaagaactgctcactacggctccctgccccagaagtcacacggccggacccaagatgaaaaccccgtagtccacttcttcaagaacattgtgacgcctcgcacaccacccccgtcgcagggaaaggggagaggactgtccctgagcagatttagctggggggccgaaggccagagaccaggatttggctacggaggcagagcgtccgactataaatcggctcacaagggattcaagggagtcgatgcccagggcacgctttccaaaatttttaagctgggaggaagagatagtcgctctggatcacccatggctagacgctgaaaacccacctggttccggaatcctgtcctcagcttcttaatataactgccttaaaactttaatcccacttgcccctgttacctaattaga

SEQ ID NO: 156308 - DNA, 558 bp, Homo sapiens
  Payload ID: 10664
  Gene Symbol: MBP
  Gene Name: myelin basic protein
  ENST ID: ENST00000473302
  CDS Start-End: 48-344
agaccatccaagaagacagtgcagccacctccgagagcctggatgtgatggcgtcacagaagagaccctcccagaggcacggatccaagtacctggccacagcaagtaccatggaccatgccaggcatggcttcctcccaaggcacagagacacgggcatccttgactccatcgggcgcttctttggcggtgacaggggtgcgcccaagcggggctctggcaaggactcacaccacccggcaagaactgctcactacggctccctgccccagaagtcacacggccggacccaagatgaaaaccccgtagtccacttcttcaagaacattgcaggagcccgttaggaaatggacggcggcacagggctcccagtgcagcccacggttctctgtgtctttccaggtgacgcctcgcacaccacccccgtcgcagggaaaggggagaggactgtccctgagcagatttagctggggggccgaaggccagagaccaggatttggctacggaggcagagcgtccgactataaatcggctcacaagggattcaagggagtcgat

SEQ ID NO: 156309 - DNA, 582 bp, Homo sapiens
  Payload ID: 10664
  Gene Symbol: MBP
  Gene Name: myelin basic protein
  ENST ID: ENST00000533278
  CDS Start-End: 58-252
gacgagctccagaccatccaagaagacagtgcagccacctccgagagcctggatgtgatggcgtcacagaagagaccctcccagaggcacggatccaagtacctggccacagcaagtaccatggaccatgccaggcatggcttcctcccaagcggggctctggcaaggactcacaccacccggcaagaactgctcactacggctccctgccccagaagtcacacggccggacccaagatgaaaaccccgtagtccacttcttcaagaacattgtgacgcctcgcacaccacccccgtcgcagggaaaggggagaggactgtccctgagcagatttagctggggggccgaaggccagagaccaggatttggctacggaggcagagcgtccgactataaatcggctcacaagggattcaagggagtcgatgcccagggcacgctttccaaaatttttaagctgggaggaagagatagtcgctctggatcacccatggctagacgctgaaaacccacctggttccggaatcctgtcctcagcttcttaatataactgccttaaaactttaatcccacttgcccct

SEQ ID NO: 156310 - DNA, 582 bp, Homo sapiens
  Payload ID: 10664
  Gene Symbol: MBP
  Gene Name: myelin basic protein
  ENST ID: ENST00000527041
  CDS Start-End: 58-384
gacgagctccagaccatccaagaagacagtgcagccacctccgagagcctggatgtgatggcgtcacagaagagaccctcccagaggcacggatccaagtacctggccacagcaagtaccatggaccatgccaggcatggcttcctcccaaggcacagagacacgggcatccttgactccatcgggcgcttctttggcggtgacaggggtgcgcccaagcggggctctggcaaggactcacaccacccggcaagaactgctcactacggctccctgccccagaagcacacagctgcagagacagagaggacgtgggcggcagagaggactgttgacatccaagcttcctttgtttttttttcctgtccttctctcacctcctaaagtagacttcatttttcctaacaggattagacagtcaaggagtggcttactacatgtgggagcttttggtatgtgacatgcgggctgggcagctgttagagtccaacgtggggcagcacagagagggggccacctccccaggccgtggctgcccacacaccccaattagctgaattcgcgtgtggcagagggaggaaa

SEQ ID NO: 156311 - DNA, 569 bp, Homo sapiens
  Payload ID: 10664
  Gene Symbol: MBP
  Gene Name: myelin basic protein
  ENST ID: ENST00000459948
  CDS Start-End: 54-413
agctccagaccatccaagaagacagtgcagccacctccgagagcctggatgtgatggcgtcacagaagagaccctcccagaggcacggatccaagtacctggccacagcaagtaccatggaccatgccaggcatggcttcctcccaaggcacagagacacgggcatccttgactccatcgggcgcttctttggcggtgacaggggtgcgcccaagcggggctctggcaaggactcacaccacccggcaagaactgctcactacggctccctgccccagaagtcacacggccggacccaagatgaaaaccccgtagtccacttcttcaagaacattgtctatacttcttcaccaactaggacagaagtggggaggctgggcacccgggtgcttctggcagctgatggatgctagccaccctcagcaggcaggagcccgttaggaaatggacggcggcacagggctcccagtgcagcccacggttctctgtgtctttccaggtgacgcctcgcacaccacccccgtcgcagggaaaggggagaggactgtccctgagcagatttagctggg

SEQ ID NO: 156312 - DNA, 581 bp, Homo sapiens
  Payload ID: 10664
  Gene Symbol: MBP
  Gene Name: myelin basic protein
  ENST ID: ENST00000526111
  CDS Start-End: 58-507
gacgagctccagaccatccaagaagacagtgcagccacctccgagagcctggatgtgatggcgtcacagaagagaccctcccagaggcacagagacacgggcatccttgactccatcgggcgcttctttggcggtgacaggggtgcgcccaagcggggctctggcaaggactcacaccacccggcaagaactgctcactacggctccctgccccagaagtcacacggccggacccaagatgaaaaccccgtagtccacttcttcaagaacattgtgacgcctcgcacaccacccccgtcgcagggaaaggggagaggactgtccctgagcagatttagctggggggccgaaggccagagaccaggatttggctacggaggcagagcgtccgactataaatcggctcacaagggattcaagggagtcgatgcccagggcacgctttccaaaatttttaagctgggaggaagagatagtcgctctggatcacccatggctagacgctgaaaacccacctggttccggaatcctgtcctcagcttcttaatataactgccttaaaactttaatcccacttgccc

SEQ ID NO: 156313 - DNA, 584 bp, Homo sapiens
  Payload ID: 10664
  Gene Symbol: MBP
  Gene Name: myelin basic protein
  ENST ID: ENST00000528160
  CDS Start-End: 55-261
gagctccagaccatccaagaagacagtgcagccacctccgagagcctggatgtgatggcgtcacagaagagaccctcccagaggcacggatccaagtacctggccacagcaagtaccatggaccatgccaggcatggcttcctcccaagggcacgctttccaaaatttttaagctgggaggaagagatagtcgctctggatcacccatggctagacgctgaaaacccacctggttccggaatcctgtcctcagcttcttaatataactgccttaaaactttaatcccacttgcccctgttacctaattagagcagatgacccctcccctaatgcctgcggagttgtgcacgtagtagggtcaggccacggcagcctaccggcaatttccggccaacagttaaatgagaacatgaaaacagaaaacggttaaaactgtccctttctgtgtgaagatcacgttccttcccccgcaatgtgcccccagacgcacgtgggtcttcagggggccaggtgcacagacgtccctccacgttcacccctccacccttggactttcttttcgccgtggctgcggcacccttgc

SEQ ID NO: 156314 - DNA, 580 bp, Homo sapiens
  Payload ID: 10664
  Gene Symbol: MBP
  Gene Name: myelin basic protein
  ENST ID: ENST00000493623
  CDS Start-End: 48-374
agaccatccaagaagacagtgcagccacctccgagagcctggatgtgatggcgtcacagaagagaccctcccagaggcacggatccaagtacctggccacagcaagtaccatggaccatgccaggcatggcttcctcccaaggcacagagacacgggcatccttgactccatcgggcgcttctttggcggtgacaggggtgcgcccaagcggggctctggcaaggactcacaccacccggcaagaactgctcactacggctccctgccccagaagtcacacggccggacccaagatgaaaaccccgtagtccacttcttcaagaacattgacagaagtggggaggctgggcacccgggtgcttctggcagctgatggatgctagccaccctcagcaggcaggagcccgttaggaaatggacggcggcacagggctcccagtgcagcccacggttctctgtgtctttccaggtgacgcctcgcacaccacccccgtcgcagggaaaggggagaggactgtccctgagcagatttagctggggggccgaaggccagagaccaggatttggctacggaggcag

SEQ ID NO: 156315 - DNA, 875 bp, Homo sapiens
  Payload ID: 10664
  Gene Symbol: MBP
  Gene Name: myelin basic protein
  ENST ID: ENST00000498683
  CDS Start-End: 617-875
caattctaaatgccccacttctttcatgcatgaattgcaaaaagatgtggcaagttttgtttctaccaagaaaactaaaaacaccttttgtcaaataaatgctccttgcatatttaacttatgcaccagtggccttttaaacagtcaatgtcccatcaaggtgcctgcacatctgggctctccgggagcagccatggcagcacccgggaagaaacgctgatgtggctgctctgcatgctcagatgacttcatcgggaagcctgggtgcattttacgctgggtgccaaatctcgagtaactgaggaattcccagagccttctgaaacacagagctgcaataaggctgctccatccaggagaggcagatgcgaaccagaacaatgggacctcctctcaggacacagcggtgactgactccaagcgcacagcggacccgaagaatgcctggcaggatgcccacccagctgacccagggagccgcccccacttgatccgcctcttttcccgagatgccccggggagggaggacaacaccttcaaagacaggccctctgagtccgacgagctccagaccatccaagaagacagtgcagccacctccgagagcctggatgtgatggcgtcacagaagagaccctcccagaggcacggatccaagtacctggccacagcaagtaccatggaccatgccaggcatggcttcctcccaaggcacagagacacgggcatccttgactccatcgggcgcttctttggcggtgacaggggtgcgcccaagcggggctctggcaaggactcacaccacccggcaagaactgctcactacggctccctgccccagaagtcacacggccggacccaagatgaaaaccccg

SEQ ID NO: 156316 - DNA, 568 bp, Homo sapiens
  Payload ID: 10664
  Gene Symbol: MBP
  Gene Name: myelin basic protein
  ENST ID: ENST00000483025
  CDS Start-End: 48-248
agaccatccaagaagacagtgcagccacctccgagagcctggatgtgatggcgtcacagaagagaccctcccagaggcacggatccaagtacctggccacagcaagtaccatggaccatgccaggcatggcttcctcccaaggcacagagacacgggcatccttgactccatcgggcgcttctttggcggtgacaggggtgcgcccaagcggggctctggcaaggagagccgcacactgagtcggtgatagaaatctctccccagcaagtcgcacacccaaacccgctgctgccagcccgtagctgccccaggactcacaccacccggcaagaactgctcactacggctccctgccccagaagtcacacggccggacccaagatgaaaaccccgtagtccacttcttcaagaacattgtgacgcctcgcacaccacccccgtcgcagggaaaggggagaggactgtccctgagcagatttagctggggggccgaaggccagagaccaggatttggctacggaggcagagcgtccgactataaatcggctcacaagggattcaagggag

SEQ ID NO: 156317 - DNA, 915 bp, Homo sapiens
  Payload ID: 10664
  Gene Symbol: MBP
  Gene Name: myelin basic protein
  Uniprot ID: P02686
  ENST ID: ENST00000580402
  CDS Start-End: 1-915
atgggaaaccacgcaggcaaacgagaattaaatgccgagaaggccagtacgaatagtgaaactaacagaggagaatctgaaaaaaagagaaacctgggtgaactttcacggacaacctcagaggacaacgaagtgttcggagaggcagatgcgaaccagaacaatgggacctcctctcaggacacagcggtgactgactccaagcgcacagcggacccgaagaatgcctggcaggatgcccacccagctgacccagggagccgcccccacttgatccgcctcttttcccgagatgccccggggagggaggacaacaccttcaaagacaggccctctgagtccgacgagctccagaccatccaagaagacagtgcagccacctccgagagcctggatgtgatggcgtcacagaagagaccctcccagaggcacggatccaagtacctggccacagcaagtaccatggaccatgccaggcatggcttcctcccaaggcacagagacacgggcatccttgactccatcgggcgcttctttggcggtgacaggggtgcgcccaagcggggctctggcaaggactcacaccacccggcaagaactgctcactacggctccctgccccagaagtcacacggccggacccaagatgaaaaccccgtagtccacttcttcaagaacattgtgacgcctcgcacaccacccccgtcgcagggaaaggggagaggactgtccctgagcagatttagctggggggccgaaggccagagaccaggatttggctacggaggcagagcgtccgactataaatcggctcacaagggattcaagggagtcgatgcccagggcacgctttccaaaatttttaagctgggaggaagagatagtcgctctggatcacccatggctagacgctga

SEQ ID NO: 156318 - DNA, 563 bp, Homo sapiens
  Payload ID: 10664
  Gene Symbol: MBP
  Gene Name: myelin basic protein
  ENST ID: ENST00000581878
  CDS Start-End: 86-563
ttgcattcccaccggcggtgtgtgagtgattcaggaccttcccagcctgggcagcatttgcctctgaagagccaatccattcaggatgggaaaccacgcaggcaaacgagaattaaatgccgagaaggccagtacgaatagtgaaactaacagaggagaatctgaaaaaaagagaaacctgggtgaactttcacggacaacctcagaggacaacgaagtgttcggagaggcagatgcgaaccagaacaatgggacctcctctcaggacacagcggtgactgactccaagcgcacagcggacccgaagaatgcctggcaggatgcccacccagctgacccagggagccgcccccacttgatccgcctcttttcccgagatgccccggggagggaggacaacaccttcaaagacaggccctctgagtccgacgagctccagaccatccaagaagacagtgcagccacctccgagagcctggatgtgatggcgtcacagaagagaccctcccagaggcacggatccaagtacctggccacagcaagtaccatggaccatgccaggc

SEQ ID NO: 156319 - DNA, 9797 bp, Homo sapiens
  Payload ID: 10664
  Gene Symbol: MBP
  Gene Name: myelin basic protein
  ENST ID: ENST00000585201
  CDS Start-End: 1-542
ccctgccccagaagtcacacggccggacccaagatgaaaaccccgtagtccacttcttcaagaacattgtgacgcctcgcacaccacccccgtcgcagggaaaggggagaggactgtccctgagcagatttagctgggtaggtgacgaacgcacttccatcggcttcctcttccgtcccagtcctcacagccccgcaacttttgtgttctgctctgtttcggttgcttcctggcctccttttctctcctctcgagacctctctgcccacagctgggatcgggccgccttgtcttccactggggaaatgaaacgtggtcttcccttccggaaggtctggtctcttgcttctgtgccggggacccagccctgcaaggccagatcctcttctcccagagggttcccaggcgacgtgactggtctccctcccagggagggagcaacaccacgtccgagaaaatgtttaacttcctccaacacaaccagtgcgagaagccccaggaacccgcatgtggaagtgggactggctggcccgtctcagtgaccccagatgctgacactgggaaaatgattctgctgatgaacagaaaaagaggctaaatagagttgctcgatttataataacctcattaatccaaagatttttgttttgtatgtgtttaaataataattaaaacatagatatcaagccatccagaaaatcttccttaggaattttaggctggttaatactgaaagcaaactttcaaggaaggtttaaaatggccaatttgaactttctagtgaaaaaatttggtgtctgagccaaattaaaatgccaatcattatattctaaccaaacttacagactttagttactagcaaataccagatatgattcttactgtataaaagttataattttagaataaaatggaggaataaccaccaacgtattgtagataggttgtgtctgtctccgaaactgcaatgctctcatacgctagaacagagcctacctacactttctgctcaattaataagcatcatataaatgaatgaatacattttaaaagaaaaacaacaaggagaaagaacaggaagaaagaacagggaaagaaaacagaaggtggggaagaggaaggaagagagggaggaaggggcagggtacttgagagaccatgaggatcccagatcagtcccacacatgattacactgaattatgaactaagatatttaccgaaacgttttccattaatgcatatttgacttgctttttctgacctaatgaatttgcaaaacgatgacaatcatgtagcaaatgtacatggactagtactcacaattaattttttattttctatgccagcaggagacaaagatgatagaagaatgaaattcatttttgacccagaaatcttattttagctactgctttatctgctcttaattttctaggagtggactttggggccgtcgtgccggatcctccctgaatgtggagcgatggggggttgcacacaggccgttctgccccagcagctaacaagaaagacccttgcattcctccctgcatctctcccttttgggtcctactaatgtctgttgaatttctcttttttccaaagcaaaatccttctctgcattttgtctgcttgtctgtttcccagagccgcaggactctctccttgtctggagttccagagagcccccactttctctttctaagctgtgttgtgtgtttcctggtacattctaggttccccaaagataaacatgactaaggattggaaaggaggaaaggccgcgcagattgttaatctgaaagtcaatccccggatttagctctcaaaaatgctttatttttggagaaaagcaatagagtaagacagaaggacttaacgcttgcagggaagtggctttctgccatgtagagccaggctggcaacctgccctctgccatcagggagtgagcatgaacctggaaacctctaggacgcaagagcgaggctggctgtcccctcgtgtgcagtgcttagaccttcttgccacacatcccgtccctcacctcactggatagcccccgaatcaactgttcacacgaaagcagctgcctggttctgagtggccatgctcactcccaagcacaggctgaatgaaaagaaaactgtgcaagtagcttgtatggtgggaagcccccagcagaggctgagggtgcagccaggtgctctggaagccttgaggcctctggtgtcatcttcctcacctctaaataagagatgggctaggttggtcaaggtcctccctgtcctaaaacactttaatgaaatggaagaaaggctgcaggctgatagaggagggacagtctggtttggttccctcaagtcttcaggagagggctcaaggacagtctcccatttcttgttggcaaaatgtaaagtgcagtctggaccctgtccattgagtagagactcaggaggccaaccaagatccctgaaaagctaacagcgtggtcagccttcccacagacagtgcacccaccgtgggaggacacttcgccccccattgttaacgtccaccgcgcccagactcccacagcgagctccttcccttcctccccatgtttgcagtggagttcccactcgagaagacagcacagtagcaagtagaggctggtcctgggacactcgcacccatgtgtgtcaggaagcccctgcggtcacacggcccatgaggaagccagaggggctgctggggctgatgaggccagggcagggcggcctgctcttccataaatgacagctggcaccaaagcccagagctggcagcctccacctgaggagtggcatctccatgaacggcttgtgttctcgcacagccccattgcgtagatgaggaaactgaagctcagagaggttcctgcccttgcccaaggccacacagccggatgagctagaaaggtgctaggggactgggaggtgggggagctgagacgctgtcccgctgctgccaggatgcggccgccccccgtgccagccaggcctgcctcctccctctgtccggctcagcagccccggcctcctgttgctcccagtccgagctatggccaagggagactgattcctgctcaccctgggagagagctcaggattttgtctcaaaaccttataaaagatacgaggctcgacattttactaaggccgaggactcttgatctcccagacagatcctagaaccacagggcacatgtgaccagaatccaatctgtgcaaatcaatcagcaaaaggagcccccagcaaaggcgcaggccggggcctccggggaccggcacctacacagcgcacagccccccagggtccgagtcctccaaacccgtgtaggcaggagcctccttaccttgatttgcttgatgtttgctaatcttctcttgaacaccccacagcgtgaaggtaagcaactgttccctaaacgacttagatccttaaaatatgtgtggttgggccgcatatctcatgagagagcctccgcccaaaccagagccctcctctctctgcggccaacaccctggtagacctgggggagcagcctctcccgcccccaccccctcagcgtggtgctggcccgtggctcctgaaccactcaccagtccagtccggggcctgggcccttccccggggccctggtggcagctcccagtggctcaagcagcgtgcccagcaccgcgggtggaggttgagctccgtggtcttctcttgcagggggccgaaggccagagaccaggatttggctacggaggcagagcgtccgactataaatcggctcacaagggattcaagggagtcgatgcccagggcacgctttccaaaatttttaagctggtaaggtaccctctgctcagctccactgagcggggactaagggctcccagaatccccaactaagctgagtacaagggtggctgccgcctctggctcagccgcactgtaccctggacgtgctctgtcccagcaggcgtgcaggggctcaggtggcattgcccacccgcatttacgcgtggatttcctccgagatgcatgtgaagccggaggtgcttgaggaagggctgcgcctgggctggttcaggggccctggagcaggcgactgaccttgactctggggcagggcccagctggagtccaacttgctcatgcccaggggttggggccctcagggagctaaagcaggagtcaagcagacgtgggtgtcggggggagatccctggagccacgggagggaatgcccaggagacctccagggagtggggagtgtcccgtcggctcatgaggacctggaaccagacccaggacgaatgccaggcccgctgtttataagctctgtctctgagacttggttttctcatctgtaaaatggaggtaacccgcccactcagctcacaaaatcgctgtgaaagtaaaaggtagtgacaaacacaaaacgcggctggcaggtgcgcggctcggattccttagataagcagtcacctttattattgttaaacgtcacccagaaaacccttaactcttagacagcggctctcattaagcaaaaggggaggcacatgaagctccaggcagggccgggagggaaccgtgaagccaaaggctctgggagcccccaggcacctgcgtttgcattttcatcctggaggagaccaggcttctggggctgctccccggggtgcagagaggaggggtctttcttggtgtgtaacatactcattgattcagtcacctgacctttgactccatgtattttgttgagtctggatgtgtggtgtgctctgcccagcagcggggatccacatgagcacagacatggtccccccgcgtccttggtgagtgcagaacctctgccgtgagcctcgattctgggaggttctgggaggttctgtggacaacaggcaattcagggcacagcccctgctcttaaggatagccggtcttaggagaagcttttaatatgtgaagtgagcagggagtaactgagctgctaagtaagcagctttatgtcagatgaagtggtaggcaggatccactcctcaacgtaaattctgagttaagaaaaaaattctccaaatattcaagtctcagggccatcatgctgtacattgccgcagttctgggatgtggccacaagagggcggagatgaggctccccggggagcagtgtctgaacccagcactgcagtcaggacggccccgccccacctggccagcacgtcacctgcctctgaatcgcctgggatgcacgcccagacccctatctgcgctccgccacagcctcactgagtcagaatgtccaagggcgaactaggtgttgctagttgtgatgattttgcagacaccgtgctcacctgggaaacacggattcatcccatctggaaaactaattactccactaccagcttaaggactgttagacacaccgggagagctgagtgctggctcagagttgatgggagggcccagatgagtgaggggccccatttagcaaatattgtccttgcaatatatgcaaggcttacaaccagtcactcaaagatgcttgcaaggccagagcttaccaagaccaccctgaggaacagaaagctgcatttagatctgcacatttactgtgtgcaaatataaccagtgtactatacacatgtgtttcctgaaataagttcagtattttccctgaacttttttgtaagaagcttttaaaaattatttaatttctgtagagttcaagggaagcttctatgtatcaaagcaaatttcaaatcatatggttgtaattaaattttactgcataaaaagttcataactggcctactatggccatatggctgaattagttgacttggagcacttccaatagattaataaatcagctcccccagaaatgagggggtctagaggcaggcagatggagaggacagggacttcatagcatttaacatcattttaccatctttccttcctgttctttttggtgctgttggaaatcagtagtgagaggaaaacactcaaatctggaagtctagcgctgtcggtaggaactgggtagaaaaaactatgcatgtccccccatcactcggaaactacatcagaacatcataggagcatcctgtttccatgtgcattagtttccacgaacatacatgtgaatgttttcccacctgtagtgttgctgtggagttgtgagatgtcaaagtggaggcaagagtatctgccttttgcagtaggctctgttcttttcctgtcctgagagaggaggtcagtctaaccctcaccttgtgagttcagccttatactgacctgagcccagggtggatcagatgctgagatcatgtgactccaagttgcaagacacgtaatagagagaagcgtgactgttgcatccatgcaggctctaatcctggctccttcgggctggctgagctttggctcctgagctataaagagaggatgataggaacacctactccaggaggtgctgtgagcacaaaagagaaaacggggaaaaacgggtttcctgcatggtcagtgctcaacaaattgtagtttcaatgataaaaagtaaaaccaatacacccaccattttcaatgtcaaaagggggcatcaagaaagttaagattgtacctcggtaggttaccttgccagaggctgcagggaacttactccatttcagcacagaagcactttgtttcataggacagtggttctaccactttccaggaagtccaaaggctgatctcttggaaatgcagcaaaaggtgaggtgagtgccaacttctgggctactccagagggcagctccaatgccagagatgttcaagttaagccaggatcaaacaggaaaaacccacgctcccgagggagaggctggccctcgaggggcagggccctgcacctgtcagtccccaggccggcaggaggcctccacggtatgtgagaaagctgcctgtcttgggagggaaatctcactagatggttcctgaagcggcttcgcaggctagcatttcataaacgttttcacttgtgaaaacaaaaatcccttgagtgagttgtgtaagcacaacatagaggcttgtttataatgctacgtatgtacttggaaaaccccccaagaagtcagaactgtcaccttggtctgttagctgcgttacttggaaggattcttggcgtctgcgctctggttatttgtgttactgggcagtgtggaagacgtagaattagatgaggacagtgttggttcgttgctgatcggccacggtaaagagcatatttcttttctatcttgctttctgggggctcttcgccaaaattgatcatttcataaaagaggggaaacccaaggagagagactaaactttgaataaaaatttgaatgcaaaaaaagtgcagttctgcttcgtcgatctaagtgacattctgagtgaccaacgcattcctctttctagagggatggccacgcctggctacctccacaccgtgggccacagcacacctgtgcaccatctcaattagctgccaactctcttttaaacatcgaaattatttgtcccccaaacgtgtaaatgcatggttttaagaccccttcaagtcaaagtttgcagacaaagctctctgtgcatttgatttgtctggtgtggcagatgagatggcacataggagggacgtccccagggatggacacgtggctttgctctttgctggcgcgtgtagcaaggggtgtgctagggtcccgccgaaaaagaagttgctcctgttgtcgctggcagttcccctcggctgccctggcacctctagctgacgagaaaaagtgctcattcaaagcaaagcaatggagcggctgcactttcacccacagaagtgcagcgttgttttgcagagcagtggttatgccaggcaccactccctggggcctgggaatccgattccagttctctctcacagaactggaaattcaattagcatttgctgagggaggtcgggagaaatggaatgaaaagaccagctctccggggtgccatttctattagcagatgagagagacacccaatggctcagcatccacccgggaccacagaagaggggatgctggtgtgggaggaccctgcggcactctcgtcctaactcctctctcttccttttcagggaggaagagatagtcgctctggatcacccatggctagacgctgaaaacccacctggttccggaatcctgtcctcagcttcttaatataactgccttaaaactttaatcccacttgcccctgttacctaattagagcagatgacccctcccctaatgcctgcggagttgtgcacgtagtagggtcaggccacggcagcctaccggcaatttccggccaacagttaaatgagaacatgaaaacagaaaacggttaaaactgtccctttctgtgtgaagatcacgttccttcccccgcaatgtgcccccagacgcacgtgggtcttcagggggccaggtgcacagacgtccctccacgttcacccctccacccttggactttcttttcgccgtggctgcggcacccttgcgcttttgctggtcactgccatggaggcacacagctgcagagacagagaggacgtgggcggcagagaggactgttgacatccaagcttcctttgtttttttttcctgtccttctctcacctcctaaagtagacttcatttttcctaacaggattagacagtcaaggagtggcttactacatgtgggagcttttggtatgtgacatgcgggctgggcagctgttagagtccaacgtggggcagcacagagagggggccacctccccaggccgtggctgcccacacaccccaattagctgaattcgcgtgtggcagagggaggaaaaggaggcaaacgtgggctgggcaatggcctcacataggaaacagggtcttcctggagatttggtgatggagatgtcaagcaggtggcctctggacgtcaccgttgccctgcatggtggccccagagcagcctctatgaacaacctcgtttccaaaccacagcccacagccggagagtccaggaagacttgcgcactcagagcagaagggtaggagtcctctagacagcctcgcagccgcgccagtcgcccatagacactggctgtgaccgggcgtgctggcagcggcagtgcacagtggccagcactaaccctccctgagaagataaccggctcattcacttcctcccagaagacgcgtggtagcgagtaggcacaggcgtgcacctgctcccgaattactcaccgagacacacgggctgagcagacggccccgtggatggagacaaagagctcttctgaccatatccttcttaacacccgctggcatctcctttcgcgcctccctccctaacctactgacccaccttttgattttagcgcacctgtgattgataggccttccaaagagtcccacgctggcatcaccctccccgaggacggagatgaggagtagtcagcgtgatgccaaaacgcgtcttcttaatccaattctaattctgaatgtttcgtgtgggcttaataccatgtctattaatatatagcctcgatgatgagagagttacaaagaacaaaactccagacacaaacctccaaatttttcagcagaagcactctgcgtcgctgagctgaggtcggctctgcgatccatacgtggccgcacccacacagcacgtgctgtgacgatggctgaacggaaagtgtacactgttcctgaatattgaaataaaacaataaacttttaatgg

SEQ ID NO: 156320 - DNA, 570 bp, Homo sapiens
  Payload ID: 10664
  Gene Symbol: MBP
  Gene Name: myelin basic protein
  ENST ID: ENST00000583474
  CDS Start-End: 48-227
agaccatccaagaagacagtgcagccacctccgagagcctggatgtgatggcgtcacagaagagaccctcccagaggcacggatccaagtacctggccacagcaagtaccatggaccatgccaggcatggcttcctcccaaggactcacaccacccggcaagaactgctcactacggctccctgccccagaagtcacacggccggacccaagatgaaaaccccgtagtccacttcttcaagaacattgtgacgcctcgcacaccacccccgtcgcagggaaaggggagaggactgtccctgagcagatttagctggcgtgaagggggccgaaggccagagaccaggatttggctacggaggcagagcgtccgactataaatcggctcacaagggattcaagggagtcgatgcccagggcacgctttccaaaatttttaagctgggaggaagagatagtcgctctggatcacccatggctagacgctgaaaacccacctggttccggaatcctgtcctcagcttcttaatataactgccttaaaactttaatcccacttgcccctgttacc

SEQ ID NO: 156321 - DNA, 552 bp, Homo sapiens
  Payload ID: 10664
  Gene Symbol: MBP
  Gene Name: myelin basic protein
  ENST ID: ENST00000577755
  CDS Start-End: 1-181
acagaagagaccctcccagaggcacggatccaagtacctggccacagcaagtaccatggaccatgccaggcatggcttcctcccaaggcacagagacacgggcatccttgactccatcgggcgcttctttggcggtgacaggggtgcgcccaagcggggctctggcaaggactgtccctgagcagatttagctggggggccgaaggccagagaccaggatttggctacggaggcagagcgtccgactataaatcggctcacaagggattcaagggagtcgatgcccagggcacgctttccaaaatttttaagctgggaggaagagatagtcgctctggatcacccatggctagacgctgaaaacccacctggttccggaatcctgtcctcagcttcttaatataactgccttaaaactttaatcccacttgcccctgttacctaattagagcagatgacccctcccctaatgcctgcggagttgtgcacgtagtagggtcaggccacggcagcctaccggcaatttccggccaacagttaaatgagaacatg

SEQ ID NO: 156322 - DNA, 561 bp, Homo sapiens
  Payload ID: 10664
  Gene Symbol: MBP
  Gene Name: myelin basic protein
  ENST ID: ENST00000578873
  CDS Start-End: 48-561
agaccatccaagaagacagtgcagccacctccgagagcctggatgtgatggcgtcacagaagagaccctcccagaggcacggatccaagtacctggccacagcaagtaccatggaccatgccaggcatggcttcctcccaaggcacagagacacgggcatccttgactccatcgggcgcttctttggcggtgacaggggtgcgcccaagcggggctctggcaaggtaccctggctaaagccgggccggagccctctgccctctcatgcccgcagccagcctgggctgtgcaacatgtacaaggactcacaccacccggcaagaactgctcactacggctccctgccccagaagtcacacggccggacccaagatgaaaaccccgtagtccacttcttcaagaacattgtgacgcctcgcacaccacccccgtcgcagggaaaggggagaggactgtccctgagcagatttagctgggtaggtgacgaacgcacttccatcggcttcctcttccgtcccagtcctcacagccccgcaacttttgtgttctgctctgtttcgg

SEQ ID NO: 156323 - DNA, 573 bp, Homo sapiens
  Payload ID: 10664
  Gene Symbol: MBP
  Gene Name: myelin basic protein
  ENST ID: ENST00000583798
  CDS Start-End: 449-573
ctactttttaattggattgtttggttttaacaactgagttttcctaattctttatattttctagatgctggccttaccactcggtgattattttctaccactttatcttgttttttcaccctcttcacagagtcctttgcagaaagttttacattttgttgaattcaagtttattaattttaccttttttggattttgatttttggtgtgaagtctaagtcttcacctagcctgaggttcccgaagattttctccttttttccctacaaattttatagtttcacattttatacttaagcctattttccattttgagttaatttttgtatgaggtgtgaggtttaggttgaggcttatttgttttggtttggtttgggttttgccaacgaatgtccaatagctccgggactattagttgaaaagcctctgaagagccaatccattcaggatgggaaaccacgcaggcaaacgagaattaaatgccgagaaggccagtacgaatagtgaaactaacagaggagaatctgaaaaaaagagaaacctgggtgaactttcacggacaacctcagagga

SEQ ID NO: 156324 - DNA, 578 bp, Homo sapiens
  Payload ID: 10664
  Gene Symbol: MBP
  Gene Name: myelin basic protein
  ENST ID: ENST00000578193
  CDS Start-End: 48-521
agaccatccaagaagacagtgcagccacctccgagagcctggatgtgatggcgtcacagaagagaccctcccagaggcacggatccaagtacctggccacagcaagtaccatggaccatgccaggcatggcttcctcccaaggcacagagacacgggcatccttgactccatcgggcgcttctttggcggtgacaggggtgcgcccaagcggggctctggcaaggactcacaccacccggcaagaactgctcactacggctccctgccccagaagtcacacggccggacccaagatgaaaaccccgtagtccacttcttcaagaacattgtgacgcctcgcacaccacccccgtcgcagggaaaggggagaggactgtccctgagcagatttagctggggggccgaaggccagagaccaggatttggctacggaggcagagcgtccgactataaatcggctcacaagggattcaagggagtcgatgcccagggcacgctttccaaaatttttaagctgtagtgagaggaaaacactcaaatctggaagtctagcgctgtcgggaggaagagatagtcg

SEQ ID NO: 156325 - DNA, 1052 bp, Homo sapiens
  Payload ID: 10664
  Gene Symbol: MBP
  Gene Name: myelin basic protein
  ENST ID: ENST00000579129
  CDS Start-End: 291-1052
agcccggggaggcggggccggggagctgggtgcgcgcccgtccctcggagccgccgccgtcagtcaccgccgccgcgcgccagagagaagcagcctccggccccggcggcccctgtctcccgaccccggaaggcgaagcaggctgcccggggaccccgcgcgtgggcgcttgaagccgagaccagcctgcccgggcctgggcaggcggagcagggccttggaccccgcggcgcccctcggcctcggagcaacgagcgcagcgccgcctctgaagagccaatccattcaggatgggaaaccacgcaggcaaacgagaattaaatgccgagaaggccagtacgaatagtgaaactaacagaggagaatctgaaaaaaagagaaacctgggtgaactttcacggacaacctcagaggacaacgaagtgttcggagaggcagatgcgaaccagaacaatgggacctcctctcaggacacagcggtgactgactccaagcgcacagcggacccgaagaatgcctggcaggatgcccacccagctgacccagggagccgcccccacttgatccgcctcttttcccgagatgccccggggagggaggacaacaccttcaaagacaggccctctgagtccgacgagctccagaccatccaagaagacagtgcagccacctccgagagcctggatgtgatggcgtcacagaagagaccctcccagaggcacggatccaagtacctggccacagcaagtaccatggaccatgccaggcatggcttcctcccaaggcacagagacacgggcatccttgactccatcgggcgcttctttggcggtgacaggggtgcgcccaagcggggctctggcaaggactcacaccacccggcaagaactgctcactacggctccctgccccagaagtcacacggccggacccaagatgaaaaccccgtagtccacttcttcaagaacattgtgacgcctcgcacaccacccccgtcgcagggaaagggaggaagagatagtcgctctggatcacccatggctagacgctga

SEQ ID NO: 156326 - DNA, 2958 bp, Homo sapiens
  Payload ID: 10665
  Gene Symbol: MYEF2
  Gene Name: myelin expression factor 2
  ENST ID: ENST00000267836
  CDS Start-End: 117-1847
actgagcgctcggggccttttcaaatcgggatccgttaccgcttccccggcagccgccattgtcgcgctcggagcccctcagctcaggcggccgaggcggaggcagcggcggcgggatggcggacgccaacaaggccgaggtgcccggggccactggtggcgacagcccgcacctgcagcccgcagagccgccgggcgagccgcggcgagagccgcaccccgcggaggcggagaagcagcagccgcagcacagcagcagctccaatggcgttaaaatggagaatgatgaatcagcaaaagaagagaaatctgacttaaaggaaaaatctacaggaagtaagaaggccaatagatttcatccttattcaaaagacaagaattcgggcgctggagaaaagaagggtccaaatcgtaacagagttttcattagcaacatcccatatgacatgaaatggcaagctattaaagatctaatgagagagaaagttggtgaggttacatacgtggagctctttaaggatgcggaaggaaaatcaaggggttgtggtgtggttgaattcaaagatgaagaatttgtaaagaaagccctagaaactatgaacaaatatgatcttagtggaagaccccttaatattaaagaggatcctgatggagaaaatgctcgtagggcattgcagcgaacaggaggatcatttccaggaggacacgtccctgatatgggatcagggttgatgaatttaccaccttccatactcaataatccaaacattcctcctgaagtcatcagtaatttgcaggccggtagacttggttccacaatttttgttgccaatcttgacttcaaagttggttggaagaagctaaaggaagtgttcagcatagctggaactgtgaagcgggcagatattaaagaagacaaagatggcaagagcagaggaatgggcactgtcacttttgagcaagcaattgaagcagttcaagcaatttctatgttcaatgggcagtttttatttgatagacctatgcatgtgaaaatggatgacaagtctgttcctcatgaagagtaccgttcacatgatggtaaaacaccacaattaccacgtggtcttggaggcattgggatgggacttggtccgggtggacagcctattagtgccagccagttgaacataggtggagtaatgggaaatttaggtccaggtggtatgggaatggatggtccaggttttggaggaatgaatagaattggaggaggaatagggtttggtggtctggaagcaatgaatagcatgggaggatttggaggagttggccgaatgggagagctgtaccgtggtgcgatgactagtagcatggagcgagattttggacgtggtgatattggaataaatcgaggctttggagattcctttggtagacttggtggtggaatgggtagcatgaacagtgtgactggaggaatggggatgggactggaccggatgagttccagctttgatagaatgggaccaggtataggagctatactggaaaggagcatcgatatggatcgaggatttttatcgggtccaatgggaagcggaatgagagagagaataggctccaaaggcaaccagatatttgtcagaaatctaccttttgacttgacttggcagaaactaaaagagaaattcagtcagtgtggtcatgtaatgtttgcagaaataaaaatggagaatggaaagtcaaaaggctgtggaacagtcagatttgactccccagaatcagctgaaaaagcctgcagaataatgaatggcataaaaatcagtggcagagaaattgatgttcgcttggatcgtaatgcataatttcaagccatggttggaacattcctacatctgttttgctgaatctcctagtaaaagtcatttttttaaagtaatattgtatgcttacaaaagctgtaaaaatgaacttttaaaactcccaccagcttttaacagtataatgttaaaaatatactgtaatttttgttaatctcaagtttgggtttttaaagacagcaagtctggtcattcagtttaaatgaatggttatactgtttttaatgaaataagccattttcttgttgttttcagtactacatagttggatttgtttgttctagtttctccagtttttgtcaacttattgtatggtaaaacatagattttttccccccaaacttctgttttataatatgtaatttttcatgaaaagaaagggctcagaaaaattaggatgtgattttggttggttttaaattactgtaagttttagattctaaggttcaagatttttaaaatttgatttaaatgaagaaatggatttttctctctgcccctccctgccattcatattttctgcataacactattaataatatcaacctccacagccccttattttattatttccaataattccaagttcatatagaactgataatgtagcaagccccaagtatgataataggcagactattcccaactttctgtctagtttccagccattgaagtgaactgctaaaaaaagaaaaataattgaaatgttgagagagatggttatgtaagttagtcctctgctgtttacttctgcaggagctgatccatttataaatgcagttttaataaaccatggaataccaaggcacaacatatcaaacacattggatcccacgatgttagacatagccatatctcctttccctacaaaagaaaagcatactgttaaaatgtgcttaccaatactgtgttttattaataatcttcataagaaaagaaacactggatacttttttgttgttgattcgttttgaaaaattgttgttagagcaaaagtcttactgaatttgtatttttaaatttttcttgggttagtatttaaagtcttaacatttatttaataattatatttattaaaccatttttcaataaggta

SEQ ID NO: 156327 - DNA, 10360 bp, Homo sapiens
  Payload ID: 10665
  Gene Symbol: MYEF2
  Gene Name: myelin expression factor 2
  ENST ID: ENST00000324324
  CDS Start-End: 281-2083
aggactggtccagccctcccaggcaggtgtagggccgactgcagcaacagcggccctgaccccagctcccatggctcccctccccccgcactcccaccccccgcacccggcacacaccatctcccagtcacccagtctcgaccggttctcgcgagatccgggttactgagcgctcggggccttttcaaatcgggatccgttaccgcttccccggcagccgccattgtcgcgctcggagcccctcagctcaggcggccgaggcggaggcagcggcggcgggatggcggacgccaacaaggccgaggtgcccggggccactggtggcgacagcccgcacctgcagcccgcagagccgccgggcgagccgcggcgagagccgcaccccgcggaggcggagaagcagcagccgcagcacagcagcagctccaatggcgttaaaatggagaatgatgaatcagcaaaagaagagaaatctgacttaaaggaaaaatctacaggaagtaagaaggccaatagatttcatccttattcaaaagacaagaattcgggcgctggagaaaagaagggtccaaatcgtaacagagttttcattagcaacatcccatatgacatgaaatggcaagctattaaagatctaatgagagagaaagttggtgaggttacatacgtggagctctttaaggatgcggaaggaaaatcaaggggttgtggtgtggttgaattcaaagatgaagaatttgtaaagaaagccctagaaactatgaacaaatatgatcttagtggaagaccccttaatattaaagaggatcctgatggagaaaatgctcgtagggcattgcagcgaacaggaggatcatttccaggaggacacgtccctgatatgggatcagggttgatgaatttaccaccttccatactcaataatccaaacattcctcctgaagtcatcagtaatttgcaggccggtagacttggttccacaatttttgttgccaatcttgacttcaaagttggttggaagaagctaaaggaagtgttcagcatagctggaactgtgaagcgggcagatattaaagaagacaaagatggcaagagcagaggaatgggcactgtcacttttgagcaagcaattgaagcagttcaagcaatttctatgttcaatgggcagtttttatttgatagacctatgcatgtgaaaatggatgacaagtctgttcctcatgaagagtaccgttcacatgatggtaaaacaccacaattaccacgtggtcttggaggcattgggatgggacttggtccgggtggacagcctattagtgccagccagttgaacataggtggagtaatgggaaatttaggtccaggtggtatgggaatggatggtccaggttttggaggaatgaatagaattggaggaggaatagggtttggtggtctggaagcaatgaatagcatgggaggatttggaggagttggccgaatgggagagctgtaccgtggtgcgatgactagtagcatggagcgagattttggacgtggtgatattggaataaatcgaggctttggagattcctttggtagacttggcagtgcaatgattggagggtttgcaggaagaataggatcttctaacatgggtccagtaggatctggaataagtggtggaatgggtagcatgaacagtgtgactggaggaatggggatgggactggaccggatgagttccagctttgatagaatgggaccaggtataggagctatactggaaaggagcatcgatatggatcgaggatttttatcgggtccaatgggaagcggaatgagagagagaataggctccaaaggcaaccagatatttgtcagaaatctaccttttgacttgacttggcagaaactaaaagagaaattcagtcagtgtggtcatgtaatgtttgcagaaataaaaatggagaatggaaagtcaaaaggctgtggaacagtcagatttgactccccagaatcagctgaaaaagcctgcagaataatgaatggcataaaaatcagtggcagagaaattgatgttcgcttggatcgtaatgcataatttcaagccatggttggaacattcctacatctgttttgctgaatctcctagtaaaagtcatttttttaaagtaatattgtatgcttacaaaagctgtaaaaatgaacttttaaaactcccaccagcttttaacagtataatgttaaaaatatactgtaatttttgttaatctcaagtttgggtttttaaagacagcaagtctggtcattcagtttaaatgaatggttatactgtttttaatgaaataagccattttcttgttgttttcagtactacatagttggatttgtttgttctagtttctccagtttttgtcaacttattgtatggtaaaacatagattttttccccccaaacttctgttttataatatgtaatttttcatgaaaagaaagggctcagaaaaattaggatgtgattttggttggttttaaattactgtaagttttagattctaaggttcaagatttttaaaatttgatttaaatgaagaaatggatttttctctctgcccctccctgccattcatattttctgcataacactattaataatatcaacctccacagccccttattttattatttccaataattccaagttcatatagaactgataatgtagcaagccccaagtatgataataggcagactattcccaactttctgtctagtttccagccattgaagtgaactgctaaaaaaagaaaaataattgaaatgttgagagagatggttatgtaagttagtcctctgctgtttacttctgcaggagctgatccatttataaatgcagttttaataaaccatggaataccaaggcacaacatatcaaacacattggatcccacgatgttagacatagccatatctcctttccctacaaaagaaaagcatactgttaaaatgtgcttaccaatactgtgttttattaataatcttcataagaaaagaaacactggatacttttttgttgttgattcgttttgaaaaattgttgttagagcaaaagtcttactgaatttgtatttttaaatttttcttgggttagtatttaaagtcttaacatttatttaataattatatttattaaaccatttttcaataaggtatatagcttatttgttgcttttcattgtaatttaacatggttaatggttaattactatttaacacacatttcaaatgaatattatttgggggattagattgagtgaaattaacctgctattaaatagtaaacttttcctctggagtcacttttttcccccttcaaagtatgttactgaggaagtaaacttttttttttttttttggtttttgttttttgagacacagtctcgctctgttgcccaggctgctggagtgccgtggcgcaatctcggctcactgcaacctccgcctcctggattcaaacaattctcctgcctcagcctcctgagtagctgggattacaggcacatgccaccacgcccggctaatttttgtatttttagtagagactgggtttcaccatgttggtcaggctggtctcaaactcctgacctcgtgatccacccgcctcggcctcccaaaatcctgggattacaggcgcgagccaccacacccggctggaagtaaacatttttaaagctacttttactcattctagccttgtagaatgaccattgcagcttgagggacctagttcttaccttttcttgcaaccaacacacttgcaattgtgtctggtatgcttgttcctgctgctaataaagtaaggcccattactgtatcgggaatttctagtgtttcccctgtaataaacagatatttcaagttacaaatcttaaagattcactaaccatcctttgcagttattttggatatttccttcgtgaacaaaaataaaataggcacatttagaattcagagccaatatgtgcttgcttattagttttttagctagcaacatatttgaatcaggctggtaattcgggtaacccaggtagcacagatttttaatgacatatctaaagatacgtaacagctaaaattctgccagtgagaaattttcctgtttgatattcttacaaaagatgtttatgtccaccattatctcatcagggctgtgctgaatatttgataatgagactgatcattccgctttttctttcttaaaaatattagtcagagttaagcaaattaattatagctatctttaagctataaatgtgttaacatgtatatataccatttattatgttctactttagtgatataccttaatttagtgggctttggcagggcgggggagggggaacgttcattaatctctgaggaaaacaaaacctgttttctacttgagtctaacatatggtcccaatttattaatacttctgttaaatttgatgtcaggtcaacatttttcagaaatgtatttattctcagaaacagaaccagagagaagttaaacaaaaggttatgtaactgttcctttaatgttgtaattgaaaacttggtttagcgtcttttttttctttctctttttttttcttaaaatgccaactaaaataattagaaagtagcttatttattgcatgcttatacattgatattggaattggaattggttgttaatttctgttactggctttgctagaattcatatgtgcataaataacactaatatttatcatcttgggggctgttctgtgatctattacatgatttttgctctctttttatttttctagtatcaaatgtgttctggctgagtgaatttggatagatataatatgcaagctaattggactttttcatttttctcattaaaaaaaggaagaagtagtccactttttgctagcatactattctgagacttacattaatttgggaaaagtcaagggtcaacaaatttttgtgtctgtgaggggccagatagtaattatttaggctttgcaggctgtgtgatttctgttgcagttattcagctttgccaatgtagtgtgaaaacaatcatagataatatgtaaaaccttactaataaaaacaagctgggttatgttggcacacaggcagtagtttgttcacctctgctgtaagttaatttgggttaacctttgtaggagaaattacagattatttttgtctttgttcatagtttttttgtttagggactgtagtggattatggccaagcagcagtagctagttaagtcttaatcatgaaggtagtagaaacctagaataaaattattatgcccttttcactcatttcataatatgtttgtattgccgtgttgaaaagccaaataaaatacaatccagttaagcagtgagcacccattgttttcccaaaaatagagctccttgctttgtttttgtttttttgttcttttttttttttattatggaatggaattcaatataaagagtttattgtggaccccatggaatgtgattaaattattagcataataaaaagacatcctatgaatttgatttcatttataagatctcttgaattgtaccccaggctaaataacagtggaaaatacagtttatatataatatgcaactcacaaactccagtgatcttgttatagtaatacttaatcattttgtaaatggtactaatcttcaatcttgctgaaaagaaatttgctgtgtagctagactactttgagtgaacatatgcaatttgttcttatatgaatattttcaagttgtgctattgtacttaaaatacataccagttattgtgaccatccaaaccaggatatatgtaaatgcggatatccatattgcagacatgaaaaaggttatcacaaagtagtttttccaaaacttttttctacaatctggtgtggttagaaaaagtaatgtaataataggaagggataatacccaaaaaattctttttaagtctgcttcaggcatgttgaaaacacttggtggatctgttgtggaaaaagtaaacacttttgagttttctcaaatggctaattaagttagaaatgcctatttagaaagttatattgaaataaattagctgtatcagtttttaaaaggctgtttaaaacatttgagtacctcattactgatattgctggtgaaaagaaactaattgaaactttagggcagacaatgtaagatgtgatactccgcatttctttatttggggccttaaatctataaaaatgtcttgggccattcgttaaatatattgtagatagtgtttatgaagtgtcaattggacatctcctgtggattgtcttcagtaactttttgcttaagggattaacctggtttctaacctagctactccagttgtctccacttcataatattgatgatgcctctgcctgccctatgtaccagataatgtatacttaaagaatataaaataatcatagcataatttttttattaagtcgcatatcctaattcttagtggaagtggtttttttgtcctatttcattactattttatttattaaattcagactttaccacagttcatagaaataaccttaaagtaggaggtagtatatcatctaaagtacaatttatgaaaattgagtatatttctttattcaatttaatttagtagaaggataatgataatatattggataaaaattcgaattcaaaaatgttcaaaatttgtatggcatttacaaaataatgtaacaattggatgaaatcatgttaaaactaatgttagtacaacaactcataaaaagtttgccaagcttcaaccaatgtgccattaagtaatattagatataattttaacataatcaaagaatttggattggttcttttgcgtttcttattataaacttaatttggagaggcatacctcttatacctgaaagagtagaagctaaaatttttgtaaaaagggggaaaagtcatgttttaaaattttaagtagtagattagaataaaaccctcctaaaggcttaattaaatttagaatctgttttggacaaccactttataaaaaggtaacccatgaacttataattttgaccatagctgaattttctgacttcctactgaacctatttacctaaaagttttgctattgctttaaacaatggtaaacctcagctgtttttcttctttcttccaaaccagcccctttttctgagttcccagttttaataagtgctgttcccattttctcagtcaagattaaaacataggaggtgtctttgttcctttttctggccccatatagtcttggtgatgcttccttcatatagtctcacatctgttctcatttattcccaccactttcacttggtctaggcacctagtaaacacatcagctgttgtaatagcctctcttacagacctctttgtctcttcatattttagttcggtgaacatcattttgggtaacattactaagataacagttctaataatttctctcctcagaaaccttccaagattcttaaaatagcatttaagattcttcttatcctattcctttctacctttcctctccttccttcctatgcacatactgtgctctatgtgttttatctctgcatcatttatggaatgaagacctcagtagctgctacttattggtcataacatatgtcattagttaaagtctttcctgtccagcaaggcccaatttaaatgctcccttctctgtgaaaatctcctatctgtcctcaccacattttggcaatctgtcccatttgtgaaccacagtcacactttatttttctctttttatggtacttaacgttcatactttagctattttgtatttcctgtgatattggaagttccttaaaggtagggacttggtctttatcatttctgagtcttcacagtcttttttacataaaaagcacacaatacttgctgaattgaaatgaaattttaaagtttttcctttgcgaatagacttaataatgggcaagatttagtgattaccttcagaaacctgactaaggccatgtaaacttatagagagctgagagtagccagaatcttcataaaatattccactatcagttcttgattgccgacgaatgaatggttgaccttcatcttcccagcccatcagtggctgttgttcacttctctccatagctttggcaagacaggcgcagcaaggactgcatttctttataatatattggttaattttaatgtcaaaacacagcaccaaaacatacaatccatatatcaaaagcagtaaagccccttcatacctacaaaagagaaatttgtgtttttaaattaaaagtgaaagtcattttagagttgatagcttttgggcagtatctattgaatgattttctaacaaaagtagccatagaacaatcaaacatttctagatattttttgttttgtagatttgtccagacttgattacagcattattatgtttattgataaaagctggacacttctgtgttgtttttttttttttaaaaacaagatcaacaaactcgtttttacttgtagattccttccaaatgataggtataaaaatgcaaggaaaatgataattggagattttcaaaataaatgtaaaattaataaatagtggtgaacattttctgcctcagctcattggcataatacattccccaacatacataataattataaaataatatagtaactgttaagttatttcaactgtccaagttttctggtataggaactttgtgtaaaatattactcagatatgggaggcttaggctgggatttttcagtttgtcatacagagcatttttaatgatttgaatgtagctgaatttggcttacagtcacaagaaaacaagatgttctaaaatataaaattatacccttggaaccaagaactgtttccctgtactctggcagttagctaatgccatcacatttgaaccttgcatttaccttttatagccagtgaatctctgtctgctgtatcttaaagaacagttctgatttccctaatggaggaagaattagcttggatactctcacagtcactatcccttacagacaactgctgagttctagaaggatttctattctaccaacacagtgtcttagggagacggactagaggacaggatgattagtttagaaattatgcttctggctaggttttaagtttcttgatagcaggtattacgccgtgctgcaaggttatggttctccagatggacaccattacattttttttttttcatatttttctggtgtcctctggagttatgcaatgtatataacctgtgtagctgtgttttacatttcattatcccttatgatatctagcatagtgagaaggacctagtaggtgcctgctgcttactagttgaaaaagttagtatctgtccactcagtcaccacctttttcattttcttggaccagctaggcacagagagattgtaaggaaagcaaacaatttttaatatgaaaagctaagcattgttatttcttagaggaaggctatagtttctcctgaatgagcatcagaagtttggaggaatttaaaaagacttcttttacttcctctaccatccttctccagtcttttgtggccatgaacacttctaaccaaggcaaggtgagcagtaacccagcagaagaaaaagtcaactgttgtggctttaatggacaacaggagttgggaaactttctgaataggcagccagtggggagaaggaaaagtggtggtctccagtgactagtgagagaaaaaaggagactgtgaagtgattaagaagaaattgcaaactagtgagaagaactcaatcagcaattgtgatgaggttaactcacagacctgttggaatatggtatagaagtggcagattaagtgactgaaataacatttctgaaaaaaaattactgaaccatcagaaattcataaaatctctaatttttacataagaattattttcaagcttaccagtaaacttggttgtcatatattataccaagaactgctgctgcactaattgtgtacgctgcacagtctctgaataggggccaacatgatagtgttgagacctgtaatatggtaagttattatttccattacattgtaacttcttcaagtacaatccttagtataatactaaaattgtttatatatttgtagttaaatattgttatcttttgcatattgcttagagaaaaaaatgtaaaattgtgttctaacttacacagactttcataaatctgaccaagagctatttgtggattaacattaaattgaatacatgttgtttttctactgattaataaatttgattgcacatat

SEQ ID NO: 156328 - DNA, 736 bp, Homo sapiens
  Payload ID: 10665
  Gene Symbol: MYEF2
  Gene Name: myelin expression factor 2
  Uniprot ID: Q9P2K5
  ENST ID: ENST00000561151
  CDS Start-End: 90-476
gggatccgttaccgcttccccggcagccgccattgtcgcgctcggagcccctcagctcaggcggccgaggcggaggcagcggcggcgggatggcggacgccaacaaggccgaggtgcccggggccactggtggcgacagcccgcacctgcagcccgcagagccgccgggcgagccgcggcgagagccgcaccccgcggaggcggagaagcagcagccgcagcacagcagcagctccaatggcgttaaaatggagaatgatgaatcagcaaaagaagagaaatctgacttaaaggaaaaatctacaggaagtaagaaggccaatagatttcatccttattcaaaagacaagaattcgggcgctggagaaaagaagggtccaaatcgtaacagagttttcattagcaacatcccatatgacatgaaatggcaagctattaaagatctaatgagagagaaagggttgtggtgtggttgaattcaaagatgaagaatttgtaaagaaagccctagaaactatgaacaaatatgatcttagtggaagaccccttaatattaaagagggaggcctgaggcgacggagagagatggggagcggctggtcggtggagcagtcagaacatttattgattaagttcgctgttttatttgggcacggttgatggtgccccaaaacaattaaaacatcaaagatcactgatcacagatcaccataacagataataatgaagaaggttg

SEQ ID NO: 156329 - DNA, 731 bp, Homo sapiens
  Payload ID: 10665
  Gene Symbol: MYEF2
  Gene Name: myelin expression factor 2
  ENST ID: ENST00000560172
  CDS Start-End: 1-380
tgggactggaccggatgagttccagctttgatagaatgggaccaggtataggagctatactggaaaggagcatcgatatggatcgaggatttttatcgggtccaatgggaagcggaatgagagagagaataggctccaaaggcaaccagatatttgtcagaaatctaccttttgacttgacttggcagaaactaaaagagaaattcagtcagtgtggtcatgtaatgtttgcagaaataaaaatggagaatggaaagtcaaaaggctgtggaacagtcagatttgactccccagaatcagctgaaaaagcctgcagaataatgaatggcataaaaatcagtggcagagaaattgatgttcgcttggatcgtaatgcataatttcaagccatggagctgatccatttataaatgcagttttaataaaccatggaataccaaggcacaacatatcaaacacattggatcccacgatgttagacatagccatatctcctttccctacaaaagaaaagcatactgttaaaatgtgcttaccaatactgtgttttattaataatcttcataagaaaagaaacactggatacttttttgttgttgattcgttttgaaaaattgttgttagagcaaaagtcttactgaatttgtatttttaaatttttcttgggttagtatttaaagtcttaacatttatttaataattatatttattaaaccatttttcaataaggt

SEQ ID NO: 156330 - DNA, 2598 bp, Homo sapiens
  Payload ID: 10665
  Gene Symbol: MYEF2
  Gene Name: myelin expression factor 2
  Uniprot ID: Q9P2K5
  ENST ID: ENST00000561351
  CDS Start-End: 80-466
accgcttccccggcagccgccattgtcgcgctcggagcccctcagctcaggcggccgaggcggaggcagcggcggcgggatggcggacgccaacaaggccgaggtgcccggggccactggtggcgacagcccgcacctgcagcccgcagagccgccgggcgagccgcggcgagagccgcaccccgcggaggcggagaagcagcagccgcagcacagcagcagctccaatggcgttaaaatggagaatgatgaatcagcaaaagaagagaaatctgacttaaaggaaaaatctacaggaagtaagaaggccaatagatttcatccttattcaaaagacaagaattcgggcgctggagaaaagaagggtccaaatcgtaacagagttttcattagcaacatcccatatgacatgaaatggcaagctattaaagatctaatgagagagaaagggttgtggtgtggttgaattcaaagatgaagaatttgtaaagaaagccctagaaactatgaacaaatatgatcttagtggaagaccccttaatattaaagaggatcctgatggagaaaatgctcgtagggcattgcagcgaacaggaggatcatttccaggaggacacgtccctgatatgggatcagggttgatgaatttaccaccttccatactcaataatccaaacattcctcctgaagtcatcagtaatttgcaggccggtagacttggttccacaatttttgttgccaatcttgacttcaaagttggttggaagaagctaaaggaagtgttcagcatagctggaactgtgaagcgggcagatattaaagaagacaaagatggcaagagcagaggaatgggcactgtcacttttgagcaagcaattgaagcagttcaagcaatttctatgttcaatgggcagtttttatttgatagacctatgcatgtgaaaatggatgacaagtctgttcctcatgaagagtaccgttcacatgatggtaaaacaccacaattaccacgtggtcttggaggcattgggatgggacttggtccgggtggacagcctattagtgccagccagttgaacataggtggagtaatgggaaatttaggtccaggtggtgagtattctaacttcctcttttctttttaaatgatacatatgctagctaataaagcctccattgatgtggtctgtaataatgtttaaaggactctaattaatagttagatatttacggtgtcacttcattctgaaaaaggaatgaaaccttgagcacagctaacatgaaagagataggcagaagtcaggagggtttctttggggccagctatgttgtagctagccttttagcattttggattttgaaatgtcttgaaggcagaaggagaatatatcatctatgaacagtatttatggagtagctgaaatgctaccatatcataggcagctaaaatctgtttatccatttgggaaggtggcttttcaggtagttatttggctgctcacctggaagaactcacagttcatttttagagattggtttttaaactttggtgttaggacccttttatattttaaaatttgttgagaacccgaaaatgctttgtttatgtagttataattaccagtatttactgtattataaatgaaaaattagaaattaaaaaaattacatattaaaaaatgataaactcattacatgttaacatacataaaagttttaagaaaataaactatttttcaatgcaaaaaagaaattggtgaggagagtggcattgttttacctttccacacatctttttaatgtttggcttaatattgctgttatatctgtttctgcactttagttttttgtgatattgtacatcatatagtgtttggaaaattacaccttaaactcaagagaatgagggtaaaacatcaaataatgtcttagtagtatttggtgacttaaatagttttgacctattgaaccctcaagagtccctggaccatactttgtgaattactgttttaattgatggactaataaatgctatcagattcctattttgtcaagatgctgtagtcacactttaaattatgaggctcattatcataatcattctgatccaaacaagttttctcccttacccttagactctcacacctacctaccctctcctaaatacatactatttatattttgaaaatttttactgctcttttaactgcgatgtttagagagtccttacattctggcctgatctctaaatctgctgtaatgctatttctgtgtctatgctggaaaaaaaaaatcattgatagtagtatttctgtgtttattgtggaaaaaaaagtgaatgattacctagttcaagatattctctaactgaatgttgtgggtgttactagtgaattttgctttcttgtctgataaatgttcaaagaaacccttttgaagattcatgattagacagctgctatggcatagcactttaaaccatgcctcctgtaccctaccgcttctctagtgtttcattgtggttataccagtggtatctattttgctataatgcattatatcatcttttagtcataaaaataaaatatacttaaagta

SEQ ID NO: 156331 - DNA, 868 bp, Homo sapiens
  Payload ID: 10665
  Gene Symbol: MYEF2
  Gene Name: myelin expression factor 2
  ENST ID: ENST00000558395
  CDS Start-End: 1-868
tgaagtcatcagtaatttgcaggccggtagacttggttccacaatttttgttgccaatcttgacttcaaagttggttggaagaagctaaaggaagtgttcagcatagctggaactgtgaagcgggcagatattaaagaagacaaagatggcaagagcagaggaatgggcactgtcacttttgagcaagcaattgaagcagttcaagcaatttctatgttcaatgggcagtttttatttgatagacctatgcatgtgaaaatggatgacaagtctgttcctcatgaagagtaccgttcacatgatggtaaaacaccacaattaccacgtggtcttggaggcattgggatgggacttggtccgggtggacagcctattagtgccagccagttgaacataggtggagtaatgggaaatttaggtccaggtggaatagggtttggtggtctggaagcaatgaatagcatgggaggatttggaggagttggccgaatgggagagctgtaccgtggtgcgatgactagtagcatggagcgagattttggacgtggtgatattggaataaatcgaggctttggagattcctttggtagacttggtggtggaatgggtagcatgaacagtgtgactggaggaatggggatgggactggaccggatgagttccagctttgatagaatgggaccaggtataggagctatactggaaaggagcatcgatatggatcgaggatttttatcgggtccaatgggaagcggaatgagagagagaataggctccaaaggcaaccagatatttgtcagaaatctaccttttgacttgacttggcagaaactaaaagagaaattcagtcagtgtggtcatgtaatg

SEQ ID NO: 156332 - DNA, 1966 bp, Homo sapiens
  Payload ID: 10665
  Gene Symbol: MYEF2
  Gene Name: myelin expression factor 2
  ENST ID: ENST00000616409
  CDS Start-End: 67-1710
gagccgcaccccgcggaggcggagaagcagcagccgcagcacagcagcagctccaatggcgttaaaatggagaatgatgaatcagcaaaagaagagaaatctgacttaaaggaaaaatctacaggaagtaagaaggccaatagatttcatccttattcaaaagacaagaattcgggcgctggagaaaagaagggtccaaatcgtaacagagttttcattagcaacatcccatatgacatgaaatggcaagctattaaagatctaatgagagagaaagttggtgaggttacatacgtggagctctttaaggatgcggaaggaaaatcaagggtaagtggtgtggttgaattcaaagatgaagaatttgtaaagaaagccctagaaactatgaacaaatatgatcttagtggaagaccccttaatattaaagaggatcctgatggagaaaatgctcgtagggcattgcagcgaacaggaggatcatttccaggaggacacgtccctgatatgggatcagggttgatgaatttaccaccttccatactcaataatccaaacattcctcctgaagtcatcagtaatttgcaggccggtagacttggttccacaatttttgttgccaatcttgacttcaaagttggttggaagaagctaaaggaagtgttcagcatagctggaactgtgaagcgggcagatattaaagaagacaaagatggcaagagcagaggaatgggcactgtcacttttgagcaagcaattgaagcagttcaagcaatttctatgttcaatgggcagtttttatttgatagacctatgcatgtgaaaatggatgacaagtctgttcctcatgaagagtaccgttcacatgatggtaaaacaccacaattaccacgtggtcttggaggcattgggatgggacttggtccgggtggacagcctattagtgccagccagttgaacataggtggagtaatgggaaatttaggtccaggtggtatgggaatggatggtccaggttttggaggaatgaatagaattggaggaggaatagggtttggtggtctggaagcaatgaatagcatgggaggatttggaggagttggccgaatgggagagctgtaccgtggtgcgatgactagtagcatggagcgagattttggacgtggtgatattggaataaatcgaggctttggagattcctttggtagacttggcagtgcaatgattggagggtttgcaggaagaataggatcttctaacatgggtccagtaggatctggaataagtggtggaatgggtagcatgaacagtgtgactggaggaatggggatgggactggaccggatgagttccagctttgatagaatgggaccaggtataggagctatactggaaaggagcatcgatatggatcgaggatttttatcgggtccaatgggaagcggaatgagagagagaataggctccaaaggcaaccagatatttgtcagaaatctaccttttgacttgacttggcagaaactaaaagagaaattcagtcagtgtggtcatgtaatgtttgcagaaataaaaatggagaatggaaagtcaaaaggctgtggaacagtcagatttgactccccagaatcagctgaaaaagcctgcagaataatgaatggcataaaaatcagtggcagagaaattgatgttcgcttggatcgtaatgcataatttcaagccatggttggaacattcctacatctgttttgctgaatctcctagtaaaagtcatttttttaaagtaatattgtatgcttacaaaagctgtaaaaatgaacttttaaaactcccaccagcttttaacagtataatgttaaaaatatactgtaatttttgttaatctcaagtttgggtttttaaagacagcaagtctggtcattcagtttaaatgaatggttatactgtttttaatgaaataagccatttt

SEQ ID NO: 156333 - DNA, 2591 bp, Homo sapiens
  Payload ID: 10665
  Gene Symbol: MYEF2
  Gene Name: myelin expression factor 2
  ENST ID: ENST00000610570
  CDS Start-End: 80-460
accgcttccccggcagccgccattgtcgcgctcggagcccctcagctcaggcggccgaggcggaggcagcggcggcgggatggcggacgccaacaaggccgaggtgcccggggccactggtggcgacagcccgcacctgcagcccgcagagccgccgggcgagccgcggcgagagccgcaccccgcggaggcggagaagcagcagccgcagcacagcagcagctccaatggcgttaaaatggagaatgatgaatcagcaaaagaagagaaatctgacttaaaggaaaaatctacaggaagtaagaaggccaatagatttcatccttattcaaaagacaagaattcgggcgctggagaaaagaagggtccaaatcgtaacagagttttcattagcaacatcccatatgacatgaaatggcaagctattaaagatctaatgagagagaaagggtgtggttgaattcaaagatgaagaatttgtaaagaaagccctagaaactatgaacaaatatgatcttagtggaagaccccttaatattaaagaggatcctgatggagaaaatgctcgtagggcattgcagcgaacaggaggatcatttccaggaggacacgtccctgatatgggatcagggttgatgaatttaccaccttccatactcaataatccaaacattcctcctgaagtcatcagtaatttgcaggccggtagacttggttccacaatttttgttgccaatcttgacttcaaagttggttggaagaagctaaaggaagtgttcagcatagctggaactgtgaagcgggcagatattaaagaagacaaagatggcaagagcagaggaatgggcactgtcacttttgagcaagcaattgaagcagttcaagcaatttctatgttcaatgggcagtttttatttgatagacctatgcatgtgaaaatggatgacaagtctgttcctcatgaagagtaccgttcacatgatggtaaaacaccacaattaccacgtggtcttggaggcattgggatgggacttggtccgggtggacagcctattagtgccagccagttgaacataggtggagtaatgggaaatttaggtccaggtggtgagtattctaacttcctcttttctttttaaatgatacatatgctagctaataaagcctccattgatgtggtctgtaataatgtttaaaggactctaattaatagttagatatttacggtgtcacttcattctgaaaaaggaatgaaaccttgagcacagctaacatgaaagagataggcagaagtcaggagggtttctttggggccagctatgttgtagctagccttttagcattttggattttgaaatgtcttgaaggcagaaggagaatatatcatctatgaacagtatttatggagtagctgaaatgctaccatatcataggcagctaaaatctgtttatccatttgggaaggtggcttttcaggtagttatttggctgctcacctggaagaactcacagttcatttttagagattggtttttaaactttggtgttaggacccttttatattttaaaatttgttgagaacccgaaaatgctttgtttatgtagttataattaccagtatttactgtattataaatgaaaaattagaaattaaaaaaattacatattaaaaaatgataaactcattacatgttaacatacataaaagttttaagaaaataaactatttttcaatgcaaaaaagaaattggtgaggagagtggcattgttttacctttccacacatctttttaatgtttggcttaatattgctgttatatctgtttctgcactttagttttttgtgatattgtacatcatatagtgtttggaaaattacaccttaaactcaagagaatgagggtaaaacatcaaataatgtcttagtagtatttggtgacttaaatagttttgacctattgaaccctcaagagtccctggaccatactttgtgaattactgttttaattgatggactaataaatgctatcagattcctattttgtcaagatgctgtagtcacactttaaattatgaggctcattatcataatcattctgatccaaacaagttttctcccttacccttagactctcacacctacctaccctctcctaaatacatactatttatattttgaaaatttttactgctcttttaactgcgatgtttagagagtccttacattctggcctgatctctaaatctgctgtaatgctatttctgtgtctatgctggaaaaaaaaaatcattgatagtagtatttctgtgtttattgtggaaaaaaaagtgaatgattacctagttcaagatattctctaactgaatgttgtgggtgttactagtgaattttgctttcttgtctgataaatgttcaaagaaacccttttgaagattcatgattagacagctgctatggcatagcactttaaaccatgcctcctgtaccctaccgcttctctagtgtttcattgtggttataccagtggtatctattttgctataatgcattatatcatcttttagtcataaaaataaaatatacttaaagt

SEQ ID NO: 156334 - DNA, 1742 bp, Homo sapiens
  Payload ID: 10665
  Gene Symbol: MYEF2
  Gene Name: myelin expression factor 2
  ENST ID: ENST00000620867
  CDS Start-End: 5-640
gggaatggatggtccaggttttggaggaatgaatagaattggaggaggaatagggtttggtggtctggaagcaatgaatagcatgggaggatttggaggagttggccgaatgggagagctgtaccgtggtgcgatgactagtagcatggagcgagattttggacgtggtgatattggaataaatcgaggctttggagattcctttggtagacttggtggtggaatgggtagcatgaacagtgtgactggaggaatggggatgggactggaccggatgagttccagctttgatagaatgggaccaggtataggagctatactggaaaggagcatcgatatggatcgaggatttttatcgggtccaatgggaagcggaatgagagagagaataggctccaaaggcaaccagatatttgtcagaaatctaccttttgacttgacttggcagaaactaaaagagaaattcagtcagtgtggtcatgtaatgtttgcagaaataaaaatggagaatggaaagtcaaaaggctgtggaacagtcagatttgactccccagaatcagctgaaaaagcctgcagaataatgaatggcataaaaatcagtggcagagaaattgatgttcgcttggatcgtaatgcataatttcaagccatggttggaacattcctacatctgttttgctgaatctcctagtaaaagtcatttttttaaagtaatattgtatgcttacaaaagctgtaaaaatgaacttttaaaactcccaccagcttttaacagtataatgttaaaaatatactgtaatttttgttaatctcaagtttgggtttttaaagacagcaagtctggtcattcagtttaaatgaatggttatactgtttttaatgaaataagccattttcttgttgttttcagtactacatagttggatttgtttgttctagtttctccagtttttgtcaacttattgtatggtaaaacatagattttttccccccaaacttctgttttataatatgtaatttttcatgaaaagaaagggctcagaaaaattaggatgtgattttggttggttttaaattactgtaagttttagattctaaggttcaagatttttaaaatttgatttaaatgaagaaatggatttttctctctgcccctccctgccattcatattttctgcataacactattaataatatcaacctccacagccccttattttattatttccaataattccaagttcatatagaactgataatgtagcaagccccaagtatgataataggcagactattcccaactttctgtctagtttccagccattgaagtgaactgctaaaaaaagaaaaataattgaaatgttgagagagatggttatgtaagttagtcctctgctgtttacttctgcaggagctgatccatttataaatgcagttttaataaaccatggaataccaaggcacaacatatcaaacacattggatcccacgatgttagacatagccatatctcctttccctacaaaagaaaagcatactgttaaaatgtgcttaccaatactgtgttttattaataatcttcataagaaaagaaacactggatacttttttgttgttgattcgttttgaaaaattgttgttagagcaaaagtcttactgaatttgtatttttaaatttttcttgggttagtatttaaagtcttaacatttatttaataattatatttattaaaccatttttc

SEQ ID NO: 156335 - DNA, 2503 bp, Homo sapiens
  Payload ID: 10666
  Gene Symbol: MOG
  Gene Name: myelin oligodendrocyte glycoprotein
  Uniprot ID: Q16653
  ENST ID: ENST00000259891
  CDS Start-End: 119-1006
agcactgccctccaagatcttcccttgggcttttcagcagtaaggggacatgcaccccaagggcctccacttggcctgaccttgctgcgggggctctctgtccccaggaacagtagagatggcaagcttatcgagaccctctctgcccagctgcctctgctccttcctcctcctcctcctcctccaagtgtcttccagctatgcagggcagttcagagtgataggaccaagacaccctatccgggctctggtcggggatgaagtggaattgccatgtcgcatatctcctgggaagaacgctacaggcatggaggtggggtggtaccgcccccccttctctagggtggttcatctctacagaaatggcaaggaccaagatggagaccaggcacctgaatatcggggccggacagagctgctgaaagatgctattggtgagggaaaggtgactctcaggatccggaatgtaaggttctcagatgaaggaggtttcacctgcttcttccgagatcattcttaccaagaggaggcagcaatggaattgaaagtagaagatcctttctactgggtgagccctggagtgctggttctcctcgcggtgctgcctgtgctcctcctgcagatcactgttggcctcgtcttcctctgcctgcagtacagactgagaggaaaacttcgagcagagatagagaatctccaccggacttttgatccccactttctgagggtgccctgctggaagataaccctgtttgtaattgtgccggttcttggacccttggttgccttgatcatctgctacaactggctacatcgaagactagcagggcaattccttgaagagctacgtaagttctcttctctctgttataagcagagaataaaaagccaggaaagggagacagaagcaacaagaggaagaggcgggctattgagggatcacattcccagaggaaaggaggagctggagagcctgggtggagggaagactcctcctgggaggtagagggcaaagaagccagctgttagagacacatttacaggtggcagagaagctggaggcactcctatctgccacctgatccattcctccttcactgcccctaagcaggaatccaaccctagctggtctcattgcccattccacagcaactgcccagtgcctcacctctcagatcaaccattgaggcaggaatggagacaagatgaccccaagggcttttcttctccctagttcaatggttttatgatacaaactactgacatacgtttttcaagttattttctccttcttctaggaaatcccttctgagtgatgtcacatcttggcaggggtggaggagagcctggttgcccagggatttgtccttggggacatctcatccatcaagttgcacactcactggcatctttgctatggggacattccaatttgcactttcaggaacactctgaattccaagtagaattgatttcccttcttctgtcatctaccttttctcttcattttcccatttttattacccttctttccatttctctctccagtcttccacctggaagccctctctggctaaggacaggcaggtgcccctctctccatcagaggacacctgtactggagagcaacacaggatggtctctgccatgaactggaggccaggaatctcctcactgaaaattacagtatggtaactttgcaaatggtggttgtttcttccaagactccagccctgattgcgcaaaactgaaaggcatgtgaagggaaggaagaggaagagtgcaaaacattgaagagagagctgagtgagctgaagagtgaggatatgagtagccccaacccaaacctggagatggggagaaacctacagaatactagccagagctcctccttgtcttggcagcctactagggacctggggaagcaaaaacgaaagctgggcaacatgcctgctttagaatgttttccttctacttacacatcttccacaggtctcagaatctttccttcctctcatccttttctcctatcttcatatctatcagagtatccactgtttattcaacaactactacttgatggtcagacacaaacaaacaagctaggtgctaattaataaagatatgagttttggccgggtgcggtggctcacgcctgtaatcccagcactttgggaggccgaggcgggcgaatcacgaggtcaggagttcgagaccagcctggccaacatggtgaaaccccatctctactaaaaatacaaacaattaactgagcatagtggtgggcacctataataccagctactccggaggctgaggcaggagaatcgcttgaacccaggaggcagaggttgcagtgagctgagatcgcgccactgcactctagccagagtgacagagtaagactctgtctcaaaaataaataaataaataaataaataaataaataaataaataaataaataaaaaataataatacaagttttcataagcacacttctaa

SEQ ID NO: 156336 - DNA, 1568 bp, Homo sapiens
  Payload ID: 10666
  Gene Symbol: MOG
  Gene Name: myelin oligodendrocyte glycoprotein
  Uniprot ID: Q16653
  ENST ID: ENST00000359539
  CDS Start-End: 1-642
atggcaagcttatcgagaccctctctgcccagctgcctctgctccttcctcctcctcctcctcctccaagtgtcttccagctatgcagggcagttcagagtgataggaccaagacaccctatccgggctctggtcggggatgaagtggaattgccatgtcgcatatctcctgggaagaacgctacaggcatggaggtggggtggtaccgcccccccttctctagggtggttcatctctacagaaatggcaaggaccaagatggagaccaggcacctgaatatcggggccggacagagctgctgaaagatgctattggtgagggaaaggtgactctcaggatccggaatgtaaggttctcagatgaaggaggtttcacctgcttcttccgagatcattcttaccaagaggaggcagcaatggaattgaaagtagaagatcctttctactgggtgagccctggagtgctggttctcctcgcggtgctgcctgtgctcctcctgcagatcactgttggcctcgtcttcctctgcctgcagtacagactgagaggaaaacttcgagcagagatagagaatctccaccggacttttgggcaattccttgaagagctactcttccacctggaagccctctctggctaaggacaggcaggtgcccctctctccatcagaggacacctgtactggagagcaacacaggatggtctctgccatgaactggaggccaggaatctcctcactgaaaattacagtatggtaactttgcaaatggtggttgtttcttccaagactccagccctgattgcgcaaaactgaaaggcatgtgaagggaaggaagaggaagagtgcaaaacattgaagagagagctgagtgagctgaagagtgaggatatgagtagccccaacccaaacctggagatggggagaaacctacagaatactagccagagctcctccttgtcttggcagcctactagggacctggggaagcaaaaacgaaagctgggcaacatgcctgctttagaatgttttccttctacttacacatcttccacaggtctcagaatctttccttcctctcatccttttctcctatcttcatatctatcagagtatccactgtttattcaacaactactacttgatggtcagacacaaacaaacaagctaggtgctaattaataaagatatgagttttggccgggtgcggtggctcacgcctgtaatcccagcactttgggaggccgaggcgggcgaatcacgaggtcaggagttcgagaccagcctggccaacatggtgaaaccccatctctactaaaaatacaaacaattaactgagcatagtggtgggcacctataataccagctactccggaggctgaggcaggagaatcgcttgaacccaggaggcagaggttgcagtgagctgagatcgcgccactgcactctagccagagtgacagagtaagactctgtctcaaaaataaataaataaataaataaataaataaataaataaataaataaataaaaaataataatacaagttttcataagcacacttctaa

SEQ ID NO: 156337 - DNA, 1529 bp, Homo sapiens
  Payload ID: 10666
  Gene Symbol: MOG
  Gene Name: myelin oligodendrocyte glycoprotein
  Uniprot ID: Q16653
  ENST ID: ENST00000376888
  CDS Start-End: 208-603
cttttgtgtgagtgcctggcaagggtgacgtggggctgtttctgcgggcacagctgcagcaattaccggagtggaggcagggcccaggcagcactgccctccaagatcttcccttgggcttttcagcagtaaggggacatgcaccccaagggcctccacttggcctgaccttgctgcgggggctctctgtccccaggaacagtagagatggcaagcttatcaagaccctctctgcccagctgcctctgctccttcctcctcctcctcctcctccaagtgtcttccagctatgcagatcctttctactgggtgagccctggagtgctggttctcctcgcggtgctgcctgtgctcctcctgcagatcactgttggcctcatcttcctctgcctgcagtacagactgagaggaaaacttcgagcagagatagagaatctccaccggacttttgatccccactttctgagggtgccctgctggaagataaccctgtttgtaattgtgccggttcttggacccttggttgccttgatcatctgctacaactggctacatcgaagactagcagggcaattccttgaagagctacgaaatcccttctgagtgatgtcacatcttggcaggggtggaggagagcctggttgcccagggatttgtccttggggacatctcatccatcaagttgcacactcactggcatctttgctatggggacattccaatttgcactttcaggaacactctgaattccaagtagaattgatttcccttcttctgtcatctaccttttctcttcattttcccatttttattacccttctttccatttctctctccagtcttccacctggaagccctctctggctaaggacaggcaggtgcccctctctccatcagaggacacctgtactggagagcaacacaggatggtctctgccatgaactggaggccaggaatctcctcactgaaaattacagtatggtaactttgcaaatggtggttgtttcttccaagactccagccctgattgcgcaaaactgaaaggcatgtgaagggaaggaagaggaagagtgcaaaacattgaagagagagctgagtgagctgaagagtgaggatatgagtagccccaacccaaacctggagatggggagaaacctacagaatactagccagagctcctccttgtcttggcagcctactagggacctggggaagcaaaaacgaaagctgggcaacatgcctgctttagaatgttttccttctacttacacatcttccacaggtctcagaatctttccttcctctcatccttttctcctatcttcatatctatcagagtatccactgtttattcaacaactactacttgatggtcagacacaaacaaacaagctaggtgctaattaataaagatacgagttttggccgggtgcggtggctcacgcctgtaatcccagcactttgggaggccgaggcgggcgaatcacgaggtcaggagttcaagaccagcctggccaacatggtgaaa

SEQ ID NO: 156338 - DNA, 1981 bp, Homo sapiens
  Payload ID: 10666
  Gene Symbol: MOG
  Gene Name: myelin oligodendrocyte glycoprotein
  ENST ID: ENST00000376889
  CDS Start-End: 1-428
ggcagttcagagtgataggaccaagacaccctatccgggctctggtcggggatgaagtggaattgccatgtcgcatatctcctgggaagaacgctacaggcatggaggtggggtggtaccgcccccccttctctagggtggttcatctctacagaaatggcaaggaccaagatggagaccaggcacctgaatatcggggccggacagagctgctgaaagatgctattggtgagggaaaggtgactctcaggatccggaatgtaaggttctcagatgaaggaggtttcacctgcttcttccgagatcattcttaccaagaggaggcagcaatggaattgaaagtagaagtgtctcactctgtcacccaggattggttgcagtggcacgatcatggctcattgcagcctccacctcccaggctcaagtgatcctcctgactcagcctcttgaatagctgagaccacaggcttgtgtcaccatgcccagatcctttctactgggtgagccctggagtgctggttctcctcgcggtgctgcctgtgctcctcctgcagatcactgttggcctcatcttcctctgcctgcagtacagactgagaggaaaacttcgagcagagatagagaatctccaccggacttttgatccccactttctgagggtgccctgctggaagataaccctgtttgtaattgtgccggttcttggacccttggttgccttgatcatctgctacaactggctacatcgaagactagcagggcaattccttgaagagctacgaaatcccttctgagtgatgtcacatcttggcaggggtggaggagagcctggttgcccagggatttgtccttggggacatctcatccatcaagttgcacactcactggcatctttgctatggggacattccaatttgcactttcaggaacactctgaattccaagtagaattgatttcccttcttctgtcatctaccttttctcttcattttcccatttttattacccttctttccatttctctctccagtcttccacctggaagccctctctggctaaggacaggcaggtgcccctctctccatcagaggacacctgtactggagagcaacacaggatggtctctgccatgaactggaggccaggaatctcctcactgaaaattacagtatggtaactttgcaaatggtggttgtttcttccaagactccagccctgattgcgcaaaactgaaaggcatgtgaagggaaggaagaggaagagtgcaaaacattgaagagagagctgagtgagctgaagagtgaggatatgagtagccccaacccaaacctggagatggggagaaacctacagaatactagccagagctcctccttgtcttggcagcctactagggacctggggaagcaaaaacgaaagctgggcaacatgcctgctttagaatgttttccttctacttacacatcttccacaggtctcagaatctttccttcctctcatccttttctcctatcttcatatctatcagagtatccactgtttattcaacaactactacttgatggtcagacacaaacaaacaagctaggtgctaattaataaagatacgagttttggccgggtgcggtggctcacgcctgtaatcccagcactttgggaggccgaggcgggcgaatcacgaggtcaggagttcaagaccagcctggccaacatggtgaaaccccatctctactaaaaatacaaacaattaactgagcatagtggtgggcacctataataccagctactccggaggctgaggcaggagaatcgcttgaacccaggaggcagaggttgcagtgagctgagatcgtgccactgcactctagccggagtgacagagtaagactctgtctcaaaaataaataaataaataaataaataaataaataaataaataaataaaaaataataatacaagttttcataagcacacttctaa

SEQ ID NO: 156339 - DNA, 889 bp, Homo sapiens
  Payload ID: 10666
  Gene Symbol: MOG
  Gene Name: myelin oligodendrocyte glycoprotein
  Uniprot ID: Q16653
  ENST ID: ENST00000376891
  CDS Start-End: 1-621
atggcaagcttatcaagaccctctctgcccagctgcctctgctccttcctcctcctcctcctcctccaagtgtcttccagctatgcagggcagttcagagtgataggaccaagacaccctatccgggctctggtcggggatgaagtggaattgccatgtcgcatatctcctgggaagaacgctacaggcatggaggtggggtggtaccgcccccccttctctagggtggttcatctctacagaaatggcaaggaccaagatggagaccaggcacctgaatatcggggccggacagagctgctgaaagatgctattggtgagggaaaggtgactctcaggatccggaatgtaaggttctcagatgaaggaggtttcacctgcttcttccgagatcattcttaccaagaggaggcagcaatggaattgaaagtagaagatcctttctactgggtgagccctggagtgctggttctcctcgcggtgctgcctgtgctcctcctgcagatcactgttggcctcatcttcctctgcctgcagtacagactgagaggaaaacttcgagcagagatagagaatctccaccggacttttgtcttccacctggaagccctctctggctaaggacaggcaggtgcccctctctccatcagaggacacctgtactggagagcaacacaggatggtctctgccatgaactggaggccaggaatctcctcactgaaaattacagtatggtaactttgcaaatggtggttgtttcttccaagactccagccctgattgcgcaaaactgaaaggcatgtgaagggaaggaagaggaagagtgcaaaacattgaagagagagctgagtgagctgaagagtgaggatatgagtagccccaacccaa

SEQ ID NO: 156340 - DNA, 2499 bp, Homo sapiens
  Payload ID: 10666
  Gene Symbol: MOG
  Gene Name: myelin oligodendrocyte glycoprotein
  Uniprot ID: Q16653
  ENST ID: ENST00000376894
  CDS Start-End: 119-1006
agcactgccctccaagatcttcccttgggcttttcagcagtaaggggacatgcaccccaagggcctccacttggcctgaccttgctgcgggggctctctgtccccaggaacagtagagatggcaagcttatcaagaccctctctgcccagctgcctctgctccttcctcctcctcctcctcctccaagtgtcttccagctatgcagggcagttcagagtgataggaccaagacaccctatccgggctctggtcggggatgaagtggaattgccatgtcgcatatctcctgggaagaacgctacaggcatggaggtggggtggtaccgcccccccttctctagggtggttcatctctacagaaatggcaaggaccaagatggagaccaggcacctgaatatcggggccggacagagctgctgaaagatgctattggtgagggaaaggtgactctcaggatccggaatgtaaggttctcagatgaaggaggtttcacctgcttcttccgagatcattcttaccaagaggaggcagcaatggaattgaaagtagaagatcctttctactgggtgagccctggagtgctggttctcctcgcggtgctgcctgtgctcctcctgcagatcactgttggcctcatcttcctctgcctgcagtacagactgagaggaaaacttcgagcagagatagagaatctccaccggacttttgatccccactttctgagggtgccctgctggaagataaccctgtttgtaattgtgccggttcttggacccttggttgccttgatcatctgctacaactggctacatcgaagactagcagggcaattccttgaagagctacgtaagttctcttctctctgttataagcagagaataaaaagccaggaaagggagacagaagcaacaagaggaagaggcgggctattgagggatcacattcccagaggaaaggaggagctggagagcctgggtggagggaagactcctcctgggaggtagagggcaaagaagccagctgttagagacacatttacaggtggcagagaagctggaggcactcctatctgccacctgatccattcctccttcactgcccctaagcaggaatccaaccctagctggtctcattgcccattccacagcaactgcccagtgcctcacctctcagatcaaccattgaggcaggaatggagacaagatgaccccaagggcttttcttctccctagttcaatggttttatgatacaaactactgacatacgtttttcaagttattttctccttcttctaggaaatcccttctgagtgatgtcacatcttggcaggggtggaggagagcctggttgcccagggatttgtccttggggacatctcatccatcaagttgcacactcactggcatctttgctatggggacattccaatttgcactttcaggaacactctgaattccaagtagaattgatttcccttcttctgtcatctaccttttctcttcattttcccatttttattacccttctttccatttctctctccagtcttccacctggaagccctctctggctaaggacaggcaggtgcccctctctccatcagaggacacctgtactggagagcaacacaggatggtctctgccatgaactggaggccaggaatctcctcactgaaaattacagtatggtaactttgcaaatggtggttgtttcttccaagactccagccctgattgcgcaaaactgaaaggcatgtgaagggaaggaagaggaagagtgcaaaacattgaagagagagctgagtgagctgaagagtgaggatatgagtagccccaacccaaacctggagatggggagaaacctacagaatactagccagagctcctccttgtcttggcagcctactagggacctggggaagcaaaaacgaaagctgggcaacatgcctgctttagaatgttttccttctacttacacatcttccacaggtctcagaatctttccttcctctcatccttttctcctatcttcatatctatcagagtatccactgtttattcaacaactactacttgatggtcagacacaaacaaacaagctaggtgctaattaataaagatacgagttttggccgggtgcggtggctcacgcctgtaatcccagcactttgggaggccgaggcgggcgaatcacgaggtcaggagttcaagaccagcctggccaacatggtgaaaccccatctctactaaaaatacaaacaattaactgagcatagtggtgggcacctataataccagctactccggaggctgaggcaggagaatcgcttgaacccaggaggcagaggttgcagtgagctgagatcgtgccactgcactctagccggagtgacagagtaagactctgtctcaaaaataaataaataaataaataaataaataaataaataaataaataaaaaataataatacaagttttcataagcacacttctaa

SEQ ID NO: 156341 - DNA, 1027 bp, Homo sapiens
  Payload ID: 10666
  Gene Symbol: MOG
  Gene Name: myelin oligodendrocyte glycoprotein
  Uniprot ID: Q16653
  ENST ID: ENST00000376898
  CDS Start-End: 1-759
atggcaagcttatcaagaccctctctgcccagctgcctctgctccttcctcctcctcctcctcctccaagtgtcttccagctatgcagggcagttcagagtgataggaccaagacaccctatccgggctctggtcggggatgaagtggaattgccatgtcgcatatctcctgggaagaacgctacaggcatggaggtggggtggtaccgcccccccttctctagggtggttcatctctacagaaatggcaaggaccaagatggagaccaggcacctgaatatcggggccggacagagctgctgaaagatgctattggtgagggaaaggtgactctcaggatccggaatgtaaggttctcagatgaaggaggtttcacctgcttcttccgagatcattcttaccaagaggaggcagcaatggaattgaaagtagaagatcctttctactgggtgagccctggagtgctggttctcctcgcggtgctgcctgtgctcctcctgcagatcactgttggcctcatcttcctctgcctgcagtacagactgagaggaaaacttcgagcagagatagagaatctccaccggacttttgatccccactttctgagggtgccctgctggaagataaccctgtttgtaattgtgccggttcttggacccttggttgccttgatcatctgctacaactggctacatcgaagactagcagggcaattccttgaagagctactcttccacctggaagccctctctggctaaggacaggcaggtgcccctctctccatcagaggacacctgtactggagagcaacacaggatggtctctgccatgaactggaggccaggaatctcctcactgaaaattacagtatggtaactttgcaaatggtggttgtttcttccaagactccagccctgattgcgcaaaactgaaaggcatgtgaagggaaggaagaggaagagtgcaaaacattgaagagagagctgagtgagctgaagagtgaggatatgagtagccccaacccaa

SEQ ID NO: 156342 - DNA, 748 bp, Homo sapiens
  Payload ID: 10666
  Gene Symbol: MOG
  Gene Name: myelin oligodendrocyte glycoprotein
  ENST ID: ENST00000376903
  CDS Start-End: 209-346
ccttttgtgtgagtgcctggcaagggtgacgtggggctgtttctgcgggcacagctgcagcaattaccggagtggaggcagggcccaggcagcactgccctccaagatcttcccttgggcttttcagcagtaaggggacatgcaccccaagggcctccacttggcctgaccttgctgcgggggctctctgtccccaggaacagtagagatggcaagcttatcaagaccctctctgcccagctgcctctgctccttcctcctcctcctcctcctccaagtgtcttccagctatgcagttcagagtgataggaccaagacaccctatccgggctctggtcggggatgaagtggaattgccatgtcgcatatctcctgggaagaacgctacaggcatggaggtggggtggtaccgcccccccttctctagggtggttcatctctacagaaatggcaaggaccaagatggagaccaggcacctgaatatcggggccggacagagctgctgaaagatgctattggtgagggaaaggtgactctcaggatccggaatgtaaggttctcagatgaaggaggtttcacctgcttcttccgagatcattcttaccaagaggaggcagcaatggaattgaaagtagaagatcctttctactgggtgagccctggagtgctggttctcctcgcggtgctgcctgtgctcctcctgcagatcactgttggcctcatcttcctctgcctgcagtacagact

SEQ ID NO: 156343 - DNA, 2160 bp, Homo sapiens
  Payload ID: 10666
  Gene Symbol: MOG
  Gene Name: myelin oligodendrocyte glycoprotein
  Uniprot ID: Q16653
  ENST ID: ENST00000376917
  CDS Start-End: 230-973
gtcatcccctcagtctgtagcccttttgtgtgagtgcctggcaagggtgacgtggggctgtttctgcgggcacagctgcagcaattaccggagtggaggcagggcccaggcagcactgccctccaagatcttcccttgggcttttcagcagtaaggggacatgcaccccaagggcctccacttggcctgaccttgctgcgggggctctctgtccccaggaacagtagagatggcaagcttatcaagaccctctctgcccagctgcctctgctccttcctcctcctcctcctcctccaagtgtcttccagctatgcagggcagttcagagtgataggaccaagacaccctatccgggctctggtcggggatgaagtggaattgccatgtcgcatatctcctgggaagaacgctacaggcatggaggtggggtggtaccgcccccccttctctagggtggttcatctctacagaaatggcaaggaccaagatggagaccaggcacctgaatatcggggccggacagagctgctgaaagatgctattggtgagggaaaggtgactctcaggatccggaatgtaaggttctcagatgaaggaggtttcacctgcttcttccgagatcattcttaccaagaggaggcagcaatggaattgaaagtagaagatcctttctactgggtgagccctggagtgctggttctcctcgcggtgctgcctgtgctcctcctgcagatcactgttggcctcatcttcctctgcctgcagtacagactgagaggaaaacttcgagcagagatagagaatctccaccggacttttgatccccactttctgagggtgccctgctggaagataaccctgtttgtaattgtgccggttcttggacccttggttgccttgatcatctgctacaactggctacatcgaagactagcagggcaattccttgaagagctacgaaatcccttctgagtgatgtcacatcttggcaggggtggaggagagcctggttgcccagggatttgtccttggggacatctcatccatcaagttgcacactcactggcatctttgctatggggacattccaatttgcactttcaggaacactctgaattccaagtagaattgatttcccttcttctgtcatctaccttttctcttcattttcccatttttattacccttctttccatttctctctccagtcttccacctggaagccctctctggctaaggacaggcaggtgcccctctctccatcagaggacacctgtactggagagcaacacaggatggtctctgccatgaactggaggccaggaatctcctcactgaaaattacagtatggtaactttgcaaatggtggttgtttcttccaagactccagccctgattgcgcaaaactgaaaggcatgtgaagggaaggaagaggaagagtgcaaaacattgaagagagagctgagtgagctgaagagtgaggatatgagtagccccaacccaaacctggagatggggagaaacctacagaatactagccagagctcctccttgtcttggcagcctactagggacctggggaagcaaaaacgaaagctgggcaacatgcctgctttagaatgttttccttctacttacacatcttccacaggtctcagaatctttccttcctctcatccttttctcctatcttcatatctatcagagtatccactgtttattcaacaactactacttgatggtcagacacaaacaaacaagctaggtgctaattaataaagatacgagttttggccgggtgcggtggctcacgcctgtaatcccagcactttgggaggccgaggcgggcgaatcacgaggtcaggagttcaagaccagcctggccaacatggtgaaaccccatctctactaaaaatacaaacaattaactgagcatagtggtgggcacctataataccagctactccggaggctgaggcaggagaatcgcttgaacccaggaggcagaggttgcagtgagctgagatcgtgccactgcactctagccggagtgacagagtaagactctgtctcaaaaataaataaataaataaataaataaataaataaataaataaataaaaaataataatacaagttttcataagcacacttctaa

SEQ ID NO: 156344 - DNA, 1591 bp, Homo sapiens
  Payload ID: 10666
  Gene Symbol: MOG
  Gene Name: myelin oligodendrocyte glycoprotein
  Uniprot ID: Q16653
  ENST ID: ENST00000383521
  CDS Start-End: 1-396
atggcaagcttatcgagaccctctctgcccagctgcctctgctccttcctcctcctcctcctcctccaagtgtcttccagctatgcagatcctttctactgggtgagccctggagtgctggttctcctcgcggtgctgcctgtgctcctcctgcagatcactgttggcctcgtcttcctctgcctgcagtacagactgagaggaaaacttcgagcagagatagagaatctccaccggacttttgatccccactttctgagggtgccctgctggaagataaccctgtttgtaattgtgccggttcttggacccttggttgccttgatcatctgctacaactggctacatcgaagactagcagggcaattccttgaagagctacgaaatcccttctgagtgatgtcacatcttggcaggggtggaggagagcctggttgcccagggatttgtccttggggacatctcatccatcaagttgcacactcactggcatctttgctatggggacattccaatttgcactttcaggaacactctgaattccaagtagaattgatttcccttcttctgtcatctaccttttctcttcattttcccatttttattacccttctttccatttctctctccagtcttccacctggaagccctctctggctaaggacaggcaggtgcccctctctccatcagaggacacctgtactggagagcaacacaggatggtctctgccatgaactggaggccaggaatctcctcactgaaaattacagtatggtaactttgcaaatggtggttgtttcttccaagactccagccctgattgcgcaaaactgaaaggcatgtgaagggaaggaagaggaagagtgcaaaacattgaagagagagctgagtgagctgaagagtgaggatatgagtagccccaacccaaacctggagatggggagaaacctacagaatactagccagagctcctccttgtcttggcagcctactagggacctggggaagcaaaaacgaaagctgggcaacatgcctgctttagaatgttttccttctacttacacatcttccacaggtctcagaatctttccttcctctcatccttttctcctatcttcatatctatcagagtatccactgtttattcaacaactactacttgatggtcagacacaaacaaacaagctaggtgctaattaataaagatacgagttttggccgggtgcggtggctcacgcctgtaatcccagcactttgggaggccgaggcgggcgaatcacgaggtcaggagttcaagaccagcctggccaacatggtgaaaccccatctctactaaaaatacaaacaattaactgagcatagtggtgggcacctataataccagctactccggaggctgaggcaggagaatcgcttgaacccaggaggcagaggttgcagtgagctgagatcgcgccactgcactctagccggagtgacagagtaagactctgtctcaaaaataaataaataaataaataaataaataaataaataaataaataaataaataaaaaataataatacaagttttcataagcacacttctaa

SEQ ID NO: 156345 - DNA, 2087 bp, Homo sapiens
  Payload ID: 10666
  Gene Symbol: MOG
  Gene Name: myelin oligodendrocyte glycoprotein
  Uniprot ID: Q16653
  ENST ID: ENST00000383525
  CDS Start-End: 149-892
caattaccggagtggaggcagggcccaggcagcactgccctccaagatcttcccttgggcttttcagcagtaaggggacatgcaccccaagggcctccacttggcctgaccttgctgcgggggctctctgtccccaggaacagtagagatggcaagcttatcgagaccctctctgcccagctgcctctgctccttcctcctcctcctcctcctccaagtgtcttccagctatgcagggcagttcagagtgataggaccaagacaccctatccgggctctggtcggggatgaagtggaattgccatgtcgcatatctcctgggaagaacgctacaggcatggaggtggggtggtaccgcccccccttctctagggtggttcatctctacagaaatggcaaggaccaagatggagaccaggcacctgaatatcggggccggacagagctgctgaaagatgctattggtgagggaaaggtgactctcaggatccggaatgtaaggttctcagatgaaggaggtttcacctgcttcttccgagatcattcttaccaagaggaggcagcaatggaattgaaagtagaagatcctttctactgggtgagccctggagtgctggttctcctcgcggtgctgcctgtgctcctcctgcagatcactgttggcctcgtcttcctctgcctgcagtacagactgagaggaaaacttcgagcagagatagagaatctccaccggacttttgatccccactttctgagggtgccctgctggaagataaccctgtttgtaattgtgccggttcttggacccttggttgccttgatcatctgctacaactggctacatcgaagactagcagggcaattccttgaagagctacgaaatcccttctgagtgatgtcacatcttggcaggggtggaggagagcctggttgcccagggatttgtccttggggacatctcatccatcaagttgcacactcactggcatctttgctatggggacattccaatttgcactttcaggaacactctgaattccaagtagaattgatttcccttcttctgtcatctaccttttctcttcattttcccatttttattacccttctttccatttctctctccagtcttccacctggaagccctctctggctaaggacaggcaggtgcccctctctccatcagaggacacctgtactggagagcaacacaggatggtctctgccatgaactggaggccaggaatctcctcactgaaaattacagtatggtaactttgcaaatggtggttgtttcttccaagactccagccctgattgcgcaaaactgaaaggcatgtgaagggaaggaagaggaagagtgcaaaacattgaagagagagctgagtgagctgaagagtgaggatatgagtagccccaacccaaacctggagatggggagaaacctacagaatactagccagagctcctccttgtcttggcagcctactagggacctggggaagcaaaaacgaaagctgggcaacatgcctgctttagaatgttttccttctacttacacatcttccacaggtctcagaatctttccttcctctcatccttttctcctatcttcatatctatcagagtatccactgtttattcaacaactactacttgatggtcagacacaaacaaacaagctaggtgctaattaataaagatacgagttttggccgggtgcggtggctcacgcctgtaatcccagcactttgggaggccgaggcgggcgaatcacgaggtcaggagttcaagaccagcctggccaacatggtgaaaccccatctctactaaaaatacaaacaattaactgagcatagtggtgggcacctataataccagctactccggaggctgaggcaggagaatcgcttgaacccaggaggcagaggttgcagtgagctgagatcgcgccactgcactctagccggagtgacagagtaagactctgtctcaaaaataaataaataaataaataaataaataaataaataaataaataaataaataaaaaataataatacaagttttcataagcacacttctaa

SEQ ID NO: 156346 - DNA, 2146 bp, Homo sapiens
  Payload ID: 10666
  Gene Symbol: MOG
  Gene Name: myelin oligodendrocyte glycoprotein
  Uniprot ID: Q16653
  ENST ID: ENST00000383630
  CDS Start-End: 212-955
agcccttttgtgtgagtgcctggcaagggtgacgtggggctgtttctgcgggcacagctgcagcaattaccggagtggaggcagggcccaggcagcactgccctccaagatcttcccttgggcttttcagcagtaaggggacatgcaccccaagggcctccacttggcctgaccttgctgcgggggctctctgtccccaggaacagtagagatggcaagcttatcgagaccctctctgcccagctgcctctgctccttcctcctcctcctcctcctccaagtgtcttccagctatgcagggcagttcagagtgataggaccaagacaccctatccgggctctggtcggggatgaagtggaattgccatgtcgcatatctcctgggaagaacgctacaggcatggaggtggggtggtaccgcccccccttctctagggtggttcatctctacagaaatggcaaggaccaagatggagaccaggcacctgaatatcggggccggacagagctgctgaaagatgctattggtgagggaaaggtgactctcaggatccggaatgtaaggttctcagatgaaggaggtttcacctgcttcttccgagatcattcttaccaagaggaggcagcaatggaattgaaagtagaagatcctttctactgggtgagccctggagtgctggttctcctcgcggtgctgcctgtgctcctcctgcagatcactgttggcctcgtcttcctctgcctgcagtacagactgagaggaaaacttcgagcagagatagagaatctccaccggacttttgatccccactttctgagggtgccctgctggaagataaccctgtttgtaattgtgccggttcttggacccttggttgccttgatcatctgctacaactggctacatcgaagactagcagggcaattccttgaagagctacgaaatcccttctgagtgatgtcacatcttggcaggggtggaggagagcctggttgcccagggatttgtccttggggacatctcatccatcaagttgcacactcactggcatctttgctatggggacattccaatttgcactttcaggaacactctgaattccaagtagaattgatttcccttcttctgtcatctaccttttctcttcattttcccatttttattacccttctttccatttctctctccagtcttccacctggaagccctctctggctaaggacaggcaggtgcccctctctccatcagaggacacctgtactggagagcaacacaggatggtctctgccatgaactggaggccaggaatctcctcactgaaaattacagtatggtaactttgcaaatggtggttgtttcttccaagactccagccctgattgcgcaaaactgaaaggcatgtgaagggaaggaagaggaagagtgcaaaacattgaagagagagctgagtgagctgaagagtgaggatatgagtagccccaacccaaacctggagatggggagaaacctacagaatactagccagagctcctccttgtcttggcagcctactagggacctggggaagcaaaaacgaaagctgggcaacatgcctgctttagaatgttttccttctacttacacatcttccacaggtctcagaatctttccttcctctcatccttttctcctatcttcatatctatcagagtatccactgtttattcaacaactactacttgatggtcagacacaaacaaacaagctaggtgctaattaataaagatatgagttttggccgggtgcggtggctcacgcctgtaatcccagcactttgggaggccgaggcgggcgaatcacgaggtcaggagttcgagaccagcctggccaacatggtgaaaccccatctctactaaaaatacaaacaattaactgagcatagtggtgggcacctataataccagctactccggaggctgaggcaggagaatcgcttgaacccaggaggcagaggttgcagtgagctgagatcgcgccactgcactctagccagagtgacagagtaagactctgtctcaaaaataaataaataaataaataaataaataaataaataaataaataaataaaaaataataatacaagttttcataagcacacttctaa

SEQ ID NO: 156347 - DNA, 1616 bp, Homo sapiens
  Payload ID: 10666
  Gene Symbol: MOG
  Gene Name: myelin oligodendrocyte glycoprotein
  Uniprot ID: Q16653
  ENST ID: ENST00000383631
  CDS Start-End: 1-690
atggcaagcttatcgagaccctctctgcccagctgcctctgctccttcctcctcctcctcctcctccaagtgtcttccagctatgcagggcagttcagagtgataggaccaagacaccctatccgggctctggtcggggatgaagtggaattgccatgtcgcatatctcctgggaagaacgctacaggcatggaggtggggtggtaccgcccccccttctctagggtggttcatctctacagaaatggcaaggaccaagatggagaccaggcacctgaatatcggggccggacagagctgctgaaagatgctattggtgagggaaaggtgactctcaggatccggaatgtaaggttctcagatgaaggaggtttcacctgcttcttccgagatcattcttaccaagaggaggcagcaatggaattgaaagtagaagatcctttctactgggtgagccctggagtgctggttctcctcgcggtgctgcctgtgctcctcctgcagatcactgttggcctcgtcttcctctgcctgcagtacagactgagaggaaaacttcgagcagagatagagaatctccaccggacttttgagtcctttggtgttctaggaccccaggttaaggaaccaaaaaagacagggcaattccttgaagagctactcttccacctggaagccctctctggctaaggacaggcaggtgcccctctctccatcagaggacacctgtactggagagcaacacaggatggtctctgccatgaactggaggccaggaatctcctcactgaaaattacagtatggtaactttgcaaatggtggttgtttcttccaagactccagccctgattgcgcaaaactgaaaggcatgtgaagggaaggaagaggaagagtgcaaaacattgaagagagagctgagtgagctgaagagtgaggatatgagtagccccaacccaaacctggagatggggagaaacctacagaatactagccagagctcctccttgtcttggcagcctactagggacctggggaagcaaaaacgaaagctgggcaacatgcctgctttagaatgttttccttctacttacacatcttccacaggtctcagaatctttccttcctctcatccttttctcctatcttcatatctatcagagtatccactgtttattcaacaactactacttgatggtcagacacaaacaaacaagctaggtgctaattaataaagatatgagttttggccgggtgcggtggctcacgcctgtaatcccagcactttgggaggccgaggcgggcgaatcacgaggtcaggagttcgagaccagcctggccaacatggtgaaaccccatctctactaaaaatacaaacaattaactgagcatagtggtgggcacctataataccagctactccggaggctgaggcaggagaatcgcttgaacccaggaggcagaggttgcagtgagctgagatcgcgccactgcactctagccagagtgacagagtaagactctgtctcaaaaataaataaataaataaataaataaataaataaataaataaataaataaaaaataataatacaagttttcataagcacacttctaa

SEQ ID NO: 156348 - DNA, 910 bp, Homo sapiens
  Payload ID: 10666
  Gene Symbol: MOG
  Gene Name: myelin oligodendrocyte glycoprotein
  Uniprot ID: Q16653
  ENST ID: ENST00000396701
  CDS Start-End: 1-642
atggcaagcttatcaagaccctctctgcccagctgcctctgctccttcctcctcctcctcctcctccaagtgtcttccagctatgcagggcagttcagagtgataggaccaagacaccctatccgggctctggtcggggatgaagtggaattgccatgtcgcatatctcctgggaagaacgctacaggcatggaggtggggtggtaccgcccccccttctctagggtggttcatctctacagaaatggcaaggaccaagatggagaccaggcacctgaatatcggggccggacagagctgctgaaagatgctattggtgagggaaaggtgactctcaggatccggaatgtaaggttctcagatgaaggaggtttcacctgcttcttccgagatcattcttaccaagaggaggcagcaatggaattgaaagtagaagatcctttctactgggtgagccctggagtgctggttctcctcgcggtgctgcctgtgctcctcctgcagatcactgttggcctcatcttcctctgcctgcagtacagactgagaggaaaacttcgagcagagatagagaatctccaccggacttttgggcaattccttgaagagctactcttccacctggaagccctctctggctaaggacaggcaggtgcccctctctccatcagaggacacctgtactggagagcaacacaggatggtctctgccatgaactggaggccaggaatctcctcactgaaaattacagtatggtaactttgcaaatggtggttgtttcttccaagactccagccctgattgcgcaaaactgaaaggcatgtgaagggaaggaagaggaagagtgcaaaacattgaagagagagctgagtgagctgaagagtgaggatatgagtagccccaacccaa

SEQ ID NO: 156349 - DNA, 675 bp, Homo sapiens
  Payload ID: 10666
  Gene Symbol: MOG
  Gene Name: myelin oligodendrocyte glycoprotein
  Uniprot ID: Q16653
  ENST ID: ENST00000396704
  CDS Start-End: 1-675
atggcaagcttatcaagaccctctctgcccagctgcctctgctccttcctcctcctcctcctcctccaagtgtcttccagctatgcagggcagttcagagtgataggaccaagacaccctatccgggctctggtcggggatgaagtggaattgccatgtcgcatatctcctgggaagaacgctacaggcatggaggtggggtggtaccgcccccccttctctagggtggttcatctctacagaaatggcaaggaccaagatggagaccaggcacctgaatatcggggccggacagagctgctgaaagatgctattggtgagggaaaggtgactctcaggatccggaatgtaaggttctcagatgaaggaggtttcacctgcttcttccgagatcattcttaccaagaggaggcagcaatggaattgaaagtagaagatcctttctactgggtgagccctggagtgctggttctcctcgcggtgctgcctgtgctcctcctgcagatcactgttggcctcatcttcctctgcctgcagtacagactgagaggaaaacttcgagcagagatagagaatctccaccggacttttgagtcctttggtgttctaggaccccaggttaaggaaccaaaaaagacagggcaattccttgaagagctacgaaatcccttctga

SEQ ID NO: 156350 - DNA, 1858 bp, Homo sapiens
  Payload ID: 10666
  Gene Symbol: MOG
  Gene Name: myelin oligodendrocyte glycoprotein
  ENST ID: ENST00000400668
  CDS Start-End: 1-675
atggcaagcttatcgagaccctctctgcccagctgcctctgctccttcctcctcctcctcctcctccaagtgtcttccagctatgcagggcagttcagagtgataggaccaagacaccctatccgggctctggtcggggatgaagtggaattgccatgtcgcatatctcctgggaagaacgctacaggcatggaggtggggtggtaccgcccccccttctctagggtggttcatctctacagaaatggcaaggaccaagatggagaccaggcacctgaatatcggggccggacagagctgctgaaagatgctattggtgagggaaaggtgactctcaggatccggaatgtaaggttctcagatgaaggaggtttcacctgcttcttccgagatcattcttaccaagaggaggcagcaatggaattgaaagtagaagatcctttctactgggtgagccctggagtgctggttctcctcgcggtgctgcctgtgctcctcctgcagatcactcttggcctcgtcttcctctgcctgcagtacagactgagaggaaaacttcgagcagagatagagaatctccaccggacttttgagtcctttggtgttctaggaccccaggttaaggaaccaaaaaagacagggcaattccttgaagagctacgaaatcccttctgagtgatgtcacatcttggcaggggtggaggagagcctggttgcccagggatttgtccttggggacatctcatccatcaagttgcacactcactggcatctttgctatggggacattccaatttgcactttcaggaacactctgaattccaagtagaattgatttcccttcttctgtcatctaccttttctcttcattttcccatttttattacccttctttccatttctctctccagtcttccacctggaagccctctctggctaaggacaggcaggtgcccctctctccatcagaggacacctgtactggagagcaacacaggatggtctctgccatgaactggaggccaggaatctcctcactgaaaattacagtatggtaactttgcaaatggtggttgtttcttccaagactccagccctgattgcgcaaaactgaaaggcatgtgaagggaaggaagaggaagagtgcaaaacattgaagagagagctgagtgagctgaagagtgaggatatgagtagccccaacccaaacctggagatggggagaaacctacagaatactagccagagctcctccttgtcttggcagcctactagggacctggggaagcaaaaacgaaagctgggcaacatgcctgctttagaatgttttccttctacttacacatcttccacaggtctcagaatctttccttcctctcatccttttctcctatcttcatatctatcagagtatccactgtttattcaacaactactacttgatggtcagacacaaacaaacaagctaggtgctaattaataaagatacgagttttggccgggtgcggtggctcacgcctgtaatcccagcactttgggaggccgaggcgggcgaatcacgaggtcaggagttcaagaccagcctggccaacatggtgaaaccccatctctactaaaaatacaaacaattaactgagcatagtggtgggcacctataataccagctactccggaggctgaggcaggagaatcgcttgaacccaggaggcagaggttgcagtgagctgagatcgcgccactgcactctagccggagtgacagagtaagactctgtctcaaaaataaataaataaataaataaataaataaataaataaataaaaaataataatacaagttttcataagcacacttctaa

SEQ ID NO: 156351 - DNA, 1620 bp, Homo sapiens
  Payload ID: 10666
  Gene Symbol: MOG
  Gene Name: myelin oligodendrocyte glycoprotein
  Uniprot ID: Q16653
  ENST ID: ENST00000400669
  CDS Start-End: 1-690
atggcaagcttatcgagaccctctctgcccagctgcctctgctccttcctcctcctcctcctcctccaagtgtcttccagctatgcagggcagttcagagtgataggaccaagacaccctatccgggctctggtcggggatgaagtggaattgccatgtcgcatatctcctgggaagaacgctacaggcatggaggtggggtggtaccgcccccccttctctagggtggttcatctctacagaaatggcaaggaccaagatggagaccaggcacctgaatatcggggccggacagagctgctgaaagatgctattggtgagggaaaggtgactctcaggatccggaatgtaaggttctcagatgaaggaggtttcacctgcttcttccgagatcattcttaccaagaggaggcagcaatggaattgaaagtagaagatcctttctactgggtgagccctggagtgctggttctcctcgcggtgctgcctgtgctcctcctgcagatcactgttggcctcgtcttcctctgcctgcagtacagactgagaggaaaacttcgagcagagatagagaatctccaccggacttttgagtcctttggtgttctaggaccccaggttaaggaaccaaaaaagacagggcaattccttgaagagctactcttccacctggaagccctctctggctaaggacaggcaggtgcccctctctccatcagaggacacctgtactggagagcaacacaggatggtctctgccatgaactggaggccaggaatctcctcactgaaaattacagtatggtaactttgcaaatggtggttgtttcttccaagactccagccctgattgcgcaaaactgaaaggcatgtgaagggaaggaagaggaagagtgcaaaacattgaagagagagctgagtgagctgaagagtgaggatatgagtagccccaacccaaacctggagatggggagaaacctacagaatactagccagagctcctccttgtcttggcagcctactagggacctggggaagcaaaaacgaaagctgggcaacatgcctgctttagaatgttttccttctacttacacatcttccacaggtctcagaatctttccttcctctcatccttttctcctatcttcatatctatcagagtatccactgtttattcaacaactactacttgatggtcagacacaaacaaacaagctaggtgctaattaataaagatacgagttttggccgggtgcggtggctcacgcctgtaatcccagcactttgggaggccgaggcgggcgaatcacgaggtcaggagttcaagaccagcctggccaacatggtgaaaccccatctctactaaaaatacaaacaattaactgagcatagtggtgggcacctataataccagctactccggaggctgaggcaggagaatcgcttgaacccaggaggcagaggttgcagtgagctgagatcgcgccactgcactctagccggagtgacagagtaagactctgtctcaaaaataaataaataaataaataaataaataaataaataaataaataaataaataaaaaataataatacaagttttcataagcacacttctaa

SEQ ID NO: 156352 - DNA, 1572 bp, Homo sapiens
  Payload ID: 10666
  Gene Symbol: MOG
  Gene Name: myelin oligodendrocyte glycoprotein
  Uniprot ID: Q16653
  ENST ID: ENST00000400671
  CDS Start-End: 1-642
atggcaagcttatcgagaccctctctgcccagctgcctctgctccttcctcctcctcctcctcctccaagtgtcttccagctatgcagggcagttcagagtgataggaccaagacaccctatccgggctctggtcggggatgaagtggaattgccatgtcgcatatctcctgggaagaacgctacaggcatggaggtggggtggtaccgcccccccttctctagggtggttcatctctacagaaatggcaaggaccaagatggagaccaggcacctgaatatcggggccggacagagctgctgaaagatgctattggtgagggaaaggtgactctcaggatccggaatgtaaggttctcagatgaaggaggtttcacctgcttcttccgagatcattcttaccaagaggaggcagcaatggaattgaaagtagaagatcctttctactgggtgagccctggagtgctggttctcctcgcggtgctgcctgtgctcctcctgcagatcactgttggcctcgtcttcctctgcctgcagtacagactgagaggaaaacttcgagcagagatagagaatctccaccggacttttgggcaattccttgaagagctactcttccacctggaagccctctctggctaaggacaggcaggtgcccctctctccatcagaggacacctgtactggagagcaacacaggatggtctctgccatgaactggaggccaggaatctcctcactgaaaattacagtatggtaactttgcaaatggtggttgtttcttccaagactccagccctgattgcgcaaaactgaaaggcatgtgaagggaaggaagaggaagagtgcaaaacattgaagagagagctgagtgagctgaagagtgaggatatgagtagccccaacccaaacctggagatggggagaaacctacagaatactagccagagctcctccttgtcttggcagcctactagggacctggggaagcaaaaacgaaagctgggcaacatgcctgctttagaatgttttccttctacttacacatcttccacaggtctcagaatctttccttcctctcatccttttctcctatcttcatatctatcagagtatccactgtttattcaacaactactacttgatggtcagacacaaacaaacaagctaggtgctaattaataaagatacgagttttggccgggtgcggtggctcacgcctgtaatcccagcactttgggaggccgaggcgggcgaatcacgaggtcaggagttcaagaccagcctggccaacatggtgaaaccccatctctactaaaaatacaaacaattaactgagcatagtggtgggcacctataataccagctactccggaggctgaggcaggagaatcgcttgaacccaggaggcagaggttgcagtgagctgagatcgcgccactgcactctagccggagtgacagagtaagactctgtctcaaaaataaataaataaataaataaataaataaataaataaataaataaataaataaaaaataataatacaagttttcataagcacacttctaa

SEQ ID NO: 156353 - DNA, 1730 bp, Homo sapiens
  Payload ID: 10666
  Gene Symbol: MOG
  Gene Name: myelin oligodendrocyte glycoprotein
  ENST ID: ENST00000400687
  CDS Start-End: 1-539
ggcagttcagagtgataggaccaagacaccctatccgggctctggtcggggatgaagtggaattgccatgtcgcatatctcctgggaagaacgctacaggcatggaggtggggtggtaccgcccccccttctctagggtggttcatctctacagaaatggcaaggaccaagatggagaccaggcacctgaatatcggggccggacagagctgctgaaagatgctattggtgagggaaaggtgactctcaggatccggaatgtaaggttctcagatgaaggaggtttcacctgcttcttccgagatcattcttaccaagaggaggcagcaatggaattgaaagtagaagatcctttctactgggtgagccctggagtgctggttctcctcgcggtgctgcctgtgctcctcctgcagatcactgttggcctcgtcttcctctgcctgcagtacagactgagaggaaaacttcgagcagagatagagaatctccaccggacttttgggcaattccttgaagagctacgaaatcccttctgagtgatgtcacatcttggcaggggtggaggagagcctggttgcccagggatttgtccttggggacatctcatccatcaagttgcacactcactggcatctttgctatggggacattccaatttgcactttcaggaacactctgaattccaagtagaattgatttcccttcttctgtcatctaccttttctcttcattttcccatttttattacccttctttccatttctctctccagtcttccacctggaagccctctctggctaaggacaggcaggtgcccctctctccatcagaggacacctgtactggagagcaacacaggatggtctctgccatgaactggaggccaggaatctcctcactgaaaattacagtatggtaactttgcaaatggtggttgtttcttccaagactccagccctgattgcgcaaaactgaaaggcatgtgaagggaaggaagaggaagagtgcaaaacattgaagagagagctgagtgagctgaagagtgaggatatgagtagccccaacccaaacctggagatggggagaaacctacagaatactagccagagctcctccttgtcttggcagcctactagggacctggggaagcaaaaacgaaagctgggcaacatgcctgctttagaatgttttccttctacttacacatcttccacaggtctcagaatctttccttcctctcatccttttctcctatcttcatatctatcagagtatccactgtttattcaacaactactacttgatggtcagacacaaacaaacaagctaggtgctaattaataaagatatgagttttggccgggtgcggtggctcacgcctgtaatcccagcactttgggaggccgaggcgggcgaatcacgaggtcaggagttcgagaccagcctggccaacatggtgaaaccccatctctactaaaaatacaaacaattaactgagcatagtggtgggcacctataataccagctactccggaggctgaggcaggagaatcgcttgaacccaggaggcagaggttgcagtgagctgagatcgcgccactgcactctagccagagtgacagagtaagactctgtctcaaaaataaataaataaataaataaataaataaataaataaataaataaataaaaaataataatacaagttttcataagcacacttctaa

SEQ ID NO: 156354 - DNA, 1587 bp, Homo sapiens
  Payload ID: 10666
  Gene Symbol: MOG
  Gene Name: myelin oligodendrocyte glycoprotein
  Uniprot ID: Q16653
  ENST ID: ENST00000400688
  CDS Start-End: 1-396
atggcaagcttatcgagaccctctctgcccagctgcctctgctccttcctcctcctcctcctcctccaagtgtcttccagctatgcagatcctttctactgggtgagccctggagtgctggttctcctcgcggtgctgcctgtgctcctcctgcagatcactgttggcctcgtcttcctctgcctgcagtacagactgagaggaaaacttcgagcagagatagagaatctccaccggacttttgatccccactttctgagggtgccctgctggaagataaccctgtttgtaattgtgccggttcttggacccttggttgccttgatcatctgctacaactggctacatcgaagactagcagggcaattccttgaagagctacgaaatcccttctgagtgatgtcacatcttggcaggggtggaggagagcctggttgcccagggatttgtccttggggacatctcatccatcaagttgcacactcactggcatctttgctatggggacattccaatttgcactttcaggaacactctgaattccaagtagaattgatttcccttcttctgtcatctaccttttctcttcattttcccatttttattacccttctttccatttctctctccagtcttccacctggaagccctctctggctaaggacaggcaggtgcccctctctccatcagaggacacctgtactggagagcaacacaggatggtctctgccatgaactggaggccaggaatctcctcactgaaaattacagtatggtaactttgcaaatggtggttgtttcttccaagactccagccctgattgcgcaaaactgaaaggcatgtgaagggaaggaagaggaagagtgcaaaacattgaagagagagctgagtgagctgaagagtgaggatatgagtagccccaacccaaacctggagatggggagaaacctacagaatactagccagagctcctccttgtcttggcagcctactagggacctggggaagcaaaaacgaaagctgggcaacatgcctgctttagaatgttttccttctacttacacatcttccacaggtctcagaatctttccttcctctcatccttttctcctatcttcatatctatcagagtatccactgtttattcaacaactactacttgatggtcagacacaaacaaacaagctaggtgctaattaataaagatatgagttttggccgggtgcggtggctcacgcctgtaatcccagcactttgggaggccgaggcgggcgaatcacgaggtcaggagttcgagaccagcctggccaacatggtgaaaccccatctctactaaaaatacaaacaattaactgagcatagtggtgggcacctataataccagctactccggaggctgaggcaggagaatcgcttgaacccaggaggcagaggttgcagtgagctgagatcgcgccactgcactctagccagagtgacagagtaagactctgtctcaaaaataaataaataaataaataaataaataaataaataaataaataaataaaaaataataatacaagttttcataagcacacttctaa

SEQ ID NO: 156355 - DNA, 1541 bp, Homo sapiens
  Payload ID: 10666
  Gene Symbol: MOG
  Gene Name: myelin oligodendrocyte glycoprotein
  Uniprot ID: Q16653
  ENST ID: ENST00000400691
  CDS Start-End: 1-615
agcttatcgagaccctctctgcccagctgcctctgctccttcctcctcctcctcctcctccaagtgtcttccagctatgcagggcagttcagagtgataggaccaagacaccctatccgggctctggtcggggatgaagtggaattgccatgtcgcatatctcctgggaagaacgctacaggcatggaggtggggtggtaccgcccccccttctctagggtggttcatctctacagaaatggcaaggaccaagatggagaccaggcacctgaatatcggggccggacagagctgctgaaagatgctattggtgagggaaaggtgactctcaggatccggaatgtaaggttctcagatgaaggaggtttcacctgcttcttccgagatcattcttaccaagaggaggcagcaatggaattgaaagtagaagatcctttctactgggtgagccctggagtgctggttctcctcgcggtgctgcctgtgctcctcctgcagatcactgttggcctcgtcttcctctgcctgcagtacagactgagaggaaaacttcgagcagagatagagaatctccaccggacttttgtcttccacctggaagccctctctggctaaggacaggcaggtgcccctctctccatcagaggacacctgtactggagagcaacacaggatggtctctgccatgaactggaggccaggaatctcctcactgaaaattacagtatggtaactttgcaaatggtggttgtttcttccaagactccagccctgattgcgcaaaactgaaaggcatgtgaagggaaggaagaggaagagtgcaaaacattgaagagagagctgagtgagctgaagagtgaggatatgagtagccccaacccaaacctggagatggggagaaacctacagaatactagccagagctcctccttgtcttggcagcctactagggacctggggaagcaaaaacgaaagctgggcaacatgcctgctttagaatgttttccttctacttacacatcttccacaggtctcagaatctttccttcctctcatccttttctcctatcttcatatctatcagagtatccactgtttattcaacaactactacttgatggtcagacacaaacaaacaagctaggtgctaattaataaagatatgagttttggccgggtgcggtggctcacgcctgtaatcccagcactttgggaggccgaggcgggcgaatcacgaggtcaggagttcgagaccagcctggccaacatggtgaaaccccatctctactaaaaatacaaacaattaactgagcatagtggtgggcacctataataccagctactccggaggctgaggcaggagaatcgcttgaacccaggaggcagaggttgcagtgagctgagatcgcgccactgcactctagccagagtgacagagtaagactctgtctcaaaaataaataaataaataaataaataaataaataaataaataaataaataaaaaataataatacaagttttcataagcacacttctaa

SEQ ID NO: 156356 - DNA, 1579 bp, Homo sapiens
  Payload ID: 10666
  Gene Symbol: MOG
  Gene Name: myelin oligodendrocyte glycoprotein
  ENST ID: ENST00000411455
  CDS Start-End: 1-396
atggcaagcttatcgagaccctctctgcccagctgcctctgctccttcctcctcctcctcctcctccaagtgtcttccagctatgcagatcctttctactgggtgagccctggagtgctggttctcctcgcggtgctgcctgtgctcctcctgcagatcactcttggcctcgtcttcctctgcctgcagtacagactgagaggaaaacttcgagcagagatagagaatctccaccggacttttgatccccactttctgagggtgccctgctggaagataaccctgtttgtaattgtgccggttcttggacccttggttgccttgatcatctgctacaactggctacatcgaagactagcagggcaattccttgaagagctacgaaatcccttctgagtgatgtcacatcttggcaggggtggaggagagcctggttgcccagggatttgtccttggggacatctcatccatcaagttgcacactcactggcatctttgctatggggacattccaatttgcactttcaggaacactctgaattccaagtagaattgatttcccttcttctgtcatctaccttttctcttcattttcccatttttattacccttctttccatttctctctccagtcttccacctggaagccctctctggctaaggacaggcaggtgcccctctctccatcagaggacacctgtactggagagcaacacaggatggtctctgccatgaactggaggccaggaatctcctcactgaaaattacagtatggtaactttgcaaatggtggttgtttcttccaagactccagccctgattgcgcaaaactgaaaggcatgtgaagggaaggaagaggaagagtgcaaaacattgaagagagagctgagtgagctgaagagtgaggatatgagtagccccaacccaaacctggagatggggagaaacctacagaatactagccagagctcctccttgtcttggcagcctactagggacctggggaagcaaaaacgaaagctgggcaacatgcctgctttagaatgttttccttctacttacacatcttccacaggtctcagaatctttccttcctctcatccttttctcctatcttcatatctatcagagtatccactgtttattcaacaactactacttgatggtcagacacaaacaaacaagctaggtgctaattaataaagatacgagttttggccgggtgcggtggctcacgcctgtaatcccagcactttgggaggccgaggcgggcgaatcacgaggtcaggagttcaagaccagcctggccaacatggtgaaaccccatctctactaaaaatacaaacaattaactgagcatagtggtgggcacctataataccagctactccggaggctgaggcaggagaatcgcttgaacccaggaggcagaggttgcagtgagctgagatcgcgccactgcactctagccggagtgacagagtaagactctgtctcaaaaataaataaataaataaataaataaataaataaataaataaaaaataataatacaagttttcataagcacacttctaa

SEQ ID NO: 156357 - DNA, 2138 bp, Homo sapiens
  Payload ID: 10666
  Gene Symbol: MOG
  Gene Name: myelin oligodendrocyte glycoprotein
  Uniprot ID: Q16653
  ENST ID: ENST00000452744
  CDS Start-End: 212-955
agcccttttgtgtgagtgcctggcaagggtgacgtggggctgtttctgcgggcacagctgcagcaattaccggagtggaggcagggcccaggcagcactgccctccaagatcttcccttgggcttttcagcagtaaggggacatgcaccccaagggcctccacttggcctgaccttgctgcgggggctctctgtccccaggaacagtagagatggcaagcttatcgagaccctctctgcccagctgcctctgctccttcctcctcctcctcctcctccaagtgtcttccagctatgcagggcagttcagagtgataggaccaagacaccctatccgggctctggtcggggatgaagtggaattgccatgtcgcatatctcctgggaagaacgctacaggcatggaggtggggtggtaccgcccccccttctctagggtggttcatctctacagaaatggcaaggaccaagatggagaccaggcacctgaatatcggggccggacagagctgctgaaagatgctattggtgagggaaaggtgactctcaggatccggaatgtaaggttctcagatgaaggaggtttcacctgcttcttccgagatcattcttaccaagaggaggcagcaatggaattgaaagtagaagatcctttctactgggtgagccctggagtgctggttctcctcgcggtgctgcctgtgctcctcctgcagatcactcttggcctcgtcttcctctgcctgcagtacagactgagaggaaaacttcgagcagagatagagaatctccaccggacttttgatccccactttctgagggtgccctgctggaagataaccctgtttgtaattgtgccggttcttggacccttggttgccttgatcatctgctacaactggctacatcgaagactagcagggcaattccttgaagagctacgaaatcccttctgagtgatgtcacatcttggcaggggtggaggagagcctggttgcccagggatttgtccttggggacatctcatccatcaagttgcacactcactggcatctttgctatggggacattccaatttgcactttcaggaacactctgaattccaagtagaattgatttcccttcttctgtcatctaccttttctcttcattttcccatttttattacccttctttccatttctctctccagtcttccacctggaagccctctctggctaaggacaggcaggtgcccctctctccatcagaggacacctgtactggagagcaacacaggatggtctctgccatgaactggaggccaggaatctcctcactgaaaattacagtatggtaactttgcaaatggtggttgtttcttccaagactccagccctgattgcgcaaaactgaaaggcatgtgaagggaaggaagaggaagagtgcaaaacattgaagagagagctgagtgagctgaagagtgaggatatgagtagccccaacccaaacctggagatggggagaaacctacagaatactagccagagctcctccttgtcttggcagcctactagggacctggggaagcaaaaacgaaagctgggcaacatgcctgctttagaatgttttccttctacttacacatcttccacaggtctcagaatctttccttcctctcatccttttctcctatcttcatatctatcagagtatccactgtttattcaacaactactacttgatggtcagacacaaacaaacaagctaggtgctaattaataaagatacgagttttggccgggtgcggtggctcacgcctgtaatcccagcactttgggaggccgaggcgggcgaatcacgaggtcaggagttcaagaccagcctggccaacatggtgaaaccccatctctactaaaaatacaaacaattaactgagcatagtggtgggcacctataataccagctactccggaggctgaggcaggagaatcgcttgaacccaggaggcagaggttgcagtgagctgagatcgcgccactgcactctagccggagtgacagagtaagactctgtctcaaaaataaataaataaataaataaataaataaataaataaataaaaaataataatacaagttttcataagcacacttctaa

SEQ ID NO: 156358 - DNA, 2146 bp, Homo sapiens; identical to SEQ ID NO: 156346
  Payload ID: 10666
  Gene Symbol: MOG
  Gene Name: myelin oligodendrocyte glycoprotein
  Uniprot ID: Q16653
  ENST ID: ENST00000432271
  CDS Start-End: 212-955

SEQ ID NO: 156359 - DNA, 1862 bp, Homo sapiens
  Payload ID: 10666
  Gene Symbol: MOG
  Gene Name: myelin oligodendrocyte glycoprotein
  Uniprot ID: Q16653
  ENST ID: ENST00000444674
  CDS Start-End: 1-675
atggcaagcttatcgagaccctctctgcccagctgcctctgctccttcctcctcctcctcctcctccaagtgtcttccagctatgcagggcagttcagagtgataggaccaagacaccctatccgggctctggtcggggatgaagtggaattgccatgtcgcatatctcctgggaagaacgctacaggcatggaggtggggtggtaccgcccccccttctctagggtggttcatctctacagaaatggcaaggaccaagatggagaccaggcacctgaatatcggggccggacagagctgctgaaagatgctattggtgagggaaaggtgactctcaggatccggaatgtaaggttctcagatgaaggaggtttcacctgcttcttccgagatcattcttaccaagaggaggcagcaatggaattgaaagtagaagatcctttctactgggtgagccctggagtgctggttctcctcgcggtgctgcctgtgctcctcctgcagatcactgttggcctcgtcttcctctgcctgcagtacagactgagaggaaaacttcgagcagagatagagaatctccaccggacttttgagtcctttggtgttctaggaccccaggttaaggaaccaaaaaagacagggcaattccttgaagagctacgaaatcccttctgagtgatgtcacatcttggcaggggtggaggagagcctggttgcccagggatttgtccttggggacatctcatccatcaagttgcacactcactggcatctttgctatggggacattccaatttgcactttcaggaacactctgaattccaagtagaattgatttcccttcttctgtcatctaccttttctcttcattttcccatttttattacccttctttccatttctctctccagtcttccacctggaagccctctctggctaaggacaggcaggtgcccctctctccatcagaggacacctgtactggagagcaacacaggatggtctctgccatgaactggaggccaggaatctcctcactgaaaattacagtatggtaactttgcaaatggtggttgtttcttccaagactccagccctgattgcgcaaaactgaaaggcatgtgaagggaaggaagaggaagagtgcaaaacattgaagagagagctgagtgagctgaagagtgaggatatgagtagccccaacccaaacctggagatggggagaaacctacagaatactagccagagctcctccttgtcttggcagcctactagggacctggggaagcaaaaacgaaagctgggcaacatgcctgctttagaatgttttccttctacttacacatcttccacaggtctcagaatctttccttcctctcatccttttctcctatcttcatatctatcagagtatccactgtttattcaacaactactacttgatggtcagacacaaacaaacaagctaggtgctaattaataaagatacgagttttggccgggtgcggtggctcacgcctgtaatcccagcactttgggaggccgaggcgggcgaatcacgaggtcaggagttcgagaccagcctggccaacatggtgaaaccccatctctactaaaaatacaaacaattaactgagcatagtggtgggcacctataataccagctactccggaggctgaggcaggagaatcgcttgaacccaggaggcagaggttgcagtgagctgagatcgcgccactgcactctagccagagtgacagagtaagactctgtctcaaaaataaataaataaataaataaataaataaataaataaataaataaaaaataataatacaagttttcataagcacacttctaa

SEQ ID NO: 156360 - DNA, 2499 bp, Homo sapiens
  Payload ID: 10666
  Gene Symbol: MOG
  Gene Name: myelin oligodendrocyte glycoprotein
  Uniprot ID: Q16653
  ENST ID: ENST00000423895
  CDS Start-End: 119-1006
agcactgccctccaagatcttcccttgggcttttcagcagtaaggggacatgcaccccaagggcctccacttggcctgaccttgctgcgggggctctctgtccccaggaacagtagagatggcaagcttatcgagaccctctctgcccagctgcctctgctccttcctcctcctcctcctcctccaagtgtcttccagctatgcagggcagttcagagtgataggaccaagacaccctatccgggctctggtcggggatgaagtggaattgccatgtcgcatatctcctgggaagaacgctacaggcatggaggtggggtggtaccgcccccccttctctagggtggttcatctctacagaaatggcaaggaccaagatggagaccaggcacctgaatatcggggccggacagagctgctgaaagatgctattggtgagggaaaggtgactctcaggatccggaatgtaaggttctcagatgaaggaggtttcacctgcttcttccgagatcattcttaccaagaggaggcagcaatggaattgaaagtagaagatcctttctactgggtgagccctggagtgctggttctcctcgcggtgctgcctgtgctcctcctgcagatcactgttggcctcgtcttcctctgcctgcagtacagactgagaggaaaacttcgagcagagatagagaatctccaccggacttttgatccccactttctgagggtgccctgctggaagataaccctgtttgtaattgtgccggttcttggacccttggttgccttgatcatctgctacaactggctacatcgaagactagcagggcaattccttgaagagctacgtaagttctcttctctctgttataagcagagaataaaaagccaggaaagggagacagaagcaacaagaggaagaggcgggctattgagggatcacattcccagaggaaaggaggagctggagagcctgggtggagggaagactcctcctgggaggtagagggcaaagaagccagctgttagagacacatttacaggtggcagagaagctggaggcactcctatctgccacctgatccattcctccttcactgcccctaagcaggaatccaaccctagctggtctcattgcccattccacagcaactgcccagtgcctcacctctcagatcaaccattgaggcaggaatggagacaagatgaccccaagggcttttcttctccctagttcaatggttttatgatacaaactactgacatacgtttttcaagttattttctccttcttctaggaaatcccttctgagtgatgtcacatcttggcaggggtggaggagagcctggttgcccagggatttgtccttggggacatctcatccatcaagttgcacactcactggcatctttgctatggggacattccaatttgcactttcaggaacactctgaattccaagtagaattgatttcccttcttctgtcatctaccttttctcttcattttcccatttttattacccttctttccatttctctctccagtcttccacctggaagccctctctggctaaggacaggcaggtgcccctctctccatcagaggacacctgtactggagagcaacacaggatggtctctgccatgaactggaggccaggaatctcctcactgaaaattacagtatggtaactttgcaaatggtggttgtttcttccaagactccagccctgattgcgcaaaactgaaaggcatgtgaagggaaggaagaggaagagtgcaaaacattgaagagagagctgagtgagctgaagagtgaggatatgagtagccccaacccaaacctggagatggggagaaacctacagaatactagccagagctcctccttgtcttggcagcctactagggacctggggaagcaaaaacgaaagctgggcaacatgcctgctttagaatgttttccttctacttacacatcttccacaggtctcagaatctttccttcctctcatccttttctcctatcttcatatctatcagagtatccactgtttattcaacaactactacttgatggtcagacacaaacaaacaagctaggtgctaattaataaagatacgagttttggccgggtgcggtggctcacgcctgtaatcccagcactttgggaggccgaggcgggcgaatcacgaggtcaggagttcgagaccagcctggccaacatggtgaaaccccatctctactaaaaatacaaacaattaactgagcatagtggtgggcacctataataccagctactccggaggctgaggcaggagaatcgcttgaacccaggaggcagaggttgcagtgagctgagatcgcgccactgcactctagccagagtgacagagtaagactctgtctcaaaaataaataaataaataaataaataaataaataaataaataaataaaaaataataatacaagttttcataagcacacttctaa

SEQ ID NO: 156361 - DNA, 1568 bp, Homo sapiens
  Payload ID: 10666
  Gene Symbol: MOG
  Gene Name: myelin oligodendrocyte glycoprotein
  Uniprot ID: Q16653
  ENST ID: ENST00000420045
  CDS Start-End: 1-642
atggcaagcttatcgagaccctctctgcccagctgcctctgctccttcctcctcctcctcctcctccaagtgtcttccagctatgcagggcagttcagagtgataggaccaagacaccctatccgggctctggtcggggatgaagtggaattgccatgtcgcatatctcctgggaagaacgctacaggcatggaggtggggtggtaccgcccccccttctctagggtggttcatctctacagaaatggcaaggaccaagatggagaccaggcacctgaatatcggggccggacagagctgctgaaagatgctattggtgagggaaaggtgactctcaggatccggaatgtaaggttctcagatgaaggaggtttcacctgcttcttccgagatcattcttaccaagaggaggcagcaatggaattgaaagtagaagatcctttctactgggtgagccctggagtgctggttctcctcgcggtgctgcctgtgctcctcctgcagatcactgttggcctcgtcttcctctgcctgcagtacagactgagaggaaaacttcgagcagagatagagaatctccaccggacttttgggcaattccttgaagagctactcttccacctggaagccctctctggctaaggacaggcaggtgcccctctctccatcagaggacacctgtactggagagcaacacaggatggtctctgccatgaactggaggccaggaatctcctcactgaaaattacagtatggtaactttgcaaatggtggttgtttcttccaagactccagccctgattgcgcaaaactgaaaggcatgtgaagggaaggaagaggaagagtgcaaaacattgaagagagagctgagtgagctgaagagtgaggatatgagtagccccaacccaaacctggagatggggagaaacctacagaatactagccagagctcctccttgtcttggcagcctactagggacctggggaagcaaaaacgaaagctgggcaacatgcctgctttagaatgttttccttctacttacacatcttccacaggtctcagaatctttccttcctctcatccttttctcctatcttcatatctatcagagtatccactgtttattcaacaactactacttgatggtcagacacaaacaaacaagctaggtgctaattaataaagatacgagttttggccgggtgcggtggctcacgcctgtaatcccagcactttgggaggccgaggcgggcgaatcacgaggtcaggagttcaagaccagcctggccaacatggtgaaaccccatctctactaaaaatacaaacaattaactgagcatagtggtgggcacctataataccagctactccggaggctgaggcaggagaatcgcttgaacccaggaggcagaggttgcagtgagctgagatcgcgccactgcactctagccggagtgacagagtaagactctgtctcaaaaataaataaataaataaataaataaataaataaataaataaataaataaaaaataataatacaagttttcataagcacacttctaa

SEQ ID NO: 156362 - DNA, 2495 bp, Homo sapiens
  Payload ID: 10666
  Gene Symbol: MOG
  Gene Name: myelin oligodendrocyte glycoprotein
  ENST ID: ENST00000429153
  CDS Start-End: 119-1006
agcactgccctccaagatcttcccttgggcttttcagcagtaaggggacatgcaccccaagggcctccacttggcctgaccttgctgcgggggctctctgtccccaggaacagtagagatggcaagcttatcgagaccctctctgcccagctgcctctgctccttcctcctcctcctcctcctccaagtgtcttccagctatgcagggcagttcagagtgataggaccaagacaccctatccgggctctggtcggggatgaagtggaattgccatgtcgcatatctcctgggaagaacgctacaggcatggaggtggggtggtaccgcccccccttctctagggtggttcatctctacagaaatggcaaggaccaagatggagaccaggcacctgaatatcggggccggacagagctgctgaaagatgctattggtgagggaaaggtgactctcaggatccggaatgtaaggttctcagatgaaggaggtttcacctgcttcttccgagatcattcttaccaagaggaggcagcaatggaattgaaagtagaagatcctttctactgggtgagccctggagtgctggttctcctcgcggtgctgcctgtgctcctcctgcagatcactcttggcctcgtcttcctctgcctgcagtacagactgagaggaaaacttcgagcagagatagagaatctccaccggacttttgatccccactttctgagggtgccctgctggaagataaccctgtttgtaattgtgccggttcttggacccttggttgccttgatcatctgctacaactggctacatcgaagactagcagggcaattccttgaagagctacgtaagttctcttctctctgttataagcagagaataaaaagccaggaaagggagacagaagcaacaagaggaagaggcgggctattgagggatcacattcccagaggaaaggaggagctggagagcctgggtggagggaagactcctcctgggaggtagagggcaaagaagccagctgttagagacacatttacaggtggcagagaagctggaggcactcctatctgccacctgatccattcctccttcactgcccctaagcaggaatccaaccctagctggtctcattgcccattccacagcaactgcccagtgcctcacctctcagatcaaccattgaggcaggaatggagacaagatgaccccaagggcttttcttctccctagttcaatggttttatgatacaaactactgacatacgtttttcaagttattttctccttcttctaggaaatcccttctgagtgatgtcacatcttggcaggggtggaggagagcctggttgcccagggatttgtccttggggacatctcatccatcaagttgcacactcactggcatctttgctatggggacattccaatttgcactttcaggaacactctgaattccaagtagaattgatttcccttcttctgtcatctaccttttctcttcattttcccatttttattacccttctttccatttctctctccagtcttccacctggaagccctctctggctaaggacaggcaggtgcccctctctccatcagaggacacctgtactggagagcaacacaggatggtctctgccatgaactggaggccaggaatctcctcactgaaaattacagtatggtaactttgcaaatggtggttgtttcttccaagactccagccctgattgcgcaaaactgaaaggcatgtgaagggaaggaagaggaagagtgcaaaacattgaagagagagctgagtgagctgaagagtgaggatatgagtagccccaacccaaacctggagatggggagaaacctacagaatactagccagagctcctccttgtcttggcagcctactagggacctggggaagcaaaaacgaaagctgggcaacatgcctgctttagaatgttttccttctacttacacatcttccacaggtctcagaatctttccttcctctcatccttttctcctatcttcatatctatcagagtatccactgtttattcaacaactactacttgatggtcagacacaaacaaacaagctaggtgctaattaataaagatacgagttttggccgggtgcggtggctcacgcctgtaatcccagcactttgggaggccgaggcgggcgaatcacgaggtcaggagttcaagaccagcctggccaacatggtgaaaccccatctctactaaaaatacaaacaattaactgagcatagtggtgggcacctataataccagctactccggaggctgaggcaggagaatcgcttgaacccaggaggcagaggttgcagtgagctgagatcgcgccactgcactctagccggagtgacagagtaagactctgtctcaaaaataaataaataaataaataaataaataaataaataaataaaaaataataatacaagttttcataagcacacttctaa

SEQ ID NO: 156363 - DNA, 1564 bp, Homo sapiens
  Payload ID: 10666
  Gene Symbol: MOG
  Gene Name: myelin oligodendrocyte glycoprotein
  Uniprot ID: Q16653
  ENST ID: ENST00000442244
  CDS Start-End: 1-642
atggcaagcttatcgagaccctctctgcccagctgcctctgctccttcctcctcctcctcctcctccaagtgtcttccagctatgcagggcagttcagagtgataggaccaagacaccctatccgggctctggtcggggatgaagtggaattgccatgtcgcatatctcctgggaagaacgctacaggcatggaggtggggtggtaccgcccccccttctctagggtggttcatctctacagaaatggcaaggaccaagatggagaccaggcacctgaatatcggggccggacagagctgctgaaagatgctattggtgagggaaaggtgactctcaggatccggaatgtaaggttctcagatgaaggaggtttcacctgcttcttccgagatcattcttaccaagaggaggcagcaatggaattgaaagtagaagatcctttctactgggtgagccctggagtgctggttctcctcgcggtgctgcctgtgctcctcctgcagatcactgttggcctcgtcttcctctgcctgcagtacagactgagaggaaaacttcgagcagagatagagaatctccaccggacttttgggcaattccttgaagagctactcttccacctggaagccctctctggctaaggacaggcaggtgcccctctctccatcagaggacacctgtactggagagcaacacaggatggtctctgccatgaactggaggccaggaatctcctcactgaaaattacagtatggtaactttgcaaatggtggttgtttcttccaagactccagccctgattgcgcaaaactgaaaggcatgtgaagggaaggaagaggaagagtgcaaaacattgaagagagagctgagtgagctgaagagtgaggatatgagtagccccaacccaaacctggagatggggagaaacctacagaatactagccagagctcctccttgtcttggcagcctactagggacctggggaagcaaaaacgaaagctgggcaacatgcctgctttagaatgttttccttctacttacacatcttccacaggtctcagaatctttccttcctctcatccttttctcctatcttcatatctatcagagtatccactgtttattcaacaactactacttgatggtcagacacaaacaaacaagctaggtgctaattaataaagatacgagttttggccgggtgcggtggctcacgcctgtaatcccagcactttgggaggccgaggcgggcgaatcacgaggtcaggagttcaagaccagcctggccaacatggtgaaaccccatctctactaaaaatacaaacaattaactgagcatagtggtgggcacctataataccagctactccggaggctgaggcaggagaatcgcttgaacccaggaggcagaggttgcagtgagctgagatcgcgccactgcactctagccggagtgacagagtaagactctgtctcaaaaataaataaataaataaataaataaataaataaataaataaataaaaaataataatacaagttttcataagcacacttctaa

SEQ ID NO: 156364 - DNA, 2503 bp, Homo sapiens
  Payload ID: 10666
  Gene Symbol: MOG
  Gene Name: myelin oligodendrocyte glycoprotein
  Uniprot ID: Q16653
  ENST ID: ENST00000449096
  CDS Start-End: 119-1006
agcactgccctccaagatcttcccttgggcttttcagcagtaaggggacatgcaccccaagggcctccacttggcctgaccttgctgcgggggctctctgtccccaggaacagtagagatggcaagcttatcgagaccctctctgcccagctgcctctgctccttcctcctcctcctcctcctccaagtgtcttccagctatgcagggcagttcagagtgataggaccaagacaccctatccgggctctggtcggggatgaagtggaattgccatgtcgcatatctcctgggaagaacgctacaggcatggaggtggggtggtaccgcccccccttctctagggtggttcatctctacagaaatggcaaggaccaagatggagaccaggcacctgaatatcggggccggacagagctgctgaaagatgctattggtgagggaaaggtgactctcaggatccggaatgtaaggttctcagatgaaggaggtttcacctgcttcttccgagatcattcttaccaagaggaggcagcaatggaattgaaagtagaagatcctttctactgggtgagccctggagtgctggttctcctcgcggtgctgcctgtgctcctcctgcagatcactgttggcctcgtcttcctctgcctgcagtacagactgagaggaaaacttcgagcagagatagagaatctccaccggacttttgatccccactttctgagggtgccctgctggaagataaccctgtttgtaattgtgccggttcttggacccttggttgccttgatcatctgctacaactggctacatcgaagactagcagggcaattccttgaagagctacgtaagttctcttctctctgttataagcagagaataaaaagccaggaaagggagacagaagcaacaagaggaagaggcgggctattgagggatcacattcccagaggaaaggaggagctggagagcctgggtggagggaagactcctcctgggaggtagagggcaaagaagccagctgttagagacacatttacaggtggcagagaagctggaggcactcctatctgccacctgatccattcctccttcactgcccctaagcaggaatccaaccctagctggtctcattgcccattccacagcaactgcccagtgcctcacctctcagatcaaccattgaggcaggaatggagacaagatgaccccaagggcttttcttctccctagttcaatggttttatgatacaaactactgacatacgtttttcaagttattttctccttcttctaggaaatcccttctgagtgatgtcacatcttggcaggggtggaggagagcctggttgcccagggatttgtccttggggacatctcatccatcaagttgcacactcactggcatctttgctatggggacattccaatttgcactttcaggaacactctgaattccaagtagaattgatttcccttcttctgtcatctaccttttctcttcattttcccatttttattacccttctttccatttctctctccagtcttccacctggaagccctctctggctaaggacaggcaggtgcccctctctccatcagaggacacctgtactggagagcaacacaggatggtctctgccatgaactggaggccaggaatctcctcactgaaaattacagtatggtaactttgcaaatggtggttgtttcttccaagactccagccctgattgcgcaaaactgaaaggcatgtgaagggaaggaagaggaagagtgcaaaacattgaagagagagctgagtgagctgaagagtgaggatatgagtagccccaacccaaacctggagatggggagaaacctacagaatactagccagagctcctccttgtcttggcagcctactagggacctggggaagcaaaaacgaaagctgggcaacatgcctgctttagaatgttttccttctacttacacatcttccacaggtctcagaatctttccttcctctcatccttttctcctatcttcatatctatcagagtatccactgtttattcaacaactactacttgatggtcagacacaaacaaacaagctaggtgctaattaataaagatacgagttttggccgggtgcggtggctcacgcctgtaatcccagcactttgggaggccgaggcgggcgaatcacgaggtcaggagttcaagaccagcctggccaacatggtgaaaccccatctctactaaaaatacaaacaattaactgagcatagtggtgggcacctataataccagctactccggaggctgaggcaggagaatcgcttgaacccaggaggcagaggttgcagtgagctgagatcgcgccactgcactctagccggagtgacagagtaagactctgtctcaaaaataaataaataaataaataaataaataaataaataaataaataaataaaaaataataatacaagttttcataagcacacttctaa

SEQ ID NO: 156365 - DNA, 1730 bp, Homo sapiens
  Payload ID: 10666
  Gene Symbol: MOG
  Gene Name: myelin oligodendrocyte glycoprotein
  ENST ID: ENST00000450851
  CDS Start-End: 1-539
ggcagttcagagtgataggaccaagacaccctatccgggctctggtcggggatgaagtggaattgccatgtcgcatatctcctgggaagaacgctacaggcatggaggtggggtggtaccgcccccccttctctagggtggttcatctctacagaaatggcaaggaccaagatggagaccaggcacctgaatatcggggccggacagagctgctgaaagatgctattggtgagggaaaggtgactctcaggatccggaatgtaaggttctcagatgaaggaggtttcacctgcttcttccgagatcattcttaccaagaggaggcagcaatggaattgaaagtagaagatcctttctactgggtgagccctggagtgctggttctcctcgcggtgctgcctgtgctcctcctgcagatcactgttggcctcgtcttcctctgcctgcagtacagactgagaggaaaacttcgagcagagatagagaatctccaccggacttttgggcaattccttgaagagctacgaaatcccttctgagtgatgtcacatcttggcaggggtggaggagagcctggttgcccagggatttgtccttggggacatctcatccatcaagttgcacactcactggcatctttgctatggggacattccaatttgcactttcaggaacactctgaattccaagtagaattgatttcccttcttctgtcatctaccttttctcttcattttcccatttttattacccttctttccatttctctctccagtcttccacctggaagccctctctggctaaggacaggcaggtgcccctctctccatcagaggacacctgtactggagagcaacacaggatggtctctgccatgaactggaggccaggaatctcctcactgaaaattacagtatggtaactttgcaaatggtggttgtttcttccaagactccagccctgattgcgcaaaactgaaaggcatgtgaagggaaggaagaggaagagtgcaaaacattgaagagagagctgagtgagctgaagagtgaggatatgagtagccccaacccaaacctggagatggggagaaacctacagaatactagccagagctcctccttgtcttggcagcctactagggacctggggaagcaaaaacgaaagctgggcaacatgcctgctttagaatgttttccttctacttacacatcttccacaggtctcagaatctttccttcctctcatccttttctcctatcttcatatctatcagagtatccactgtttattcaacaactactacttgatggtcagacacaaacaaacaagctaggtgctaattaataaagatacgagttttggccgggtgcggtggctcacgcctgtaatcccagcactttgggaggccgaggcgggcgaatcacgaggtcaggagttcaagaccagcctggccaacatggtgaaaccccatctctactaaaaatacaaacaattaactgagcatagtggtgggcacctataataccagctactccggaggctgaggcaggagaatcgcttgaacccaggaggcagaggttgcagtgagctgagatcgcgccactgcactctagccggagtgacagagtaagactctgtctcaaaaataaataaataaataaataaataaataaataaataaataaataaataaaaaataataatacaagttttcataagcacacttctaa

SEQ ID NO: 156366 - DNA, 1685 bp, Homo sapiens
  Payload ID: 10666
  Gene Symbol: MOG
  Gene Name: myelin oligodendrocyte glycoprotein
  ENST ID: ENST00000415631
  CDS Start-End: 1-759
atggcaagcttatcgagaccctctctgcccagctgcctctgctccttcctcctcctcctcctcctccaagtgtcttccagctatgcagggcagttcagagtgataggaccaagacaccctatccgggctctggtcggggatgaagtggaattgccatgtcgcatatctcctgggaagaacgctacaggcatggaggtggggtggtaccgcccccccttctctagggtggttcatctctacagaaatggcaaggaccaagatggagaccaggcacctgaatatcggggccggacagagctgctgaaagatgctattggtgagggaaaggtgactctcaggatccggaatgtaaggttctcagatgaaggaggtttcacctgcttcttccgagatcattcttaccaagaggaggcagcaatggaattgaaagtagaagatcctttctactgggtgagccctggagtgctggttctcctcgcggtgctgcctgtgctcctcctgcagatcactgttggcctcgtcttcctctgcctgcagtacagactgagaggaaaacttcgagcagagatagagaatctccaccggacttttgatccccactttctgagggtgccctgctggaagataaccctgtttgtaattgtgccggttcttggacccttggttgccttgatcatctgctacaactggctacatcgaagactagcagggcaattccttgaagagctactcttccacctggaagccctctctggctaaggacaggcaggtgcccctctctccatcagaggacacctgtactggagagcaacacaggatggtctctgccatgaactggaggccaggaatctcctcactgaaaattacagtatggtaactttgcaaatggtggttgtttcttccaagactccagccctgattgcgcaaaactgaaaggcatgtgaagggaaggaagaggaagagtgcaaaacattgaagagagagctgagtgagctgaagagtgaggatatgagtagccccaacccaaacctggagatggggagaaacctacagaatactagccagagctcctccttgtcttggcagcctactagggacctggggaagcaaaaacgaaagctgggcaacatgcctgctttagaatgttttccttctacttacacatcttccacaggtctcagaatctttccttcctctcatccttttctcctatcttcatatctatcagagtatccactgtttattcaacaactactacttgatggtcagacacaaacaaacaagctaggtgctaattaataaagatatgagttttggccgggtgcggtggctcacgcctgtaatcccagcactttgggaggccgaggcgggcgaatcacgaggtcaggagttcgagaccagcctggccaacatggtgaaaccccatctctactaaaaatacaaacaattaactgagcatagtggtgggcacctataataccagctactccggaggctgaggcaggagaatcgcttgaacccaggaggcagaggttgcagtgagctgagatcgcgccactgcactctagccagagtgacagagtaagactctgtctcaaaaataaataaataaataaataaataaataaataaataaataaataaataaaaaataataatacaagttttcataagcacacttctaa

SEQ ID NO: 156367 - DNA, 1587 bp, Homo sapiens; identical to SEQ ID NO: 156354
  Payload ID: 10666
  Gene Symbol: MOG
  Gene Name: myelin oligodendrocyte glycoprotein
  Uniprot ID: Q16653
  ENST ID: ENST00000452233
  CDS Start-End: 1-396

SEQ ID NO: 156368 - DNA, 2499 bp, Homo sapiens
  Payload ID: 10666
  Gene Symbol: MOG
  Gene Name: myelin oligodendrocyte glycoprotein
  Uniprot ID: Q16653
  ENST ID: ENST00000419309
  CDS Start-End: 119-1006
agcactgccctccaagatcttcccttgggcttttcagcagtaaggggacatgcaccccaagggcctccacttggcctgaccttgctgcgggggctctctgtccccaggaacagtagagatggcaagcttatcgagaccctctctgcccagctgcctctgctccttcctcctcctcctcctcctccaagtgtcttccagctatgcagggcagttcagagtgataggaccaagacaccctatccgggctctggtcggggatgaagtggaattgccatgtcgcatatctcctgggaagaacgctacaggcatggaggtggggtggtaccgcccccccttctctagggtggttcatctctacagaaatggcaaggaccaagatggagaccaggcacctgaatatcggggccggacagagctgctgaaagatgctattggtgagggaaaggtgactctcaggatccggaatgtaaggttctcagatgaaggaggtttcacctgcttcttccgagatcattcttaccaagaggaggcagcaatggaattgaaagtagaagatcctttctactgggtgagccctggagtgctggttctcctcgcggtgctgcctgtgctcctcctgcagatcactgttggcctcgtcttcctctgcctgcagtacagactgagaggaaaacttcgagcagagatagagaatctccaccggacttttgatccccactttctgagggtgccctgctggaagataaccctgtttgtaattgtgccggttcttggacccttggttgccttgatcatctgctacaactggctacatcgaagactagcagggcaattccttgaagagctacgtaagttctcttctctctgttataagcagagaataaaaagccaggaaagggagacagaagcaacaagaggaagaggcgggctattgagggatcacattcccagaggaaaggaggagctggagagcctgggtggagggaagactcctcctgggaggtagagggcaaagaagccagctgttagagacacatttacaggtggcagagaagctggaggcactcctatctgccacctgatccattcctccttcactgcccctaagcaggaatccaaccctagctggtctcattgcccattccacagcaactgcccagtgcctcacctctcagatcaaccattgaggcaggaatggagacaagatgaccccaagggcttttcttctccctagttcaatggttttatgatacaaactactgacatacgtttttcaagttattttctccttcttctaggaaatcccttctgagtgatgtcacatcttggcaggggtggaggagagcctggttgcccagggatttgtccttggggacatctcatccatcaagttgcacactcactggcatctttgctatggggacattccaatttgcactttcaggaacactctgaattccaagtagaattgatttcccttcttctgtcatctaccttttctcttcattttcccatttttattacccttctttccatttctctctccagtcttccacctggaagccctctctggctaaggacaggcaggtgcccctctctccatcagaggacacctgtactggagagcaacacaggatggtctctgccatgaactggaggccaggaatctcctcactgaaaattacagtatggtaactttgcaaatggtggttgtttcttccaagactccagccctgattgcgcaaaactgaaaggcatgtgaagggaaggaagaggaagagtgcaaaacattgaagagagagctgagtgagctgaagagtgaggatatgagtagccccaacccaaacctggagatggggagaaacctacagaatactagccagagctcctccttgtcttggcagcctactagggacctggggaagcaaaaacgaaagctgggcaacatgcctgctttagaatgttttccttctacttacacatcttccacaggtctcagaatctttccttcctctcatccttttctcctatcttcatatctatcagagtatccactgtttattcaacaactactacttgatggtcagacacaaacaaacaagctaggtgctaattaataaagatacgagttttggccgggtgcggtggctcacgcctgtaatcccagcactttgggaggccgaggcgggcgaatcacgaggtcaggagttcaagaccagcctggccaacatggtgaaaccccatctctactaaaaatacaaacaattaactgagcatagtggtgggcacctataataccagctactccggaggctgaggcaggagaatcgcttgaacccaggaggcagaggttgcagtgagctgagatcgcgccactgcactctagccggagtgacagagtaagactctgtctcaaaaataaataaataaataaataaataaataaataaataaataaataaaaaataataatacaagttttcataagcacacttctaa

SEQ ID NO: 156369 - DNA, 1533 bp, Homo sapiens
  Payload ID: 10666
  Gene Symbol: MOG
  Gene Name: myelin oligodendrocyte glycoprotein
  ENST ID: ENST00000434870
  CDS Start-End: 1-615
agcttatcgagaccctctctgcccagctgcctctgctccttcctcctcctcctcctcctccaagtgtcttccagctatgcagggcagttcagagtgataggaccaagacaccctatccgggctctggtcggggatgaagtggaattgccatgtcgcatatctcctgggaagaacgctacaggcatggaggtggggtggtaccgcccccccttctctagggtggttcatctctacagaaatggcaaggaccaagatggagaccaggcacctgaatatcggggccggacagagctgctgaaagatgctattggtgagggaaaggtgactctcaggatccggaatgtaaggttctcagatgaaggaggtttcacctgcttcttccgagatcattcttaccaagaggaggcagcaatggaattgaaagtagaagatcctttctactgggtgagccctggagtgctggttctcctcgcggtgctgcctgtgctcctcctgcagatcactcttggcctcgtcttcctctgcctgcagtacagactgagaggaaaacttcgagcagagatagagaatctccaccggacttttgtcttccacctggaagccctctctggctaaggacaggcaggtgcccctctctccatcagaggacacctgtactggagagcaacacaggatggtctctgccatgaactggaggccaggaatctcctcactgaaaattacagtatggtaactttgcaaatggtggttgtttcttccaagactccagccctgattgcgcaaaactgaaaggcatgtgaagggaaggaagaggaagagtgcaaaacattgaagagagagctgagtgagctgaagagtgaggatatgagtagccccaacccaaacctggagatggggagaaacctacagaatactagccagagctcctccttgtcttggcagcctactagggacctggggaagcaaaaacgaaagctgggcaacatgcctgctttagaatgttttccttctacttacacatcttccacaggtctcagaatctttccttcctctcatccttttctcctatcttcatatctatcagagtatccactgtttattcaacaactactacttgatggtcagacacaaacaaacaagctaggtgctaattaataaagatacgagttttggccgggtgcggtggctcacgcctgtaatcccagcactttgggaggccgaggcgggcgaatcacgaggtcaggagttcaagaccagcctggccaacatggtgaaaccccatctctactaaaaatacaaacaattaactgagcatagtggtgggcacctataataccagctactccggaggctgaggcaggagaatcgcttgaacccaggaggcagaggttgcagtgagctgagatcgcgccactgcactctagccggagtgacagagtaagactctgtctcaaaaataaataaataaataaataaataaataaataaataaataaaaaataataatacaagttttcataagcacacttctaa

SEQ ID NO: 156370 - DNA, 1685 bp, Homo sapiens; identical to SEQ ID NO: 156366
  Payload ID: 10666
  Gene Symbol: MOG
  Gene Name: myelin oligodendrocyte glycoprotein
  ENST ID: ENST00000427061
  CDS Start-End: 1-759

SEQ ID NO: 156371 - DNA, 1685 bp, Homo sapiens
  Payload ID: 10666
  Gene Symbol: MOG
  Gene Name: myelin oligodendrocyte glycoprotein
  ENST ID: ENST00000418693
  CDS Start-End: 1-759
atggcaagcttatcgagaccctctctgcccagctgcctctgctccttcctcctcctcctcctcctccaagtgtcttccagctatgcagggcagttcagagtgataggaccaagacaccctatccgggctctggtcggggatgaagtggaattgccatgtcgcatatctcctgggaagaacgctacaggcatggaggtggggtggtaccgcccccccttctctagggtggttcatctctacagaaatggcaaggaccaagatggagaccaggcacctgaatatcggggccggacagagctgctgaaagatgctattggtgagggaaaggtgactctcaggatccggaatgtaaggttctcagatgaaggaggtttcacctgcttcttccgagatcattcttaccaagaggaggcagcaatggaattgaaagtagaagatcctttctactgggtgagccctggagtgctggttctcctcgcggtgctgcctgtgctcctcctgcagatcactgttggcctcgtcttcctctgcctgcagtacagactgagaggaaaacttcgagcagagatagagaatctccaccggacttttgatccccactttctgagggtgccctgctggaagataaccctgtttgtaattgtgccggttcttggacccttggttgccttgatcatctgctacaactggctacatcgaagactagcagggcaattccttgaagagctactcttccacctggaagccctctctggctaaggacaggcaggtgcccctctctccatcagaggacacctgtactggagagcaacacaggatggtctctgccatgaactggaggccaggaatctcctcactgaaaattacagtatggtaactttgcaaatggtggttgtttcttccaagactccagccctgattgcgcaaaactgaaaggcatgtgaagggaaggaagaggaagagtgcaaaacattgaagagagagctgagtgagctgaagagtgaggatatgagtagccccaacccaaacctggagatggggagaaacctacagaatactagccagagctcctccttgtcttggcagcctactagggacctggggaagcaaaaacgaaagctgggcaacatgcctgctttagaatgttttccttctacttacacatcttccacaggtctcagaatctttccttcctctcatccttttctcctatcttcatatctatcagagtatccactgtttattcaacaactactacttgatggtcagacacaaacaaacaagctaggtgctaattaataaagatacgagttttggccgggtgcggtggctcacgcctgtaatcccagcactttgggaggccgaggcgggcgaatcacgaggtcaggagttcaagaccagcctggccaacatggtgaaaccccatctctactaaaaatacaaacaattaactgagcatagtggtgggcacctataataccagctactccggaggctgaggcaggagaatcgcttgaacccaggaggcagaggttgcagtgagctgagatcgcgccactgcactctagccggagtgacagagtaagactctgtctcaaaaataaataaataaataaataaataaataaataaataaataaataaataaaaaataataatacaagttttcataagcacacttctaa

SEQ ID NO: 156372 - DNA, 2503 bp, Homo sapiens; identical to SEQ ID NO: 156335
  Payload ID: 10666
  Gene Symbol: MOG
  Gene Name: myelin oligodendrocyte glycoprotein
  Uniprot ID: Q16653
  ENST ID: ENST00000425145
  CDS Start-End: 119-1006

SEQ ID NO: 156373 - DNA, 1541 bp, Homo sapiens
  Payload ID: 10666
  Gene Symbol: MOG
  Gene Name: myelin oligodendrocyte glycoprotein
  Uniprot ID: Q16653
  ENST ID: ENST00000428719
  CDS Start-End: 1-615
agcttatcgagaccctctctgcccagctgcctctgctccttcctcctcctcctcctcctccaagtgtcttccagctatgcagggcagttcagagtgataggaccaagacaccctatccgggctctggtcggggatgaagtggaattgccatgtcgcatatctcctgggaagaacgctacaggcatggaggtggggtggtaccgcccccccttctctagggtggttcatctctacagaaatggcaaggaccaagatggagaccaggcacctgaatatcggggccggacagagctgctgaaagatgctattggtgagggaaaggtgactctcaggatccggaatgtaaggttctcagatgaaggaggtttcacctgcttcttccgagatcattcttaccaagaggaggcagcaatggaattgaaagtagaagatcctttctactgggtgagccctggagtgctggttctcctcgcggtgctgcctgtgctcctcctgcagatcactgttggcctcgtcttcctctgcctgcagtacagactgagaggaaaacttcgagcagagatagagaatctccaccggacttttgtcttccacctggaagccctctctggctaaggacaggcaggtgcccctctctccatcagaggacacctgtactggagagcaacacaggatggtctctgccatgaactggaggccaggaatctcctcactgaaaattacagtatggtaactttgcaaatggtggttgtttcttccaagactccagccctgattgcgcaaaactgaaaggcatgtgaagggaaggaagaggaagagtgcaaaacattgaagagagagctgagtgagctgaagagtgaggatatgagtagccccaacccaaacctggagatggggagaaacctacagaatactagccagagctcctccttgtcttggcagcctactagggacctggggaagcaaaaacgaaagctgggcaacatgcctgctttagaatgttttccttctacttacacatcttccacaggtctcagaatctttccttcctctcatccttttctcctatcttcatatctatcagagtatccactgtttattcaacaactactacttgatggtcagacacaaacaaacaagctaggtgctaattaataaagatacgagttttggccgggtgcggtggctcacgcctgtaatcccagcactttgggaggccgaggcgggcgaatcacgaggtcaggagttcaagaccagcctggccaacatggtgaaaccccatctctactaaaaatacaaacaattaactgagcatagtggtgggcacctataataccagctactccggaggctgaggcaggagaatcgcttgaacccaggaggcagaggttgcagtgagctgagatcgcgccactgcactctagccggagtgacagagtaagactctgtctcaaaaataaataaataaataaataaataaataaataaataaataaataaataaaaaataataatacaagttttcataagcacacttctaa

SEQ ID NO: 156374 - DNA, 1545 bp, Homo sapiens
  Payload ID: 10666
  Gene Symbol: MOG
  Gene Name: myelin oligodendrocyte glycoprotein
  Uniprot ID: Q16653
  ENST ID: ENST00000448816
  CDS Start-End: 1-615
agcttatcgagaccctctctgcccagctgcctctgctccttcctcctcctcctcctcctccaagtgtcttccagctatgcagggcagttcagagtgataggaccaagacaccctatccgggctctggtcggggatgaagtggaattgccatgtcgcatatctcctgggaagaacgctacaggcatggaggtggggtggtaccgcccccccttctctagggtggttcatctctacagaaatggcaaggaccaagatggagaccaggcacctgaatatcggggccggacagagctgctgaaagatgctattggtgagggaaaggtgactctcaggatccggaatgtaaggttctcagatgaaggaggtttcacctgcttcttccgagatcattcttaccaagaggaggcagcaatggaattgaaagtagaagatcctttctactgggtgagccctggagtgctggttctcctcgcggtgctgcctgtgctcctcctgcagatcactgttggcctcgtcttcctctgcctgcagtacagactgagaggaaaacttcgagcagagatagagaatctccaccggacttttgtcttccacctggaagccctctctggctaaggacaggcaggtgcccctctctccatcagaggacacctgtactggagagcaacacaggatggtctctgccatgaactggaggccaggaatctcctcactgaaaattacagtatggtaactttgcaaatggtggttgtttcttccaagactccagccctgattgcgcaaaactgaaaggcatgtgaagggaaggaagaggaagagtgcaaaacattgaagagagagctgagtgagctgaagagtgaggatatgagtagccccaacccaaacctggagatggggagaaacctacagaatactagccagagctcctccttgtcttggcagcctactagggacctggggaagcaaaaacgaaagctgggcaacatgcctgctttagaatgttttccttctacttacacatcttccacaggtctcagaatctttccttcctctcatccttttctcctatcttcatatctatcagagtatccactgtttattcaacaactactacttgatggtcagacacaaacaaacaagctaggtgctaattaataaagatacgagttttggccgggtgcggtggctcacgcctgtaatcccagcactttgggaggccgaggcgggcgaatcacgaggtcaggagttcaagaccagcctggccaacatggtgaaaccccatctctactaaaaatacaaacaattaactgagcatagtggtgggcacctataataccagctactccggaggctgaggcaggagaatcgcttgaacccaggaggcagaggttgcagtgagctgagatcgcgccactgcactctagccggagtgacagagtaagactctgtctcaaaaataaataaataaataaataaataaataaataaataaataaataaataaataaaaaataataatacaagttttcataagcacacttctaa

SEQ ID NO: 156375 - DNA, 1568 bp, Homo sapiens; identical to SEQ ID NO: 156336
  Payload ID: 10666
  Gene Symbol: MOG
  Gene Name: myelin oligodendrocyte glycoprotein
  Uniprot ID: Q16653
  ENST ID: ENST00000434177
  CDS Start-End: 1-642

SEQ ID NO: 156376 - DNA, 2507 bp, Homo sapiens
  Payload ID: 10666
  Gene Symbol: MOG
  Gene Name: myelin oligodendrocyte glycoprotein
  Uniprot ID: Q16653
  ENST ID: ENST00000439884
  CDS Start-End: 119-1006
agcactgccctccaagatcttcccttgggcttttcagcagtaaggggacatgcaccccaagggcctccacttggcctgaccttgctgcgggggctctctgtccccaggaacagtagagatggcaagcttatcgagaccctctctgcccagctgcctctgctccttcctcctcctcctcctcctccaagtgtcttccagctatgcagggcagttcagagtgataggaccaagacaccctatccgggctctggtcggggatgaagtggaattgccatgtcgcatatctcctgggaagaacgctacaggcatggaggtggggtggtaccgcccccccttctctagggtggttcatctctacagaaatggcaaggaccaagatggagaccaggcacctgaatatcggggccggacagagctgctgaaagatgctattggtgagggaaaggtgactctcaggatccggaatgtaaggttctcagatgaaggaggtttcacctgcttcttccgagatcattcttaccaagaggaggcagcaatggaattgaaagtagaagatcctttctactgggtgagccctggagtgctggttctcctcgcggtgctgcctgtgctcctcctgcagatcactgttggcctcgtcttcctctgcctgcagtacagactgagaggaaaacttcgagcagagatagagaatctccaccggacttttgatccccactttctgagggtgccctgctggaagataaccctgtttgtaattgtgccggttcttggacccttggttgccttgatcatctgctacaactggctacatcgaagactagcagggcaattccttgaagagctacgtaagttctcttctctctgttataagcagagaataaaaagccaggaaagggagacagaagcaacaagaggaagaggcgggctattgagggatcacattcccagaggaaaggaggagctggagagcctgggtggagggaagactcctcctgggaggtagagggcaaagaagccagctgttagagacacatttacaggtggcagagaagctggaggcactcctatctgccacctgatccattcctccttcactgcccctaagcaggaatccaaccctagctggtctcattgcccattccacagcaactgcccagtgcctcacctctcagatcaaccattgaggcaggaatggagacaagatgaccccaagggcttttcttctccctagttcaatggttttatgatacaaactactgacatacgtttttcaagttattttctccttcttctaggaaatcccttctgagtgatgtcacatcttggcaggggtggaggagagcctggttgcccagggatttgtccttggggacatctcatccatcaagttgcacactcactggcatctttgctatggggacattccaatttgcactttcaggaacactctgaattccaagtagaattgatttcccttcttctgtcatctaccttttctcttcattttcccatttttattacccttctttccatttctctctccagtcttccacctggaagccctctctggctaaggacaggcaggtgcccctctctccatcagaggacacctgtactggagagcaacacaggatggtctctgccatgaactggaggccaggaatctcctcactgaaaattacagtatggtaactttgcaaatggtggttgtttcttccaagactccagccctgattgcgcaaaactgaaaggcatgtgaagggaaggaagaggaagagtgcaaaacattgaagagagagctgagtgagctgaagagtgaggatatgagtagccccaacccaaacctggagatggggagaaacctacagaatactagccagagctcctccttgtcttggcagcctactagggacctggggaagcaaaaacgaaagctgggcaacatgcctgctttagaatgttttccttctacttacacatcttccacaggtctcagaatctttccttcctctcatccttttctcctatcttcatatctatcagagtatccactgtttattcaacaactactacttgatggtcagacacaaacaaacaagctaggtgctaattaataaagatacgagttttggccgggtgcggtggctcacgcctgtaatcccagcactttgggaggccgaggcgggcgaatcacgaggtcaggagttcaagaccagcctggccaacatggtgaaaccccatctctactaaaaatacaaacaattaactgagcatagtggtgggcacctataataccagctactccggaggctgaggcaggagaatcgcttgaacccaggaggcagaggttgcagtgagctgagatcgcgccactgcactctagccggagtgacagagtaagactctgtctcaaaaataaataaataaataaataaataaataaataaataaataaataaataaataaaaaataataatacaagttttcataagcacacttctaa

SEQ ID NO: 156377 - DNA, 1541 bp, Homo sapiens; identical to SEQ ID NO: 156355
  Payload ID: 10666
  Gene Symbol: MOG
  Gene Name: myelin oligodendrocyte glycoprotein
  Uniprot ID: Q16653
  ENST ID: ENST00000442629
  CDS Start-End: 1-615

SEQ ID NO: 156378 - DNA, 1689 bp, Homo sapiens
  Payload ID: 10666
  Gene Symbol: MOG
  Gene Name: myelin oligodendrocyte glycoprotein
  ENST ID: ENST00000444952
  CDS Start-End: 1-759
atggcaagcttatcgagaccctctctgcccagctgcctctgctccttcctcctcctcctcctcctccaagtgtcttccagctatgcagggcagttcagagtgataggaccaagacaccctatccgggctctggtcggggatgaagtggaattgccatgtcgcatatctcctgggaagaacgctacaggcatggaggtggggtggtaccgcccccccttctctagggtggttcatctctacagaaatggcaaggaccaagatggagaccaggcacctgaatatcggggccggacagagctgctgaaagatgctattggtgagggaaaggtgactctcaggatccggaatgtaaggttctcagatgaaggaggtttcacctgcttcttccgagatcattcttaccaagaggaggcagcaatggaattgaaagtagaagatcctttctactgggtgagccctggagtgctggttctcctcgcggtgctgcctgtgctcctcctgcagatcactgttggcctcgtcttcctctgcctgcagtacagactgagaggaaaacttcgagcagagatagagaatctccaccggacttttgatccccactttctgagggtgccctgctggaagataaccctgtttgtaattgtgccggttcttggacccttggttgccttgatcatctgctacaactggctacatcgaagactagcagggcaattccttgaagagctactcttccacctggaagccctctctggctaaggacaggcaggtgcccctctctccatcagaggacacctgtactggagagcaacacaggatggtctctgccatgaactggaggccaggaatctcctcactgaaaattacagtatggtaactttgcaaatggtggttgtttcttccaagactccagccctgattgcgcaaaactgaaaggcatgtgaagggaaggaagaggaagagtgcaaaacattgaagagagagctgagtgagctgaagagtgaggatatgagtagccccaacccaaacctggagatggggagaaacctacagaatactagccagagctcctccttgtcttggcagcctactagggacctggggaagcaaaaacgaaagctgggcaacatgcctgctttagaatgttttccttctacttacacatcttccacaggtctcagaatctttccttcctctcatccttttctcctatcttcatatctatcagagtatccactgtttattcaacaactactacttgatggtcagacacaaacaaacaagctaggtgctaattaataaagatacgagttttggccgggtgcggtggctcacgcctgtaatcccagcactttgggaggccgaggcgggcgaatcacgaggtcaggagttcaagaccagcctggccaacatggtgaaaccccatctctactaaaaatacaaacaattaactgagcatagtggtgggcacctataataccagctactccggaggctgaggcaggagaatcgcttgaacccaggaggcagaggttgcagtgagctgagatcgcgccactgcactctagccggagtgacagagtaagactctgtctcaaaaataaataaataaataaataaataaataaataaataaataaataaataaataaaaaataataatacaagttttcataagcacacttctaa

SEQ ID NO: 156379 - DNA, 1677 bp, Homo sapiens
  Payload ID: 10666
  Gene Symbol: MOG
  Gene Name: myelin oligodendrocyte glycoprotein
  ENST ID: ENST00000450634
  CDS Start-End: 1-759
atggcaagcttatcgagaccctctctgcccagctgcctctgctccttcctcctcctcctcctcctccaagtgtcttccagctatgcagggcagttcagagtgataggaccaagacaccctatccgggctctggtcggggatgaagtggaattgccatgtcgcatatctcctgggaagaacgctacaggcatggaggtggggtggtaccgcccccccttctctagggtggttcatctctacagaaatggcaaggaccaagatggagaccaggcacctgaatatcggggccggacagagctgctgaaagatgctattggtgagggaaaggtgactctcaggatccggaatgtaaggttctcagatgaaggaggtttcacctgcttcttccgagatcattcttaccaagaggaggcagcaatggaattgaaagtagaagatcctttctactgggtgagccctggagtgctggttctcctcgcggtgctgcctgtgctcctcctgcagatcactcttggcctcgtcttcctctgcctgcagtacagactgagaggaaaacttcgagcagagatagagaatctccaccggacttttgatccccactttctgagggtgccctgctggaagataaccctgtttgtaattgtgccggttcttggacccttggttgccttgatcatctgctacaactggctacatcgaagactagcagggcaattccttgaagagctactcttccacctggaagccctctctggctaaggacaggcaggtgcccctctctccatcagaggacacctgtactggagagcaacacaggatggtctctgccatgaactggaggccaggaatctcctcactgaaaattacagtatggtaactttgcaaatggtggttgtttcttccaagactccagccctgattgcgcaaaactgaaaggcatgtgaagggaaggaagaggaagagtgcaaaacattgaagagagagctgagtgagctgaagagtgaggatatgagtagccccaacccaaacctggagatggggagaaacctacagaatactagccagagctcctccttgtcttggcagcctactagggacctggggaagcaaaaacgaaagctgggcaacatgcctgctttagaatgttttccttctacttacacatcttccacaggtctcagaatctttccttcctctcatccttttctcctatcttcatatctatcagagtatccactgtttattcaacaactactacttgatggtcagacacaaacaaacaagctaggtgctaattaataaagatacgagttttggccgggtgcggtggctcacgcctgtaatcccagcactttgggaggccgaggcgggcgaatcacgaggtcaggagttcaagaccagcctggccaacatggtgaaaccccatctctactaaaaatacaaacaattaactgagcatagtggtgggcacctataataccagctactccggaggctgaggcaggagaatcgcttgaacccaggaggcagaggttgcagtgagctgagatcgcgccactgcactctagccggagtgacagagtaagactctgtctcaaaaataaataaataaataaataaataaataaataaataaataaaaaataataatacaagttttcataagcacacttctaa

SEQ ID NO: 156380 - DNA, 1730 bp, Homo sapiens; identical to SEQ ID NO: 156353
  Payload ID: 10666
  Gene Symbol: MOG
  Gene Name: myelin oligodendrocyte glycoprotein
  ENST ID: ENST00000417635
  CDS Start-End: 1-539

SEQ ID NO: 156381 - DNA, 2142 bp, Homo sapiens
  Payload ID: 10666
  Gene Symbol: MOG
  Gene Name: myelin oligodendrocyte glycoprotein
  Uniprot ID: Q16653
  ENST ID: ENST00000447285
  CDS Start-End: 212-955
agcccttttgtgtgagtgcctggcaagggtgacgtggggctgtttctgcgggcacagctgcagcaattaccggagtggaggcagggcccaggcagcactgccctccaagatcttcccttgggcttttcagcagtaaggggacatgcaccccaagggcctccacttggcctgaccttgctgcgggggctctctgtccccaggaacagtagagatggcaagcttatcgagaccctctctgcccagctgcctctgctccttcctcctcctcctcctcctccaagtgtcttccagctatgcagggcagttcagagtgataggaccaagacaccctatccgggctctggtcggggatgaagtggaattgccatgtcgcatatctcctgggaagaacgctacaggcatggaggtggggtggtaccgcccccccttctctagggtggttcatctctacagaaatggcaaggaccaagatggagaccaggcacctgaatatcggggccggacagagctgctgaaagatgctattggtgagggaaaggtgactctcaggatccggaatgtaaggttctcagatgaaggaggtttcacctgcttcttccgagatcattcttaccaagaggaggcagcaatggaattgaaagtagaagatcctttctactgggtgagccctggagtgctggttctcctcgcggtgctgcctgtgctcctcctgcagatcactgttggcctcgtcttcctctgcctgcagtacagactgagaggaaaacttcgagcagagatagagaatctccaccggacttttgatccccactttctgagggtgccctgctggaagataaccctgtttgtaattgtgccggttcttggacccttggttgccttgatcatctgctacaactggctacatcgaagactagcagggcaattccttgaagagctacgaaatcccttctgagtgatgtcacatcttggcaggggtggaggagagcctggttgcccagggatttgtccttggggacatctcatccatcaagttgcacactcactggcatctttgctatggggacattccaatttgcactttcaggaacactctgaattccaagtagaattgatttcccttcttctgtcatctaccttttctcttcattttcccatttttattacccttctttccatttctctctccagtcttccacctggaagccctctctggctaaggacaggcaggtgcccctctctccatcagaggacacctgtactggagagcaacacaggatggtctctgccatgaactggaggccaggaatctcctcactgaaaattacagtatggtaactttgcaaatggtggttgtttcttccaagactccagccctgattgcgcaaaactgaaaggcatgtgaagggaaggaagaggaagagtgcaaaacattgaagagagagctgagtgagctgaagagtgaggatatgagtagccccaacccaaacctggagatggggagaaacctacagaatactagccagagctcctccttgtcttggcagcctactagggacctggggaagcaaaaacgaaagctgggcaacatgcctgctttagaatgttttccttctacttacacatcttccacaggtctcagaatctttccttcctctcatccttttctcctatcttcatatctatcagagtatccactgtttattcaacaactactacttgatggtcagacacaaacaaacaagctaggtgctaattaataaagatacgagttttggccgggtgcggtggctcacgcctgtaatcccagcactttgggaggccgaggcgggcgaatcacgaggtcaggagttcaagaccagcctggccaacatggtgaaaccccatctctactaaaaatacaaacaattaactgagcatagtggtgggcacctataataccagctactccggaggctgaggcaggagaatcgcttgaacccaggaggcagaggttgcagtgagctgagatcgcgccactgcactctagccggagtgacagagtaagactctgtctcaaaaataaataaataaataaataaataaataaataaataaataaataaaaaataataatacaagttttcataagcacacttctaa

SEQ ID NO: 156382 - DNA, 1612 bp, Homo sapiens
  Payload ID: 10666
  Gene Symbol: MOG
  Gene Name: myelin oligodendrocyte glycoprotein
  Uniprot ID: Q16653
  ENST ID: ENST00000457626
  CDS Start-End: 1-690
atggcaagcttatcgagaccctctctgcccagctgcctctgctccttcctcctcctcctcctcctccaagtgtcttccagctatgcagggcagttcagagtgataggaccaagacaccctatccgggctctggtcggggatgaagtggaattgccatgtcgcatatctcctgggaagaacgctacaggcatggaggtggggtggtaccgcccccccttctctagggtggttcatctctacagaaatggcaaggaccaagatggagaccaggcacctgaatatcggggccggacagagctgctgaaagatgctattggtgagggaaaggtgactctcaggatccggaatgtaaggttctcagatgaaggaggtttcacctgcttcttccgagatcattcttaccaagaggaggcagcaatggaattgaaagtagaagatcctttctactgggtgagccctggagtgctggttctcctcgcggtgctgcctgtgctcctcctgcagatcactgttggcctcgtcttcctctgcctgcagtacagactgagaggaaaacttcgagcagagatagagaatctccaccggacttttgagtcctttggtgttctaggaccccaggttaaggaaccaaaaaagacagggcaattccttgaagagctactcttccacctggaagccctctctggctaaggacaggcaggtgcccctctctccatcagaggacacctgtactggagagcaacacaggatggtctctgccatgaactggaggccaggaatctcctcactgaaaattacagtatggtaactttgcaaatggtggttgtttcttccaagactccagccctgattgcgcaaaactgaaaggcatgtgaagggaaggaagaggaagagtgcaaaacattgaagagagagctgagtgagctgaagagtgaggatatgagtagccccaacccaaacctggagatggggagaaacctacagaatactagccagagctcctccttgtcttggcagcctactagggacctggggaagcaaaaacgaaagctgggcaacatgcctgctttagaatgttttccttctacttacacatcttccacaggtctcagaatctttccttcctctcatccttttctcctatcttcatatctatcagagtatccactgtttattcaacaactactacttgatggtcagacacaaacaaacaagctaggtgctaattaataaagatacgagttttggccgggtgcggtggctcacgcctgtaatcccagcactttgggaggccgaggcgggcgaatcacgaggtcaggagttcgagaccagcctggccaacatggtgaaaccccatctctactaaaaatacaaacaattaactgagcatagtggtgggcacctataataccagctactccggaggctgaggcaggagaatcgcttgaacccaggaggcagaggttgcagtgagctgagatcgcgccactgcactctagccagagtgacagagtaagactctgtctcaaaaataaataaataaataaataaataaataaataaataaataaataaaaaataataatacaagttttcataagcacacttctaa

SEQ ID NO: 156383 - DNA, 1560 bp, Homo sapiens
  Payload ID: 10666
  Gene Symbol: MOG
  Gene Name: myelin oligodendrocyte glycoprotein
  ENST ID: ENST00000453271
  CDS Start-End: 1-642
atggcaagcttatcgagaccctctctgcccagctgcctctgctccttcctcctcctcctcctcctccaagtgtcttccagctatgcagggcagttcagagtgataggaccaagacaccctatccgggctctggtcggggatgaagtggaattgccatgtcgcatatctcctgggaagaacgctacaggcatggaggtggggtggtaccgcccccccttctctagggtggttcatctctacagaaatggcaaggaccaagatggagaccaggcacctgaatatcggggccggacagagctgctgaaagatgctattggtgagggaaaggtgactctcaggatccggaatgtaaggttctcagatgaaggaggtttcacctgcttcttccgagatcattcttaccaagaggaggcagcaatggaattgaaagtagaagatcctttctactgggtgagccctggagtgctggttctcctcgcggtgctgcctgtgctcctcctgcagatcactcttggcctcgtcttcctctgcctgcagtacagactgagaggaaaacttcgagcagagatagagaatctccaccggacttttgggcaattccttgaagagctactcttccacctggaagccctctctggctaaggacaggcaggtgcccctctctccatcagaggacacctgtactggagagcaacacaggatggtctctgccatgaactggaggccaggaatctcctcactgaaaattacagtatggtaactttgcaaatggtggttgtttcttccaagactccagccctgattgcgcaaaactgaaaggcatgtgaagggaaggaagaggaagagtgcaaaacattgaagagagagctgagtgagctgaagagtgaggatatgagtagccccaacccaaacctggagatggggagaaacctacagaatactagccagagctcctccttgtcttggcagcctactagggacctggggaagcaaaaacgaaagctgggcaacatgcctgctttagaatgttttccttctacttacacatcttccacaggtctcagaatctttccttcctctcatccttttctcctatcttcatatctatcagagtatccactgtttattcaacaactactacttgatggtcagacacaaacaaacaagctaggtgctaattaataaagatacgagttttggccgggtgcggtggctcacgcctgtaatcccagcactttgggaggccgaggcgggcgaatcacgaggtcaggagttcaagaccagcctggccaacatggtgaaaccccatctctactaaaaatacaaacaattaactgagcatagtggtgggcacctataataccagctactccggaggctgaggcaggagaatcgcttgaacccaggaggcagaggttgcagtgagctgagatcgcgccactgcactctagccggagtgacagagtaagactctgtctcaaaaataaataaataaataaataaataaataaataaataaataaaaaataataatacaagttttcataagcacacttctaa

SEQ ID NO: 156384 - DNA, 1681 bp, Homo sapiens
  Payload ID: 10666
  Gene Symbol: MOG
  Gene Name: myelin oligodendrocyte glycoprotein
  ENST ID: ENST00000441138
  CDS Start-End: 1-759
atggcaagcttatcgagaccctctctgcccagctgcctctgctccttcctcctcctcctcctcctccaagtgtcttccagctatgcagggcagttcagagtgataggaccaagacaccctatccgggctctggtcggggatgaagtggaattgccatgtcgcatatctcctgggaagaacgctacaggcatggaggtggggtggtaccgcccccccttctctagggtggttcatctctacagaaatggcaaggaccaagatggagaccaggcacctgaatatcggggccggacagagctgctgaaagatgctattggtgagggaaaggtgactctcaggatccggaatgtaaggttctcagatgaaggaggtttcacctgcttcttccgagatcattcttaccaagaggaggcagcaatggaattgaaagtagaagatcctttctactgggtgagccctggagtgctggttctcctcgcggtgctgcctgtgctcctcctgcagatcactgttggcctcgtcttcctctgcctgcagtacagactgagaggaaaacttcgagcagagatagagaatctccaccggacttttgatccccactttctgagggtgccctgctggaagataaccctgtttgtaattgtgccggttcttggacccttggttgccttgatcatctgctacaactggctacatcgaagactagcagggcaattccttgaagagctactcttccacctggaagccctctctggctaaggacaggcaggtgcccctctctccatcagaggacacctgtactggagagcaacacaggatggtctctgccatgaactggaggccaggaatctcctcactgaaaattacagtatggtaactttgcaaatggtggttgtttcttccaagactccagccctgattgcgcaaaactgaaaggcatgtgaagggaaggaagaggaagagtgcaaaacattgaagagagagctgagtgagctgaagagtgaggatatgagtagccccaacccaaacctggagatggggagaaacctacagaatactagccagagctcctccttgtcttggcagcctactagggacctggggaagcaaaaacgaaagctgggcaacatgcctgctttagaatgttttccttctacttacacatcttccacaggtctcagaatctttccttcctctcatccttttctcctatcttcatatctatcagagtatccactgtttattcaacaactactacttgatggtcagacacaaacaaacaagctaggtgctaattaataaagatacgagttttggccgggtgcggtggctcacgcctgtaatcccagcactttgggaggccgaggcgggcgaatcacgaggtcaggagttcaagaccagcctggccaacatggtgaaaccccatctctactaaaaatacaaacaattaactgagcatagtggtgggcacctataataccagctactccggaggctgaggcaggagaatcgcttgaacccaggaggcagaggttgcagtgagctgagatcgcgccactgcactctagccggagtgacagagtaagactctgtctcaaaaataaataaataaataaataaataaataaataaataaataaataaaaaataataatacaagttttcataagcacacttctaa

SEQ ID NO: 156385 - DNA, 1616 bp, Homo sapiens; identical to SEQ ID NO: 156347
  Payload ID: 10666
  Gene Symbol: MOG
  Gene Name: myelin oligodendrocyte glycoprotein
  Uniprot ID: Q16653
  ENST ID: ENST00000430264
  CDS Start-End: 1-690

SEQ ID NO: 156386 - DNA, 1734 bp, Homo sapiens
  Payload ID: 10666
  Gene Symbol: MOG
  Gene Name: myelin oligodendrocyte glycoprotein
  ENST ID: ENST00000421858
  CDS Start-End: 1-539
ggcagttcagagtgataggaccaagacaccctatccgggctctggtcggggatgaagtggaattgccatgtcgcatatctcctgggaagaacgctacaggcatggaggtggggtggtaccgcccccccttctctagggtggttcatctctacagaaatggcaaggaccaagatggagaccaggcacctgaatatcggggccggacagagctgctgaaagatgctattggtgagggaaaggtgactctcaggatccggaatgtaaggttctcagatgaaggaggtttcacctgcttcttccgagatcattcttaccaagaggaggcagcaatggaattgaaagtagaagatcctttctactgggtgagccctggagtgctggttctcctcgcggtgctgcctgtgctcctcctgcagatcactgttggcctcgtcttcctctgcctgcagtacagactgagaggaaaacttcgagcagagatagagaatctccaccggacttttgggcaattccttgaagagctacgaaatcccttctgagtgatgtcacatcttggcaggggtggaggagagcctggttgcccagggatttgtccttggggacatctcatccatcaagttgcacactcactggcatctttgctatggggacattccaatttgcactttcaggaacactctgaattccaagtagaattgatttcccttcttctgtcatctaccttttctcttcattttcccatttttattacccttctttccatttctctctccagtcttccacctggaagccctctctggctaaggacaggcaggtgcccctctctccatcagaggacacctgtactggagagcaacacaggatggtctctgccatgaactggaggccaggaatctcctcactgaaaattacagtatggtaactttgcaaatggtggttgtttcttccaagactccagccctgattgcgcaaaactgaaaggcatgtgaagggaaggaagaggaagagtgcaaaacattgaagagagagctgagtgagctgaagagtgaggatatgagtagccccaacccaaacctggagatggggagaaacctacagaatactagccagagctcctccttgtcttggcagcctactagggacctggggaagcaaaaacgaaagctgggcaacatgcctgctttagaatgttttccttctacttacacatcttccacaggtctcagaatctttccttcctctcatccttttctcctatcttcatatctatcagagtatccactgtttattcaacaactactacttgatggtcagacacaaacaaacaagctaggtgctaattaataaagatacgagttttggccgggtgcggtggctcacgcctgtaatcccagcactttgggaggccgaggcgggcgaatcacgaggtcaggagttcaagaccagcctggccaacatggtgaaaccccatctctactaaaaatacaaacaattaactgagcatagtggtgggcacctataataccagctactccggaggctgaggcaggagaatcgcttgaacccaggaggcagaggttgcagtgagctgagatcgcgccactgcactctagccggagtgacagagtaagactctgtctcaaaaataaataaataaataaataaataaataaataaataaataaataaataaataaaaaataataatacaagttttcataagcacacttctaa

SEQ ID NO: 156387 - DNA, 1866 bp, Homo sapiens
  Payload ID: 10666
  Gene Symbol: MOG
  Gene Name: myelin oligodendrocyte glycoprotein
  Uniprot ID: Q16653
  ENST ID: ENST00000414889
  CDS Start-End: 1-675
atggcaagcttatcgagaccctctctgcccagctgcctctgctccttcctcctcctcctcctcctccaagtgtcttccagctatgcagggcagttcagagtgataggaccaagacaccctatccgggctctggtcggggatgaagtggaattgccatgtcgcatatctcctgggaagaacgctacaggcatggaggtggggtggtaccgcccccccttctctagggtggttcatctctacagaaatggcaaggaccaagatggagaccaggcacctgaatatcggggccggacagagctgctgaaagatgctattggtgagggaaaggtgactctcaggatccggaatgtaaggttctcagatgaaggaggtttcacctgcttcttccgagatcattcttaccaagaggaggcagcaatggaattgaaagtagaagatcctttctactgggtgagccctggagtgctggttctcctcgcggtgctgcctgtgctcctcctgcagatcactgttggcctcgtcttcctctgcctgcagtacagactgagaggaaaacttcgagcagagatagagaatctccaccggacttttgagtcctttggtgttctaggaccccaggttaaggaaccaaaaaagacagggcaattccttgaagagctacgaaatcccttctgagtgatgtcacatcttggcaggggtggaggagagcctggttgcccagggatttgtccttggggacatctcatccatcaagttgcacactcactggcatctttgctatggggacattccaatttgcactttcaggaacactctgaattccaagtagaattgatttcccttcttctgtcatctaccttttctcttcattttcccatttttattacccttctttccatttctctctccagtcttccacctggaagccctctctggctaaggacaggcaggtgcccctctctccatcagaggacacctgtactggagagcaacacaggatggtctctgccatgaactggaggccaggaatctcctcactgaaaattacagtatggtaactttgcaaatggtggttgtttcttccaagactccagccctgattgcgcaaaactgaaaggcatgtgaagggaaggaagaggaagagtgcaaaacattgaagagagagctgagtgagctgaagagtgaggatatgagtagccccaacccaaacctggagatggggagaaacctacagaatactagccagagctcctccttgtcttggcagcctactagggacctggggaagcaaaaacgaaagctgggcaacatgcctgctttagaatgttttccttctacttacacatcttccacaggtctcagaatctttccttcctctcatccttttctcctatcttcatatctatcagagtatccactgtttattcaacaactactacttgatggtcagacacaaacaaacaagctaggtgctaattaataaagatatgagttttggccgggtgcggtggctcacgcctgtaatcccagcactttgggaggccgaggcgggcgaatcacgaggtcaggagttcgagaccagcctggccaacatggtgaaaccccatctctactaaaaatacaaacaattaactgagcatagtggtgggcacctataataccagctactccggaggctgaggcaggagaatcgcttgaacccaggaggcagaggttgcagtgagctgagatcgcgccactgcactctagccagagtgacagagtaagactctgtctcaaaaataaataaataaataaataaataaataaataaataaataaataaataaaaaataataatacaagttttcataagcacacttctaa

SEQ ID NO: 156388 - DNA, 1866 bp, Homo sapiens
  Payload ID: 10666
  Gene Symbol: MOG
  Gene Name: myelin oligodendrocyte glycoprotein
  Uniprot ID: Q16653
  ENST ID: ENST00000415546
  CDS Start-End: 1-675
atggcaagcttatcgagaccctctctgcccagctgcctctgctccttcctcctcctcctcctcctccaagtgtcttccagctatgcagggcagttcagagtgataggaccaagacaccctatccgggctctggtcggggatgaagtggaattgccatgtcgcatatctcctgggaagaacgctacaggcatggaggtggggtggtaccgcccccccttctctagggtggttcatctctacagaaatggcaaggaccaagatggagaccaggcacctgaatatcggggccggacagagctgctgaaagatgctattggtgagggaaaggtgactctcaggatccggaatgtaaggttctcagatgaaggaggtttcacctgcttcttccgagatcattcttaccaagaggaggcagcaatggaattgaaagtagaagatcctttctactgggtgagccctggagtgctggttctcctcgcggtgctgcctgtgctcctcctgcagatcactgttggcctcgtcttcctctgcctgcagtacagactgagaggaaaacttcgagcagagatagagaatctccaccggacttttgagtcctttggtgttctaggaccccaggttaaggaaccaaaaaagacagggcaattccttgaagagctacgaaatcccttctgagtgatgtcacatcttggcaggggtggaggagagcctggttgcccagggatttgtccttggggacatctcatccatcaagttgcacactcactggcatctttgctatggggacattccaatttgcactttcaggaacactctgaattccaagtagaattgatttcccttcttctgtcatctaccttttctcttcattttcccatttttattacccttctttccatttctctctccagtcttccacctggaagccctctctggctaaggacaggcaggtgcccctctctccatcagaggacacctgtactggagagcaacacaggatggtctctgccatgaactggaggccaggaatctcctcactgaaaattacagtatggtaactttgcaaatggtggttgtttcttccaagactccagccctgattgcgcaaaactgaaaggcatgtgaagggaaggaagaggaagagtgcaaaacattgaagagagagctgagtgagctgaagagtgaggatatgagtagccccaacccaaacctggagatggggagaaacctacagaatactagccagagctcctccttgtcttggcagcctactagggacctggggaagcaaaaacgaaagctgggcaacatgcctgctttagaatgttttccttctacttacacatcttccacaggtctcagaatctttccttcctctcatccttttctcctatcttcatatctatcagagtatccactgtttattcaacaactactacttgatggtcagacacaaacaaacaagctaggtgctaattaataaagatacgagttttggccgggtgcggtggctcacgcctgtaatcccagcactttgggaggccgaggcgggcgaatcacgaggtcaggagttcaagaccagcctggccaacatggtgaaaccccatctctactaaaaatacaaacaattaactgagcatagtggtgggcacctataataccagctactccggaggctgaggcaggagaatcgcttgaacccaggaggcagaggttgcagtgagctgagatcgcgccactgcactctagccggagtgacagagtaagactctgtctcaaaaataaataaataaataaataaataaataaataaataaataaataaataaaaaataataatacaagttttcataagcacacttctaa

SEQ ID NO: 156389 - DNA, 1870 bp, Homo sapiens
  Payload ID: 10666
  Gene Symbol: MOG
  Gene Name: myelin oligodendrocyte glycoprotein
  Uniprot ID: Q16653
  ENST ID: ENST00000412760
  CDS Start-End: 1-675
atggcaagcttatcgagaccctctctgcccagctgcctctgctccttcctcctcctcctcctcctccaagtgtcttccagctatgcagggcagttcagagtgataggaccaagacaccctatccgggctctggtcggggatgaagtggaattgccatgtcgcatatctcctgggaagaacgctacaggcatggaggtggggtggtaccgcccccccttctctagggtggttcatctctacagaaatggcaaggaccaagatggagaccaggcacctgaatatcggggccggacagagctgctgaaagatgctattggtgagggaaaggtgactctcaggatccggaatgtaaggttctcagatgaaggaggtttcacctgcttcttccgagatcattcttaccaagaggaggcagcaatggaattgaaagtagaagatcctttctactgggtgagccctggagtgctggttctcctcgcggtgctgcctgtgctcctcctgcagatcactgttggcctcgtcttcctctgcctgcagtacagactgagaggaaaacttcgagcagagatagagaatctccaccggacttttgagtcctttggtgttctaggaccccaggttaaggaaccaaaaaagacagggcaattccttgaagagctacgaaatcccttctgagtgatgtcacatcttggcaggggtggaggagagcctggttgcccagggatttgtccttggggacatctcatccatcaagttgcacactcactggcatctttgctatggggacattccaatttgcactttcaggaacactctgaattccaagtagaattgatttcccttcttctgtcatctaccttttctcttcattttcccatttttattacccttctttccatttctctctccagtcttccacctggaagccctctctggctaaggacaggcaggtgcccctctctccatcagaggacacctgtactggagagcaacacaggatggtctctgccatgaactggaggccaggaatctcctcactgaaaattacagtatggtaactttgcaaatggtggttgtttcttccaagactccagccctgattgcgcaaaactgaaaggcatgtgaagggaaggaagaggaagagtgcaaaacattgaagagagagctgagtgagctgaagagtgaggatatgagtagccccaacccaaacctggagatggggagaaacctacagaatactagccagagctcctccttgtcttggcagcctactagggacctggggaagcaaaaacgaaagctgggcaacatgcctgctttagaatgttttccttctacttacacatcttccacaggtctcagaatctttccttcctctcatccttttctcctatcttcatatctatcagagtatccactgtttattcaacaactactacttgatggtcagacacaaacaaacaagctaggtgctaattaataaagatacgagttttggccgggtgcggtggctcacgcctgtaatcccagcactttgggaggccgaggcgggcgaatcacgaggtcaggagttcaagaccagcctggccaacatggtgaaaccccatctctactaaaaatacaaacaattaactgagcatagtggtgggcacctataataccagctactccggaggctgaggcaggagaatcgcttgaacccaggaggcagaggttgcagtgagctgagatcgcgccactgcactctagccggagtgacagagtaagactctgtctcaaaaataaataaataaataaataaataaataaataaataaataaataaataaataaaaaataataatacaagttttcataagcacacttctaa

SEQ ID NO: 156390 - DNA, 1681 bp, Homo sapiens
  Payload ID: 10666
  Gene Symbol: MOG
  Gene Name: myelin oligodendrocyte glycoprotein
  ENST ID: ENST00000421125
  CDS Start-End: 1-759
atggcaagcttatcgagaccctctctgcccagctgcctctgctccttcctcctcctcctcctcctccaagtgtcttccagctatgcagggcagttcagagtgataggaccaagacaccctatccgggctctggtcggggatgaagtggaattgccatgtcgcatatctcctgggaagaacgctacaggcatggaggtggggtggtaccgcccccccttctctagggtggttcatctctacagaaatggcaaggaccaagatggagaccaggcacctgaatatcggggccggacagagctgctgaaagatgctattggtgagggaaaggtgactctcaggatccggaatgtaaggttctcagatgaaggaggtttcacctgcttcttccgagatcattcttaccaagaggaggcagcaatggaattgaaagtagaagatcctttctactgggtgagccctggagtgctggttctcctcgcggtgctgcctgtgctcctcctgcagatcactgttggcctcgtcttcctctgcctgcagtacagactgagaggaaaacttcgagcagagatagagaatctccaccggacttttgatccccactttctgagggtgccctgctggaagataaccctgtttgtaattgtgccggttcttggacccttggttgccttgatcatctgctacaactggctacatcgaagactagcagggcaattccttgaagagctactcttccacctggaagccctctctggctaaggacaggcaggtgcccctctctccatcagaggacacctgtactggagagcaacacaggatggtctctgccatgaactggaggccaggaatctcctcactgaaaattacagtatggtaactttgcaaatggtggttgtttcttccaagactccagccctgattgcgcaaaactgaaaggcatgtgaagggaaggaagaggaagagtgcaaaacattgaagagagagctgagtgagctgaagagtgaggatatgagtagccccaacccaaacctggagatggggagaaacctacagaatactagccagagctcctccttgtcttggcagcctactagggacctggggaagcaaaaacgaaagctgggcaacatgcctgctttagaatgttttccttctacttacacatcttccacaggtctcagaatctttccttcctctcatccttttctcctatcttcatatctatcagagtatccactgtttattcaacaactactacttgatggtcagacacaaacaaacaagctaggtgctaattaataaagatacgagttttggccgggtgcggtggctcacgcctgtaatcccagcactttgggaggccgaggcgggcgaatcacgaggtcaggagttcgagaccagcctggccaacatggtgaaaccccatctctactaaaaatacaaacaattaactgagcatagtggtgggcacctataataccagctactccggaggctgaggcaggagaatcgcttgaacccaggaggcagaggttgcagtgagctgagatcgcgccactgcactctagccagagtgacagagtaagactctgtctcaaaaataaataaataaataaataaataaataaataaataaataaataaaaaataataatacaagttttcataagcacacttctaa

SEQ ID NO: 156391 - DNA, 2146 bp, Homo sapiens
  Payload ID: 10666
  Gene Symbol: MOG
  Gene Name: myelin oligodendrocyte glycoprotein
  Uniprot ID: Q16653
  ENST ID: ENST00000417019
  CDS Start-End: 212-955
agcccttttgtgtgagtgcctggcaagggtgacgtggggctgtttctgcgggcacagctgcagcaattaccggagtggaggcagggcccaggcagcactgccctccaagatcttcccttgggcttttcagcagtaaggggacatgcaccccaagggcctccacttggcctgaccttgctgcgggggctctctgtccccaggaacagtagagatggcaagcttatcgagaccctctctgcccagctgcctctgctccttcctcctcctcctcctcctccaagtgtcttccagctatgcagggcagttcagagtgataggaccaagacaccctatccgggctctggtcggggatgaagtggaattgccatgtcgcatatctcctgggaagaacgctacaggcatggaggtggggtggtaccgcccccccttctctagggtggttcatctctacagaaatggcaaggaccaagatggagaccaggcacctgaatatcggggccggacagagctgctgaaagatgctattggtgagggaaaggtgactctcaggatccggaatgtaaggttctcagatgaaggaggtttcacctgcttcttccgagatcattcttaccaagaggaggcagcaatggaattgaaagtagaagatcctttctactgggtgagccctggagtgctggttctcctcgcggtgctgcctgtgctcctcctgcagatcactgttggcctcgtcttcctctgcctgcagtacagactgagaggaaaacttcgagcagagatagagaatctccaccggacttttgatccccactttctgagggtgccctgctggaagataaccctgtttgtaattgtgccggttcttggacccttggttgccttgatcatctgctacaactggctacatcgaagactagcagggcaattccttgaagagctacgaaatcccttctgagtgatgtcacatcttggcaggggtggaggagagcctggttgcccagggatttgtccttggggacatctcatccatcaagttgcacactcactggcatctttgctatggggacattccaatttgcactttcaggaacactctgaattccaagtagaattgatttcccttcttctgtcatctaccttttctcttcattttcccatttttattacccttctttccatttctctctccagtcttccacctggaagccctctctggctaaggacaggcaggtgcccctctctccatcagaggacacctgtactggagagcaacacaggatggtctctgccatgaactggaggccaggaatctcctcactgaaaattacagtatggtaactttgcaaatggtggttgtttcttccaagactccagccctgattgcgcaaaactgaaaggcatgtgaagggaaggaagaggaagagtgcaaaacattgaagagagagctgagtgagctgaagagtgaggatatgagtagccccaacccaaacctggagatggggagaaacctacagaatactagccagagctcctccttgtcttggcagcctactagggacctggggaagcaaaaacgaaagctgggcaacatgcctgctttagaatgttttccttctacttacacatcttccacaggtctcagaatctttccttcctctcatccttttctcctatcttcatatctatcagagtatccactgtttattcaacaactactacttgatggtcagacacaaacaaacaagctaggtgctaattaataaagatacgagttttggccgggtgcggtggctcacgcctgtaatcccagcactttgggaggccgaggcgggcgaatcacgaggtcaggagttcaagaccagcctggccaacatggtgaaaccccatctctactaaaaatacaaacaattaactgagcatagtggtgggcacctataataccagctactccggaggctgaggcaggagaatcgcttgaacccaggaggcagaggttgcagtgagctgagatcgcgccactgcactctagccggagtgacagagtaagactctgtctcaaaaataaataaataaataaataaataaataaataaataaataaataaataaaaaataataatacaagttttcataagcacacttctaa

SEQ ID NO: 156392 - DNA, 1616 bp, Homo sapiens
  Payload ID: 10666
  Gene Symbol: MOG
  Gene Name: myelin oligodendrocyte glycoprotein
  Uniprot ID: Q16653
  ENST ID: ENST00000439634
  CDS Start-End: 1-690
atggcaagcttatcgagaccctctctgcccagctgcctctgctccttcctcctcctcctcctcctccaagtgtcttccagctatgcagggcagttcagagtgataggaccaagacaccctatccgggctctggtcggggatgaagtggaattgccatgtcgcatatctcctgggaagaacgctacaggcatggaggtggggtggtaccgcccccccttctctagggtggttcatctctacagaaatggcaaggaccaagatggagaccaggcacctgaatatcggggccggacagagctgctgaaagatgctattggtgagggaaaggtgactctcaggatccggaatgtaaggttctcagatgaaggaggtttcacctgcttcttccgagatcattcttaccaagaggaggcagcaatggaattgaaagtagaagatcctttctactgggtgagccctggagtgctggttctcctcgcggtgctgcctgtgctcctcctgcagatcactgttggcctcgtcttcctctgcctgcagtacagactgagaggaaaacttcgagcagagatagagaatctccaccggacttttgagtcctttggtgttctaggaccccaggttaaggaaccaaaaaagacagggcaattccttgaagagctactcttccacctggaagccctctctggctaaggacaggcaggtgcccctctctccatcagaggacacctgtactggagagcaacacaggatggtctctgccatgaactggaggccaggaatctcctcactgaaaattacagtatggtaactttgcaaatggtggttgtttcttccaagactccagccctgattgcgcaaaactgaaaggcatgtgaagggaaggaagaggaagagtgcaaaacattgaagagagagctgagtgagctgaagagtgaggatatgagtagccccaacccaaacctggagatggggagaaacctacagaatactagccagagctcctccttgtcttggcagcctactagggacctggggaagcaaaaacgaaagctgggcaacatgcctgctttagaatgttttccttctacttacacatcttccacaggtctcagaatctttccttcctctcatccttttctcctatcttcatatctatcagagtatccactgtttattcaacaactactacttgatggtcagacacaaacaaacaagctaggtgctaattaataaagatacgagttttggccgggtgcggtggctcacgcctgtaatcccagcactttgggaggccgaggcgggcgaatcacgaggtcaggagttcaagaccagcctggccaacatggtgaaaccccatctctactaaaaatacaaacaattaactgagcatagtggtgggcacctataataccagctactccggaggctgaggcaggagaatcgcttgaacccaggaggcagaggttgcagtgagctgagatcgcgccactgcactctagccggagtgacagagtaagactctgtctcaaaaataaataaataaataaataaataaataaataaataaataaataaataaaaaataataatacaagttttcataagcacacttctaa

SEQ ID NO: 156393 - DNA, 1722 bp, Homo sapiens
  Payload ID: 10666
  Gene Symbol: MOG
  Gene Name: myelin oligodendrocyte glycoprotein
  ENST ID: ENST00000431084
  CDS Start-End: 1-539
ggcagttcagagtgataggaccaagacaccctatccgggctctggtcggggatgaagtggaattgccatgtcgcatatctcctgggaagaacgctacaggcatggaggtggggtggtaccgcccccccttctctagggtggttcatctctacagaaatggcaaggaccaagatggagaccaggcacctgaatatcggggccggacagagctgctgaaagatgctattggtgagggaaaggtgactctcaggatccggaatgtaaggttctcagatgaaggaggtttcacctgcttcttccgagatcattcttaccaagaggaggcagcaatggaattgaaagtagaagatcctttctactgggtgagccctggagtgctggttctcctcgcggtgctgcctgtgctcctcctgcagatcactcttggcctcgtcttcctctgcctgcagtacagactgagaggaaaacttcgagcagagatagagaatctccaccggacttttgggcaattccttgaagagctacgaaatcccttctgagtgatgtcacatcttggcaggggtggaggagagcctggttgcccagggatttgtccttggggacatctcatccatcaagttgcacactcactggcatctttgctatggggacattccaatttgcactttcaggaacactctgaattccaagtagaattgatttcccttcttctgtcatctaccttttctcttcattttcccatttttattacccttctttccatttctctctccagtcttccacctggaagccctctctggctaaggacaggcaggtgcccctctctccatcagaggacacctgtactggagagcaacacaggatggtctctgccatgaactggaggccaggaatctcctcactgaaaattacagtatggtaactttgcaaatggtggttgtttcttccaagactccagccctgattgcgcaaaactgaaaggcatgtgaagggaaggaagaggaagagtgcaaaacattgaagagagagctgagtgagctgaagagtgaggatatgagtagccccaacccaaacctggagatggggagaaacctacagaatactagccagagctcctccttgtcttggcagcctactagggacctggggaagcaaaaacgaaagctgggcaacatgcctgctttagaatgttttccttctacttacacatcttccacaggtctcagaatctttccttcctctcatccttttctcctatcttcatatctatcagagtatccactgtttattcaacaactactacttgatggtcagacacaaacaaacaagctaggtgctaattaataaagatacgagttttggccgggtgcggtggctcacgcctgtaatcccagcactttgggaggccgaggcgggcgaatcacgaggtcaggagttcaagaccagcctggccaacatggtgaaaccccatctctactaaaaatacaaacaattaactgagcatagtggtgggcacctataataccagctactccggaggctgaggcaggagaatcgcttgaacccaggaggcagaggttgcagtgagctgagatcgcgccactgcactctagccggagtgacagagtaagactctgtctcaaaaataaataaataaataaataaataaataaataaataaataaaaaataataatacaagttttcataagcacacttctaa

SEQ ID NO: 156394 - DNA, 1726 bp, Homo sapiens
  Payload ID: 10666
  Gene Symbol: MOG
  Gene Name: myelin oligodendrocyte glycoprotein
  ENST ID: ENST00000440073
  CDS Start-End: 1-539
ggcagttcagagtgataggaccaagacaccctatccgggctctggtcggggatgaagtggaattgccatgtcgcatatctcctgggaagaacgctacaggcatggaggtggggtggtaccgcccccccttctctagggtggttcatctctacagaaatggcaaggaccaagatggagaccaggcacctgaatatcggggccggacagagctgctgaaagatgctattggtgagggaaaggtgactctcaggatccggaatgtaaggttctcagatgaaggaggtttcacctgcttcttccgagatcattcttaccaagaggaggcagcaatggaattgaaagtagaagatcctttctactgggtgagccctggagtgctggttctcctcgcggtgctgcctgtgctcctcctgcagatcactgttggcctcgtcttcctctgcctgcagtacagactgagaggaaaacttcgagcagagatagagaatctccaccggacttttgggcaattccttgaagagctacgaaatcccttctgagtgatgtcacatcttggcaggggtggaggagagcctggttgcccagggatttgtccttggggacatctcatccatcaagttgcacactcactggcatctttgctatggggacattccaatttgcactttcaggaacactctgaattccaagtagaattgatttcccttcttctgtcatctaccttttctcttcattttcccatttttattacccttctttccatttctctctccagtcttccacctggaagccctctctggctaaggacaggcaggtgcccctctctccatcagaggacacctgtactggagagcaacacaggatggtctctgccatgaactggaggccaggaatctcctcactgaaaattacagtatggtaactttgcaaatggtggttgtttcttccaagactccagccctgattgcgcaaaactgaaaggcatgtgaagggaaggaagaggaagagtgcaaaacattgaagagagagctgagtgagctgaagagtgaggatatgagtagccccaacccaaacctggagatggggagaaacctacagaatactagccagagctcctccttgtcttggcagcctactagggacctggggaagcaaaaacgaaagctgggcaacatgcctgctttagaatgttttccttctacttacacatcttccacaggtctcagaatctttccttcctctcatccttttctcctatcttcatatctatcagagtatccactgtttattcaacaactactacttgatggtcagacacaaacaaacaagctaggtgctaattaataaagatacgagttttggccgggtgcggtggctcacgcctgtaatcccagcactttgggaggccgaggcgggcgaatcacgaggtcaggagttcgagaccagcctggccaacatggtgaaaccccatctctactaaaaatacaaacaattaactgagcatagtggtgggcacctataataccagctactccggaggctgaggcaggagaatcgcttgaacccaggaggcagaggttgcagtgagctgagatcgcgccactgcactctagccagagtgacagagtaagactctgtctcaaaaataaataaataaataaataaataaataaataaataaataaataaaaaataataatacaagttttcataagcacacttctaa

SEQ ID NO: 156395 - DNA, 1726 bp, Homo sapiens
  Payload ID: 10666
  Gene Symbol: MOG
  Gene Name: myelin oligodendrocyte glycoprotein
  ENST ID: ENST00000417639
  CDS Start-End: 1-539
ggcagttcagagtgataggaccaagacaccctatccgggctctggtcggggatgaagtggaattgccatgtcgcatatctcctgggaagaacgctacaggcatggaggtggggtggtaccgcccccccttctctagggtggttcatctctacagaaatggcaaggaccaagatggagaccaggcacctgaatatcggggccggacagagctgctgaaagatgctattggtgagggaaaggtgactctcaggatccggaatgtaaggttctcagatgaaggaggtttcacctgcttcttccgagatcattcttaccaagaggaggcagcaatggaattgaaagtagaagatcctttctactgggtgagccctggagtgctggttctcctcgcggtgctgcctgtgctcctcctgcagatcactgttggcctcgtcttcctctgcctgcagtacagactgagaggaaaacttcgagcagagatagagaatctccaccggacttttgggcaattccttgaagagctacgaaatcccttctgagtgatgtcacatcttggcaggggtggaggagagcctggttgcccagggatttgtccttggggacatctcatccatcaagttgcacactcactggcatctttgctatggggacattccaatttgcactttcaggaacactctgaattccaagtagaattgatttcccttcttctgtcatctaccttttctcttcattttcccatttttattacccttctttccatttctctctccagtcttccacctggaagccctctctggctaaggacaggcaggtgcccctctctccatcagaggacacctgtactggagagcaacacaggatggtctctgccatgaactggaggccaggaatctcctcactgaaaattacagtatggtaactttgcaaatggtggttgtttcttccaagactccagccctgattgcgcaaaactgaaaggcatgtgaagggaaggaagaggaagagtgcaaaacattgaagagagagctgagtgagctgaagagtgaggatatgagtagccccaacccaaacctggagatggggagaaacctacagaatactagccagagctcctccttgtcttggcagcctactagggacctggggaagcaaaaacgaaagctgggcaacatgcctgctttagaatgttttccttctacttacacatcttccacaggtctcagaatctttccttcctctcatccttttctcctatcttcatatctatcagagtatccactgtttattcaacaactactacttgatggtcagacacaaacaaacaagctaggtgctaattaataaagatacgagttttggccgggtgcggtggctcacgcctgtaatcccagcactttgggaggccgaggcgggcgaatcacgaggtcaggagttcaagaccagcctggccaacatggtgaaaccccatctctactaaaaatacaaacaattaactgagcatagtggtgggcacctataataccagctactccggaggctgaggcaggagaatcgcttgaacccaggaggcagaggttgcagtgagctgagatcgcgccactgcactctagccggagtgacagagtaagactctgtctcaaaaataaataaataaataaataaataaataaataaataaataaataaaaaataataatacaagttttcataagcacacttctaa

SEQ ID NO: 156396 - DNA, 630 bp, Homo sapiens
  Payload ID: 10666
  Gene Symbol: MOG
  Gene Name: myelin oligodendrocyte glycoprotein
  ENST ID: ENST00000416766
  CDS Start-End: 1-630
atggcaagcttatcaagaccctctctgcccagctgcctctgctccttcctcctcctcctcctcctccaagtgtcttccagctatgcagggcagttcagagtgataggaccaagacaccctatccgggctctggtcggggatgaagtggaattgccatgtcgcatatctcctgggaagaacgctacaggcatggaggtggggtggtaccgcccccccttctctagggtggttcatctctacagaaatggcaaggaccaagatggagaccaggcacctgaatatcggggccggacagagctgctgaaagatgctattggtgagggaaaggtgactctcaggatccggaatgtaaggttctcagatgaaggaggtttcacctgcttcttccgagatcattcttaccaagaggaggcagcaatggaattgaaagtagaaggaaaacttcgagcagagatagagaatctccaccggacttttgatccccactttctgagggtgccctgctggaagataaccctgtttgtaattgtgccggttcttggacccttggttgccttgatcatctgctacaactggctacatcgaagactagcagggcaattccttgaagagctacgaaatcccttctga

SEQ ID NO: 156397 - DNA, 1564 bp, Homo sapiens
  Payload ID: 10666
  Gene Symbol: MOG
  Gene Name: myelin oligodendrocyte glycoprotein
  Uniprot ID: Q16653
  ENST ID: ENST00000440561
  CDS Start-End: 1-642
atggcaagcttatcgagaccctctctgcccagctgcctctgctccttcctcctcctcctcctcctccaagtgtcttccagctatgcagggcagttcagagtgataggaccaagacaccctatccgggctctggtcggggatgaagtggaattgccatgtcgcatatctcctgggaagaacgctacaggcatggaggtggggtggtaccgcccccccttctctagggtggttcatctctacagaaatggcaaggaccaagatggagaccaggcacctgaatatcggggccggacagagctgctgaaagatgctattggtgagggaaaggtgactctcaggatccggaatgtaaggttctcagatgaaggaggtttcacctgcttcttccgagatcattcttaccaagaggaggcagcaatggaattgaaagtagaagatcctttctactgggtgagccctggagtgctggttctcctcgcggtgctgcctgtgctcctcctgcagatcactgttggcctcgtcttcctctgcctgcagtacagactgagaggaaaacttcgagcagagatagagaatctccaccggacttttgggcaattccttgaagagctactcttccacctggaagccctctctggctaaggacaggcaggtgcccctctctccatcagaggacacctgtactggagagcaacacaggatggtctctgccatgaactggaggccaggaatctcctcactgaaaattacagtatggtaactttgcaaatggtggttgtttcttccaagactccagccctgattgcgcaaaactgaaaggcatgtgaagggaaggaagaggaagagtgcaaaacattgaagagagagctgagtgagctgaagagtgaggatatgagtagccccaacccaaacctggagatggggagaaacctacagaatactagccagagctcctccttgtcttggcagcctactagggacctggggaagcaaaaacgaaagctgggcaacatgcctgctttagaatgttttccttctacttacacatcttccacaggtctcagaatctttccttcctctcatccttttctcctatcttcatatctatcagagtatccactgtttattcaacaactactacttgatggtcagacacaaacaaacaagctaggtgctaattaataaagatacgagttttggccgggtgcggtggctcacgcctgtaatcccagcactttgggaggccgaggcgggcgaatcacgaggtcaggagttcgagaccagcctggccaacatggtgaaaccccatctctactaaaaatacaaacaattaactgagcatagtggtgggcacctataataccagctactccggaggctgaggcaggagaatcgcttgaacccaggaggcagaggttgcagtgagctgagatcgcgccactgcactctagccagagtgacagagtaagactctgtctcaaaaataaataaataaataaataaataaataaataaataaataaataaaaaataataatacaagttttcataagcacacttctaa

SEQ ID NO: 156398 - DNA, 1587 bp, Homo sapiens
  Payload ID: 10666
  Gene Symbol: MOG
  Gene Name: myelin oligodendrocyte glycoprotein
  Uniprot ID: Q16653
  ENST ID: ENST00000430351
  CDS Start-End: 1-396
atggcaagcttatcgagaccctctctgcccagctgcctctgctccttcctcctcctcctcctcctccaagtgtcttccagctatgcagatcctttctactgggtgagccctggagtgctggttctcctcgcggtgctgcctgtgctcctcctgcagatcactgttggcctcgtcttcctctgcctgcagtacagactgagaggaaaacttcgagcagagatagagaatctccaccggacttttgatccccactttctgagggtgccctgctggaagataaccctgtttgtaattgtgccggttcttggacccttggttgccttgatcatctgctacaactggctacatcgaagactagcagggcaattccttgaagagctacgaaatcccttctgagtgatgtcacatcttggcaggggtggaggagagcctggttgcccagggatttgtccttggggacatctcatccatcaagttgcacactcactggcatctttgctatggggacattccaatttgcactttcaggaacactctgaattccaagtagaattgatttcccttcttctgtcatctaccttttctcttcattttcccatttttattacccttctttccatttctctctccagtcttccacctggaagccctctctggctaaggacaggcaggtgcccctctctccatcagaggacacctgtactggagagcaacacaggatggtctctgccatgaactggaggccaggaatctcctcactgaaaattacagtatggtaactttgcaaatggtggttgtttcttccaagactccagccctgattgcgcaaaactgaaaggcatgtgaagggaaggaagaggaagagtgcaaaacattgaagagagagctgagtgagctgaagagtgaggatatgagtagccccaacccaaacctggagatggggagaaacctacagaatactagccagagctcctccttgtcttggcagcctactagggacctggggaagcaaaaacgaaagctgggcaacatgcctgctttagaatgttttccttctacttacacatcttccacaggtctcagaatctttccttcctctcatccttttctcctatcttcatatctatcagagtatccactgtttattcaacaactactacttgatggtcagacacaaacaaacaagctaggtgctaattaataaagatacgagttttggccgggtgcggtggctcacgcctgtaatcccagcactttgggaggccgaggcgggcgaatcacgaggtcaggagttcaagaccagcctggccaacatggtgaaaccccatctctactaaaaatacaaacaattaactgagcatagtggtgggcacctataataccagctactccggaggctgaggcaggagaatcgcttgaacccaggaggcagaggttgcagtgagctgagatcgcgccactgcactctagccggagtgacagagtaagactctgtctcaaaaataaataaataaataaataaataaataaataaataaataaataaataaaaaataataatacaagttttcataagcacacttctaa

SEQ ID NO: 156399 - DNA, 1583 bp, Homo sapiens
  Payload ID: 10666
  Gene Symbol: MOG
  Gene Name: myelin oligodendrocyte glycoprotein
  Uniprot ID: Q16653
  ENST ID: ENST00000426782
  CDS Start-End: 1-396
atggcaagcttatcgagaccctctctgcccagctgcctctgctccttcctcctcctcctcctcctccaagtgtcttccagctatgcagatcctttctactgggtgagccctggagtgctggttctcctcgcggtgctgcctgtgctcctcctgcagatcactgttggcctcgtcttcctctgcctgcagtacagactgagaggaaaacttcgagcagagatagagaatctccaccggacttttgatccccactttctgagggtgccctgctggaagataaccctgtttgtaattgtgccggttcttggacccttggttgccttgatcatctgctacaactggctacatcgaagactagcagggcaattccttgaagagctacgaaatcccttctgagtgatgtcacatcttggcaggggtggaggagagcctggttgcccagggatttgtccttggggacatctcatccatcaagttgcacactcactggcatctttgctatggggacattccaatttgcactttcaggaacactctgaattccaagtagaattgatttcccttcttctgtcatctaccttttctcttcattttcccatttttattacccttctttccatttctctctccagtcttccacctggaagccctctctggctaaggacaggcaggtgcccctctctccatcagaggacacctgtactggagagcaacacaggatggtctctgccatgaactggaggccaggaatctcctcactgaaaattacagtatggtaactttgcaaatggtggttgtttcttccaagactccagccctgattgcgcaaaactgaaaggcatgtgaagggaaggaagaggaagagtgcaaaacattgaagagagagctgagtgagctgaagagtgaggatatgagtagccccaacccaaacctggagatggggagaaacctacagaatactagccagagctcctccttgtcttggcagcctactagggacctggggaagcaaaaacgaaagctgggcaacatgcctgctttagaatgttttccttctacttacacatcttccacaggtctcagaatctttccttcctctcatccttttctcctatcttcatatctatcagagtatccactgtttattcaacaactactacttgatggtcagacacaaacaaacaagctaggtgctaattaataaagatacgagttttggccgggtgcggtggctcacgcctgtaatcccagcactttgggaggccgaggcgggcgaatcacgaggtcaggagttcgagaccagcctggccaacatggtgaaaccccatctctactaaaaatacaaacaattaactgagcatagtggtgggcacctataataccagctactccggaggctgaggcaggagaatcgcttgaacccaggaggcagaggttgcagtgagctgagatcgcgccactgcactctagccagagtgacagagtaagactctgtctcaaaaataaataaataaataaataaataaataaataaataaataaataaaaaataataatacaagttttcataagcacacttctaa

SEQ ID NO: 156400 - DNA, 1814 bp, Homo sapiens
  Payload ID: 10666
  Gene Symbol: MOG
  Gene Name: myelin oligodendrocyte glycoprotein
  Uniprot ID: Q16653
  ENST ID: ENST00000431798
  CDS Start-End: 1-627
atggcaagcttatcaagaccctctctgcccagctgcctctgctccttcctcctcctcctcctcctccaagtgtcttccagctatgcagggcagttcagagtgataggaccaagacaccctatccgggctctggtcggggatgaagtggaattgccatgtcgcatatctcctgggaagaacgctacaggcatggaggtggggtggtaccgcccccccttctctagggtggttcatctctacagaaatggcaaggaccaagatggagaccaggcacctgaatatcggggccggacagagctgctgaaagatgctattggtgagggaaaggtgactctcaggatccggaatgtaaggttctcagatgaaggaggtttcacctgcttcttccgagatcattcttaccaagaggaggcagcaatggaattgaaagtagaagatcctttctactgggtgagccctggagtgctggttctcctcgcggtgctgcctgtgctcctcctgcagatcactgttggcctcatcttcctctgcctgcagtacagactgagaggaaaacttcgagcagagatagagaatctccaccggacttttgggcaattccttgaagagctacgaaatcccttctgagtgatgtcacatcttggcaggggtggaggagagcctggttgcccagggatttgtccttggggacatctcatccatcaagttgcacactcactggcatctttgctatggggacattccaatttgcactttcaggaacactctgaattccaagtagaattgatttcccttcttctgtcatctaccttttctcttcattttcccatttttattacccttctttccatttctctctccagtcttccacctggaagccctctctggctaaggacaggcaggtgcccctctctccatcagaggacacctgtactggagagcaacacaggatggtctctgccatgaactggaggccaggaatctcctcactgaaaattacagtatggtaactttgcaaatggtggttgtttcttccaagactccagccctgattgcgcaaaactgaaaggcatgtgaagggaaggaagaggaagagtgcaaaacattgaagagagagctgagtgagctgaagagtgaggatatgagtagccccaacccaaacctggagatggggagaaacctacagaatactagccagagctcctccttgtcttggcagcctactagggacctggggaagcaaaaacgaaagctgggcaacatgcctgctttagaatgttttccttctacttacacatcttccacaggtctcagaatctttccttcctctcatccttttctcctatcttcatatctatcagagtatccactgtttattcaacaactactacttgatggtcagacacaaacaaacaagctaggtgctaattaataaagatacgagttttggccgggtgcggtggctcacgcctgtaatcccagcactttgggaggccgaggcgggcgaatcacgaggtcaggagttcaagaccagcctggccaacatggtgaaaccccatctctactaaaaatacaaacaattaactgagcatagtggtgggcacctataataccagctactccggaggctgaggcaggagaatcgcttgaacccaggaggcagaggttgcagtgagctgagatcgtgccactgcactctagccggagtgacagagtaagactctgtctcaaaaataaataaataaataaataaataaataaataaataaataaataaaaaataataatacaagttttcataagcacacttctaa

SEQ ID NO: 156401 - DNA, 1612 bp, Homo sapiens
  Payload ID: 10666
  Gene Symbol: MOG
  Gene Name: myelin oligodendrocyte glycoprotein
  Uniprot ID: Q16653
  ENST ID: ENST00000419274
  CDS Start-End: 1-690
atggcaagcttatcgagaccctctctgcccagctgcctctgctccttcctcctcctcctcctcctccaagtgtcttccagctatgcagggcagttcagagtgataggaccaagacaccctatccgggctctggtcggggatgaagtggaattgccatgtcgcatatctcctgggaagaacgctacaggcatggaggtggggtggtaccgcccccccttctctagggtggttcatctctacagaaatggcaaggaccaagatggagaccaggcacctgaatatcggggccggacagagctgctgaaagatgctattggtgagggaaaggtgactctcaggatccggaatgtaaggttctcagatgaaggaggtttcacctgcttcttccgagatcattcttaccaagaggaggcagcaatggaattgaaagtagaagatcctttctactgggtgagccctggagtgctggttctcctcgcggtgctgcctgtgctcctcctgcagatcactgttggcctcgtcttcctctgcctgcagtacagactgagaggaaaacttcgagcagagatagagaatctccaccggacttttgagtcctttggtgttctaggaccccaggttaaggaaccaaaaaagacagggcaattccttgaagagctactcttccacctggaagccctctctggctaaggacaggcaggtgcccctctctccatcagaggacacctgtactggagagcaacacaggatggtctctgccatgaactggaggccaggaatctcctcactgaaaattacagtatggtaactttgcaaatggtggttgtttcttccaagactccagccctgattgcgcaaaactgaaaggcatgtgaagggaaggaagaggaagagtgcaaaacattgaagagagagctgagtgagctgaagagtgaggatatgagtagccccaacccaaacctggagatggggagaaacctacagaatactagccagagctcctccttgtcttggcagcctactagggacctggggaagcaaaaacgaaagctgggcaacatgcctgctttagaatgttttccttctacttacacatcttccacaggtctcagaatctttccttcctctcatccttttctcctatcttcatatctatcagagtatccactgtttattcaacaactactacttgatggtcagacacaaacaaacaagctaggtgctaattaataaagatacgagttttggccgggtgcggtggctcacgcctgtaatcccagcactttgggaggccgaggcgggcgaatcacgaggtcaggagttcaagaccagcctggccaacatggtgaaaccccatctctactaaaaatacaaacaattaactgagcatagtggtgggcacctataataccagctactccggaggctgaggcaggagaatcgcttgaacccaggaggcagaggttgcagtgagctgagatcgcgccactgcactctagccggagtgacagagtaagactctgtctcaaaaataaataaataaataaataaataaataaataaataaataaataaaaaataataatacaagttttcataagcacacttctaa

SEQ ID NO: 156402 - DNA, 1583 bp, Homo sapiens
  Payload ID: 10666
  Gene Symbol: MOG
  Gene Name: myelin oligodendrocyte glycoprotein
  Uniprot ID: Q16653
  ENST ID: ENST00000433500
  CDS Start-End: 1-396
atggcaagcttatcgagaccctctctgcccagctgcctctgctccttcctcctcctcctcctcctccaagtgtcttccagctatgcagatcctttctactgggtgagccctggagtgctggttctcctcgcggtgctgcctgtgctcctcctgcagatcactgttggcctcgtcttcctctgcctgcagtacagactgagaggaaaacttcgagcagagatagagaatctccaccggacttttgatccccactttctgagggtgccctgctggaagataaccctgtttgtaattgtgccggttcttggacccttggttgccttgatcatctgctacaactggctacatcgaagactagcagggcaattccttgaagagctacgaaatcccttctgagtgatgtcacatcttggcaggggtggaggagagcctggttgcccagggatttgtccttggggacatctcatccatcaagttgcacactcactggcatctttgctatggggacattccaatttgcactttcaggaacactctgaattccaagtagaattgatttcccttcttctgtcatctaccttttctcttcattttcccatttttattacccttctttccatttctctctccagtcttccacctggaagccctctctggctaaggacaggcaggtgcccctctctccatcagaggacacctgtactggagagcaacacaggatggtctctgccatgaactggaggccaggaatctcctcactgaaaattacagtatggtaactttgcaaatggtggttgtttcttccaagactccagccctgattgcgcaaaactgaaaggcatgtgaagggaaggaagaggaagagtgcaaaacattgaagagagagctgagtgagctgaagagtgaggatatgagtagccccaacccaaacctggagatggggagaaacctacagaatactagccagagctcctccttgtcttggcagcctactagggacctggggaagcaaaaacgaaagctgggcaacatgcctgctttagaatgttttccttctacttacacatcttccacaggtctcagaatctttccttcctctcatccttttctcctatcttcatatctatcagagtatccactgtttattcaacaactactacttgatggtcagacacaaacaaacaagctaggtgctaattaataaagatacgagttttggccgggtgcggtggctcacgcctgtaatcccagcactttgggaggccgaggcgggcgaatcacgaggtcaggagttcaagaccagcctggccaacatggtgaaaccccatctctactaaaaatacaaacaattaactgagcatagtggtgggcacctataataccagctactccggaggctgaggcaggagaatcgcttgaacccaggaggcagaggttgcagtgagctgagatcgcgccactgcactctagccggagtgacagagtaagactctgtctcaaaaataaataaataaataaataaataaataaataaataaataaataaaaaataataatacaagttttcataagcacacttctaa

SEQ ID NO: 156403 - DNA, 1537 bp, Homo sapiens
  Payload ID: 10666
  Gene Symbol: MOG
  Gene Name: myelin oligodendrocyte glycoprotein
  Uniprot ID: Q16653
  ENST ID: ENST00000458179
  CDS Start-End: 1-615
agcttatcgagaccctctctgcccagctgcctctgctccttcctcctcctcctcctcctccaagtgtcttccagctatgcagggcagttcagagtgataggaccaagacaccctatccgggctctggtcggggatgaagtggaattgccatgtcgcatatctcctgggaagaacgctacaggcatggaggtggggtggtaccgcccccccttctctagggtggttcatctctacagaaatggcaaggaccaagatggagaccaggcacctgaatatcggggccggacagagctgctgaaagatgctattggtgagggaaaggtgactctcaggatccggaatgtaaggttctcagatgaaggaggtttcacctgcttcttccgagatcattcttaccaagaggaggcagcaatggaattgaaagtagaagatcctttctactgggtgagccctggagtgctggttctcctcgcggtgctgcctgtgctcctcctgcagatcactgttggcctcgtcttcctctgcctgcagtacagactgagaggaaaacttcgagcagagatagagaatctccaccggacttttgtcttccacctggaagccctctctggctaaggacaggcaggtgcccctctctccatcagaggacacctgtactggagagcaacacaggatggtctctgccatgaactggaggccaggaatctcctcactgaaaattacagtatggtaactttgcaaatggtggttgtttcttccaagactccagccctgattgcgcaaaactgaaaggcatgtgaagggaaggaagaggaagagtgcaaaacattgaagagagagctgagtgagctgaagagtgaggatatgagtagccccaacccaaacctggagatggggagaaacctacagaatactagccagagctcctccttgtcttggcagcctactagggacctggggaagcaaaaacgaaagctgggcaacatgcctgctttagaatgttttccttctacttacacatcttccacaggtctcagaatctttccttcctctcatccttttctcctatcttcatatctatcagagtatccactgtttattcaacaactactacttgatggtcagacacaaacaaacaagctaggtgctaattaataaagatacgagttttggccgggtgcggtggctcacgcctgtaatcccagcactttgggaggccgaggcgggcgaatcacgaggtcaggagttcgagaccagcctggccaacatggtgaaaccccatctctactaaaaatacaaacaattaactgagcatagtggtgggcacctataataccagctactccggaggctgaggcaggagaatcgcttgaacccaggaggcagaggttgcagtgagctgagatcgcgccactgcactctagccagagtgacagagtaagactctgtctcaaaaataaataaataaataaataaataaataaataaataaataaataaaaaataataatacaagttttcataagcacacttctaa

SEQ ID NO: 156404 - DNA, 1866 bp, Homo sapiens; identical to SEQ ID NO: 156387
  Payload ID: 10666
  Gene Symbol: MOG
  Gene Name: myelin oligodendrocyte glycoprotein
  Uniprot ID: Q16653
  ENST ID: ENST00000442444
  CDS Start-End: 1-675

SEQ ID NO: 156405 - DNA, 2142 bp, Homo sapiens
  Payload ID: 10666
  Gene Symbol: MOG
  Gene Name: myelin oligodendrocyte glycoprotein
  Uniprot ID: Q16653
  ENST ID: ENST00000427289
  CDS Start-End: 212-955
agcccttttgtgtgagtgcctggcaagggtgacgtggggctgtttctgcgggcacagctgcagcaattaccggagtggaggcagggcccaggcagcactgccctccaagatcttcccttgggcttttcagcagtaaggggacatgcaccccaagggcctccacttggcctgaccttgctgcgggggctctctgtccccaggaacagtagagatggcaagcttatcgagaccctctctgcccagctgcctctgctccttcctcctcctcctcctcctccaagtgtcttccagctatgcagggcagttcagagtgataggaccaagacaccctatccgggctctggtcggggatgaagtggaattgccatgtcgcatatctcctgggaagaacgctacaggcatggaggtggggtggtaccgcccccccttctctagggtggttcatctctacagaaatggcaaggaccaagatggagaccaggcacctgaatatcggggccggacagagctgctgaaagatgctattggtgagggaaaggtgactctcaggatccggaatgtaaggttctcagatgaaggaggtttcacctgcttcttccgagatcattcttaccaagaggaggcagcaatggaattgaaagtagaagatcctttctactgggtgagccctggagtgctggttctcctcgcggtgctgcctgtgctcctcctgcagatcactgttggcctcgtcttcctctgcctgcagtacagactgagaggaaaacttcgagcagagatagagaatctccaccggacttttgatccccactttctgagggtgccctgctggaagataaccctgtttgtaattgtgccggttcttggacccttggttgccttgatcatctgctacaactggctacatcgaagactagcagggcaattccttgaagagctacgaaatcccttctgagtgatgtcacatcttggcaggggtggaggagagcctggttgcccagggatttgtccttggggacatctcatccatcaagttgcacactcactggcatctttgctatggggacattccaatttgcactttcaggaacactctgaattccaagtagaattgatttcccttcttctgtcatctaccttttctcttcattttcccatttttattacccttctttccatttctctctccagtcttccacctggaagccctctctggctaaggacaggcaggtgcccctctctccatcagaggacacctgtactggagagcaacacaggatggtctctgccatgaactggaggccaggaatctcctcactgaaaattacagtatggtaactttgcaaatggtggttgtttcttccaagactccagccctgattgcgcaaaactgaaaggcatgtgaagggaaggaagaggaagagtgcaaaacattgaagagagagctgagtgagctgaagagtgaggatatgagtagccccaacccaaacctggagatggggagaaacctacagaatactagccagagctcctccttgtcttggcagcctactagggacctggggaagcaaaaacgaaagctgggcaacatgcctgctttagaatgttttccttctacttacacatcttccacaggtctcagaatctttccttcctctcatccttttctcctatcttcatatctatcagagtatccactgtttattcaacaactactacttgatggtcagacacaaacaaacaagctaggtgctaattaataaagatacgagttttggccgggtgcggtggctcacgcctgtaatcccagcactttgggaggccgaggcgggcgaatcacgaggtcaggagttcgagaccagcctggccaacatggtgaaaccccatctctactaaaaatacaaacaattaactgagcatagtggtgggcacctataataccagctactccggaggctgaggcaggagaatcgcttgaacccaggaggcagaggttgcagtgagctgagatcgcgccactgcactctagccagagtgacagagtaagactctgtctcaaaaataaataaataaataaataaataaataaataaataaataaataaaaaataataatacaagttttcataagcacacttctaa

SEQ ID NO: 156406 - DNA, 1862 bp, Homo sapiens
  Payload ID: 10666
  Gene Symbol: MOG
  Gene Name: myelin oligodendrocyte glycoprotein
  Uniprot ID: Q16653
  ENST ID: ENST00000438803
  CDS Start-End: 1-675
atggcaagcttatcgagaccctctctgcccagctgcctctgctccttcctcctcctcctcctcctccaagtgtcttccagctatgcagggcagttcagagtgataggaccaagacaccctatccgggctctggtcggggatgaagtggaattgccatgtcgcatatctcctgggaagaacgctacaggcatggaggtggggtggtaccgcccccccttctctagggtggttcatctctacagaaatggcaaggaccaagatggagaccaggcacctgaatatcggggccggacagagctgctgaaagatgctattggtgagggaaaggtgactctcaggatccggaatgtaaggttctcagatgaaggaggtttcacctgcttcttccgagatcattcttaccaagaggaggcagcaatggaattgaaagtagaagatcctttctactgggtgagccctggagtgctggttctcctcgcggtgctgcctgtgctcctcctgcagatcactgttggcctcgtcttcctctgcctgcagtacagactgagaggaaaacttcgagcagagatagagaatctccaccggacttttgagtcctttggtgttctaggaccccaggttaaggaaccaaaaaagacagggcaattccttgaagagctacgaaatcccttctgagtgatgtcacatcttggcaggggtggaggagagcctggttgcccagggatttgtccttggggacatctcatccatcaagttgcacactcactggcatctttgctatggggacattccaatttgcactttcaggaacactctgaattccaagtagaattgatttcccttcttctgtcatctaccttttctcttcattttcccatttttattacccttctttccatttctctctccagtcttccacctggaagccctctctggctaaggacaggcaggtgcccctctctccatcagaggacacctgtactggagagcaacacaggatggtctctgccatgaactggaggccaggaatctcctcactgaaaattacagtatggtaactttgcaaatggtggttgtttcttccaagactccagccctgattgcgcaaaactgaaaggcatgtgaagggaaggaagaggaagagtgcaaaacattgaagagagagctgagtgagctgaagagtgaggatatgagtagccccaacccaaacctggagatggggagaaacctacagaatactagccagagctcctccttgtcttggcagcctactagggacctggggaagcaaaaacgaaagctgggcaacatgcctgctttagaatgttttccttctacttacacatcttccacaggtctcagaatctttccttcctctcatccttttctcctatcttcatatctatcagagtatccactgtttattcaacaactactacttgatggtcagacacaaacaaacaagctaggtgctaattaataaagatacgagttttggccgggtgcggtggctcacgcctgtaatcccagcactttgggaggccgaggcgggcgaatcacgaggtcaggagttcaagaccagcctggccaacatggtgaaaccccatctctactaaaaatacaaacaattaactgagcatagtggtgggcacctataataccagctactccggaggctgaggcaggagaatcgcttgaacccaggaggcagaggttgcagtgagctgagatcgcgccactgcactctagccggagtgacagagtaagactctgtctcaaaaataaataaataaataaataaataaataaataaataaataaataaaaaataataatacaagttttcataagcacacttctaa

SEQ ID NO: 156407 - DNA, 1537 bp, Homo sapiens
  Payload ID: 10666
  Gene Symbol: MOG
  Gene Name: myelin oligodendrocyte glycoprotein
  Uniprot ID: Q16653
  ENST ID: ENST00000457090
  CDS Start-End: 1-615
agcttatcgagaccctctctgcccagctgcctctgctccttcctcctcctcctcctcctccaagtgtcttccagctatgcagggcagttcagagtgataggaccaagacaccctatccgggctctggtcggggatgaagtggaattgccatgtcgcatatctcctgggaagaacgctacaggcatggaggtggggtggtaccgcccccccttctctagggtggttcatctctacagaaatggcaaggaccaagatggagaccaggcacctgaatatcggggccggacagagctgctgaaagatgctattggtgagggaaaggtgactctcaggatccggaatgtaaggttctcagatgaaggaggtttcacctgcttcttccgagatcattcttaccaagaggaggcagcaatggaattgaaagtagaagatcctttctactgggtgagccctggagtgctggttctcctcgcggtgctgcctgtgctcctcctgcagatcactgttggcctcgtcttcctctgcctgcagtacagactgagaggaaaacttcgagcagagatagagaatctccaccggacttttgtcttccacctggaagccctctctggctaaggacaggcaggtgcccctctctccatcagaggacacctgtactggagagcaacacaggatggtctctgccatgaactggaggccaggaatctcctcactgaaaattacagtatggtaactttgcaaatggtggttgtttcttccaagactccagccctgattgcgcaaaactgaaaggcatgtgaagggaaggaagaggaagagtgcaaaacattgaagagagagctgagtgagctgaagagtgaggatatgagtagccccaacccaaacctggagatggggagaaacctacagaatactagccagagctcctccttgtcttggcagcctactagggacctggggaagcaaaaacgaaagctgggcaacatgcctgctttagaatgttttccttctacttacacatcttccacaggtctcagaatctttccttcctctcatccttttctcctatcttcatatctatcagagtatccactgtttattcaacaactactacttgatggtcagacacaaacaaacaagctaggtgctaattaataaagatacgagttttggccgggtgcggtggctcacgcctgtaatcccagcactttgggaggccgaggcgggcgaatcacgaggtcaggagttcaagaccagcctggccaacatggtgaaaccccatctctactaaaaatacaaacaattaactgagcatagtggtgggcacctataataccagctactccggaggctgaggcaggagaatcgcttgaacccaggaggcagaggttgcagtgagctgagatcgcgccactgcactctagccggagtgacagagtaagactctgtctcaaaaataaataaataaataaataaataaataaataaataaataaataaaaaataataatacaagttttcataagcacacttctaa

SEQ ID NO: 156408 - DNA, 958 bp, Homo sapiens
  Payload ID: 10666
  Gene Symbol: MOG
  Gene Name: myelin oligodendrocyte glycoprotein
  Uniprot ID: Q16653
  ENST ID: ENST00000494692
  CDS Start-End: 1-690
atggcaagcttatcaagaccctctctgcccagctgcctctgctccttcctcctcctcctcctcctccaagtgtcttccagctatgcagggcagttcagagtgataggaccaagacaccctatccgggctctggtcggggatgaagtggaattgccatgtcgcatatctcctgggaagaacgctacaggcatggaggtggggtggtaccgcccccccttctctagggtggttcatctctacagaaatggcaaggaccaagatggagaccaggcacctgaatatcggggccggacagagctgctgaaagatgctattggtgagggaaaggtgactctcaggatccggaatgtaaggttctcagatgaaggaggtttcacctgcttcttccgagatcattcttaccaagaggaggcagcaatggaattgaaagtagaagatcctttctactgggtgagccctggagtgctggttctcctcgcggtgctgcctgtgctcctcctgcagatcactgttggcctcatcttcctctgcctgcagtacagactgagaggaaaacttcgagcagagatagagaatctccaccggacttttgagtcctttggtgttctaggaccccaggttaaggaaccaaaaaagacagggcaattccttgaagagctactcttccacctggaagccctctctggctaaggacaggcaggtgcccctctctccatcagaggacacctgtactggagagcaacacaggatggtctctgccatgaactggaggccaggaatctcctcactgaaaattacagtatggtaactttgcaaatggtggttgtttcttccaagactccagccctgattgcgcaaaactgaaaggcatgtgaagggaaggaagaggaagagtgcaaaacattgaagagagagctgagtgagctgaagagtgaggatatgagtagccccaacccaa

SEQ ID NO: 156409 - DNA, 279 bp, Homo sapiens
  Payload ID: 10666
  Gene Symbol: MOG
  Gene Name: myelin oligodendrocyte glycoprotein
  ENST ID: ENST00000483013
  CDS Start-End: 1-279
atggcaagcttatcaagaccctctctgcccagctgcctctgctccttcctcctcctcctcctcctccaagtgtcttccagctatgcagatcctttctactgggtgagccctggagtgctggttctcctcgcggtgctgcctgtgctcctcctgcagatcactgttggcctcatcttcctctgcctgcagtacagactgagaggaaaacttcgagcagagatagagaatctccaccggacttttgggcaattccttgaagagctacgaaatcccttctga

SEQ ID NO: 156410 - DNA, 1077 bp, Homo sapiens
  Payload ID: 10666
  Gene Symbol: MOG
  Gene Name: myelin oligodendrocyte glycoprotein
  ENST ID: ENST00000485211
  CDS Start-End: 1-428
ggcagttcagagtgataggaccaagacaccctatccgggctctggtcggggatgaagtggaattgccatgtcgcatatctcctgggaagaacgctacaggcatggaggtggggtggtaccgcccccccttctctagggtggttcatctctacagaaatggcaaggaccaagatggagaccaggcacctgaatatcggggccggacagagctgctgaaagatgctattggtgagggaaaggtgactctcaggatccggaatgtaaggttctcagatgaaggaggtttcacctgcttcttccgagatcattcttaccaagaggaggcagcaatggaattgaaagtagaagtgtctcactctgtcacccaggattggttgcagtggcacgatcatggctcattgcagcctccacctcccaggctcaagtgatcctcctgactcagcctcttgaatagctgagaccacaggcttgtgtcaccatgcccagatcctttctactgggtgagccctggagtgctggttctcctcgcggtgctgcctgtgctcctcctgcagatcactgttggcctcatcttcctctgcctgcagtacagactgagaggaaaacttcgagcagagatagagaatctccaccggacttttgatccccactttctgagggtgccctgctggaagataaccctgtttgtaattgtgccggttcttggacccttggttgccttgatcatctgctacaactggctacatcgaagactagcagggcaattccttgaagagctactcttccacctggaagccctctctggctaaggacaggcaggtgcccctctctccatcagaggacacctgtactggagagcaacacaggatggtctctgccatgaactggaggccaggaatctcctcactgaaaattacagtatggtaactttgcaaatggtggttgtttcttccaagactccagccctgattgcgcaaaactgaaaggcatgtgaagggaaggaagaggaagagtgcaaaacattgaagagagagctgagtgagctgaagagtgaggatatgagtagccccaacccaa

SEQ ID NO: 156411 - DNA, 1608 bp, Homo sapiens
  Payload ID: 10666
  Gene Symbol: MOG
  Gene Name: myelin oligodendrocyte glycoprotein
  ENST ID: ENST00000459677
  CDS Start-End: 1-690
atggcaagcttatcgagaccctctctgcccagctgcctctgctccttcctcctcctcctcctcctccaagtgtcttccagctatgcagggcagttcagagtgataggaccaagacaccctatccgggctctggtcggggatgaagtggaattgccatgtcgcatatctcctgggaagaacgctacaggcatggaggtggggtggtaccgcccccccttctctagggtggttcatctctacagaaatggcaaggaccaagatggagaccaggcacctgaatatcggggccggacagagctgctgaaagatgctattggtgagggaaaggtgactctcaggatccggaatgtaaggttctcagatgaaggaggtttcacctgcttcttccgagatcattcttaccaagaggaggcagcaatggaattgaaagtagaagatcctttctactgggtgagccctggagtgctggttctcctcgcggtgctgcctgtgctcctcctgcagatcactcttggcctcgtcttcctctgcctgcagtacagactgagaggaaaacttcgagcagagatagagaatctccaccggacttttgagtcctttggtgttctaggaccccaggttaaggaaccaaaaaagacagggcaattccttgaagagctactcttccacctggaagccctctctggctaaggacaggcaggtgcccctctctccatcagaggacacctgtactggagagcaacacaggatggtctctgccatgaactggaggccaggaatctcctcactgaaaattacagtatggtaactttgcaaatggtggttgtttcttccaagactccagccctgattgcgcaaaactgaaaggcatgtgaagggaaggaagaggaagagtgcaaaacattgaagagagagctgagtgagctgaagagtgaggatatgagtagccccaacccaaacctggagatggggagaaacctacagaatactagccagagctcctccttgtcttggcagcctactagggacctggggaagcaaaaacgaaagctgggcaacatgcctgctttagaatgttttccttctacttacacatcttccacaggtctcagaatctttccttcctctcatccttttctcctatcttcatatctatcagagtatccactgtttattcaacaactactacttgatggtcagacacaaacaaacaagctaggtgctaattaataaagatacgagttttggccgggtgcggtggctcacgcctgtaatcccagcactttgggaggccgaggcgggcgaatcacgaggtcaggagttcaagaccagcctggccaacatggtgaaaccccatctctactaaaaatacaaacaattaactgagcatagtggtgggcacctataataccagctactccggaggctgaggcaggagaatcgcttgaacccaggaggcagaggttgcagtgagctgagatcgcgccactgcactctagccggagtgacagagtaagactctgtctcaaaaataaataaataaataaataaataaataaataaataaataaaaaataataatacaagttttcataagcacacttctaa

SEQ ID NO: 156412 - DNA, 327 bp, Homo sapiens
  Payload ID: 10666
  Gene Symbol: MOG
  Gene Name: myelin oligodendrocyte glycoprotein
  Uniprot ID: Q16653
  ENST ID: ENST00000490427
  CDS Start-End: 1-327
atggcaagcttatcaagaccctctctgcccagctgcctctgctccttcctcctcctcctcctcctccaagtgtcttccagctatgcagatcctttctactgggtgagccctggagtgctggttctcctcgcggtgctgcctgtgctcctcctgcagatcactgttggcctcatcttcctctgcctgcagtacagactgagaggaaaacttcgagcagagatagagaatctccaccggacttttgagtcctttggtgttctaggaccccaggttaaggaaccaaaaaagacagggcaattccttgaagagctacgaaatcccttctga

SEQ ID NO: 156413 - DNA, 2041 bp, Homo sapiens
  Payload ID: 10666
  Gene Symbol: MOG
  Gene Name: myelin oligodendrocyte glycoprotein
  Uniprot ID: Q16653
  ENST ID: ENST00000551993
  CDS Start-End: 230-856
gtcatcccctcagtctgtagcccttttgtgtgagtgcctggcaagggtgacgtggggctgtttctgcgggcacagctgcagcaattaccggagtggaggcagggcccaggcagcactgccctccaagatcttcccttgggcttttcagcagtaaggggacatgcaccccaagggcctccacttggcctgaccttgctgcgggggctctctgtccccaggaacagtagagatggcaagcttatcgagaccctctctgcccagctgcctctgctccttcctcctcctcctcctcctccaagtgtcttccagctatgcagggcagttcagagtgataggaccaagacaccctatccgggctctggtcggggatgaagtggaattgccatgtcgcatatctcctgggaagaacgctacaggcatggaggtggggtggtaccgcccccccttctctagggtggttcatctctacagaaatggcaaggaccaagatggagaccaggcacctgaatatcggggccggacagagctgctgaaagatgctattggtgagggaaaggtgactctcaggatccggaatgtaaggttctcagatgaaggaggtttcacctgcttcttccgagatcattcttaccaagaggaggcagcaatggaattgaaagtagaagatcctttctactgggtgagccctggagtgctggttctcctcgcggtgctgcctgtgctcctcctgcagatcactgttggcctcgtcttcctctgcctgcagtacagactgagaggaaaacttcgagcagagatagagaatctccaccggacttttgggcaattccttgaagagctacgaaatcccttctgagtgatgtcacatcttggcaggggtggaggagagcctggttgcccagggatttgtccttggggacatctcatccatcaagttgcacactcactggcatctttgctatggggacattccaatttgcactttcaggaacactctgaattccaagtagaattgatttcccttcttctgtcatctaccttttctcttcattttcccatttttattacccttctttccatttctctctccagtcttccacctggaagccctctctggctaaggacaggcaggtgcccctctctccatcagaggacacctgtactggagagcaacacaggatggtctctgccatgaactggaggccaggaatctcctcactgaaaattacagtatggtaactttgcaaatggtggttgtttcttccaagactccagccctgattgcgcaaaactgaaaggcatgtgaagggaaggaagaggaagagtgcaaaacattgaagagagagctgagtgagctgaagagtgaggatatgagtagccccaacccaaacctggagatggggagaaacctacagaatactagccagagctcctccttgtcttggcagcctactagggacctggggaagcaaaaacgaaagctgggcaacatgcctgctttagaatgttttccttctacttacacatcttccacaggtctcagaatctttccttcctctcatccttttctcctatcttcatatctatcagagtatccactgtttattcaacaactactacttgatggtcagacacaaacaaacaagctaggtgctaattaataaagatacgagttttggccgggtgcggtggctcacgcctgtaatcccagcactttgggaggccgaggcgggcgaatcacgaggtcaggagttcgagaccagcctggccaacatggtgaaaccccatctctactaaaaatacaaacaattaactgagcatagtggtgggcacctataataccagctactccggaggctgaggcaggagaatcgcttgaacccaggaggcagaggttgcagtgagctgagatcgcgccactgcactctagccagagtgacagagtaagactctgtctcaaaaataaataaataaataaataaataaataaataaataaataaataaaaaataataatacaagttttcataagcacacttct

SEQ ID NO: 156414 - DNA, 2041 bp, Homo sapiens
  Payload ID: 10666
  Gene Symbol: MOG
  Gene Name: myelin oligodendrocyte glycoprotein
  Uniprot ID: Q16653
  ENST ID: ENST00000553111
  CDS Start-End: 230-856
gtcatcccctcagtctgtagcccttttgtgtgagtgcctggcaagggtgacgtggggctgtttctgcgggcacagctgcagcaattaccggagtggaggcagggcccaggcagcactgccctccaagatcttcccttgggcttttcagcagtaaggggacatgcaccccaagggcctccacttggcctgaccttgctgcgggggctctctgtccccaggaacagtagagatggcaagcttatcgagaccctctctgcccagctgcctctgctccttcctcctcctcctcctcctccaagtgtcttccagctatgcagggcagttcagagtgataggaccaagacaccctatccgggctctggtcggggatgaagtggaattgccatgtcgcatatctcctgggaagaacgctacaggcatggaggtggggtggtaccgcccccccttctctagggtggttcatctctacagaaatggcaaggaccaagatggagaccaggcacctgaatatcggggccggacagagctgctgaaagatgctattggtgagggaaaggtgactctcaggatccggaatgtaaggttctcagatgaaggaggtttcacctgcttcttccgagatcattcttaccaagaggaggcagcaatggaattgaaagtagaagatcctttctactgggtgagccctggagtgctggttctcctcgcggtgctgcctgtgctcctcctgcagatcactgttggcctcgtcttcctctgcctgcagtacagactgagaggaaaacttcgagcagagatagagaatctccaccggacttttgggcaattccttgaagagctacgaaatcccttctgagtgatgtcacatcttggcaggggtggaggagagcctggttgcccagggatttgtccttggggacatctcatccatcaagttgcacactcactggcatctttgctatggggacattccaatttgcactttcaggaacactctgaattccaagtagaattgatttcccttcttctgtcatctaccttttctcttcattttcccatttttattacccttctttccatttctctctccagtcttccacctggaagccctctctggctaaggacaggcaggtgcccctctctccatcagaggacacctgtactggagagcaacacaggatggtctctgccatgaactggaggccaggaatctcctcactgaaaattacagtatggtaactttgcaaatggtggttgtttcttccaagactccagccctgattgcgcaaaactgaaaggcatgtgaagggaaggaagaggaagagtgcaaaacattgaagagagagctgagtgagctgaagagtgaggatatgagtagccccaacccaaacctggagatggggagaaacctacagaatactagccagagctcctccttgtcttggcagcctactagggacctggggaagcaaaaacgaaagctgggcaacatgcctgctttagaatgttttccttctacttacacatcttccacaggtctcagaatctttccttcctctcatccttttctcctatcttcatatctatcagagtatccactgtttattcaacaactactacttgatggtcagacacaaacaaacaagctaggtgctaattaataaagatacgagttttggccgggtgcggtggctcacgcctgtaatcccagcactttgggaggccgaggcgggcgaatcacgaggtcaggagttcaagaccagcctggccaacatggtgaaaccccatctctactaaaaatacaaacaattaactgagcatagtggtgggcacctataataccagctactccggaggctgaggcaggagaatcgcttgaacccaggaggcagaggttgcagtgagctgagatcgcgccactgcactctagccggagtgacagagtaagactctgtctcaaaaataaataaataaataaataaataaataaataaataaataaataaaaaataataatacaagttttcataagcacacttct

SEQ ID NO: 156415 - DNA, 2045 bp, Homo sapiens
  Payload ID: 10666
  Gene Symbol: MOG
  Gene Name: myelin oligodendrocyte glycoprotein
  Uniprot ID: Q16653
  ENST ID: ENST00000548017
  CDS Start-End: 230-856
gtcatcccctcagtctgtagcccttttgtgtgagtgcctggcaagggtgacgtggggctgtttctgcgggcacagctgcagcaattaccggagtggaggcagggcccaggcagcactgccctccaagatcttcccttgggcttttcagcagtaaggggacatgcaccccaagggcctccacttggcctgaccttgctgcgggggctctctgtccccaggaacagtagagatggcaagcttatcgagaccctctctgcccagctgcctctgctccttcctcctcctcctcctcctccaagtgtcttccagctatgcagggcagttcagagtgataggaccaagacaccctatccgggctctggtcggggatgaagtggaattgccatgtcgcatatctcctgggaagaacgctacaggcatggaggtggggtggtaccgcccccccttctctagggtggttcatctctacagaaatggcaaggaccaagatggagaccaggcacctgaatatcggggccggacagagctgctgaaagatgctattggtgagggaaaggtgactctcaggatccggaatgtaaggttctcagatgaaggaggtttcacctgcttcttccgagatcattcttaccaagaggaggcagcaatggaattgaaagtagaagatcctttctactgggtgagccctggagtgctggttctcctcgcggtgctgcctgtgctcctcctgcagatcactgttggcctcgtcttcctctgcctgcagtacagactgagaggaaaacttcgagcagagatagagaatctccaccggacttttgggcaattccttgaagagctacgaaatcccttctgagtgatgtcacatcttggcaggggtggaggagagcctggttgcccagggatttgtccttggggacatctcatccatcaagttgcacactcactggcatctttgctatggggacattccaatttgcactttcaggaacactctgaattccaagtagaattgatttcccttcttctgtcatctaccttttctcttcattttcccatttttattacccttctttccatttctctctccagtcttccacctggaagccctctctggctaaggacaggcaggtgcccctctctccatcagaggacacctgtactggagagcaacacaggatggtctctgccatgaactggaggccaggaatctcctcactgaaaattacagtatggtaactttgcaaatggtggttgtttcttccaagactccagccctgattgcgcaaaactgaaaggcatgtgaagggaaggaagaggaagagtgcaaaacattgaagagagagctgagtgagctgaagagtgaggatatgagtagccccaacccaaacctggagatggggagaaacctacagaatactagccagagctcctccttgtcttggcagcctactagggacctggggaagcaaaaacgaaagctgggcaacatgcctgctttagaatgttttccttctacttacacatcttccacaggtctcagaatctttccttcctctcatccttttctcctatcttcatatctatcagagtatccactgtttattcaacaactactacttgatggtcagacacaaacaaacaagctaggtgctaattaataaagatacgagttttggccgggtgcggtggctcacgcctgtaatcccagcactttgggaggccgaggcgggcgaatcacgaggtcaggagttcaagaccagcctggccaacatggtgaaaccccatctctactaaaaatacaaacaattaactgagcatagtggtgggcacctataataccagctactccggaggctgaggcaggagaatcgcttgaacccaggaggcagaggttgcagtgagctgagatcgcgccactgcactctagccggagtgacagagtaagactctgtctcaaaaataaataaataaataaataaataaataaataaataaataaataaataaaaaataataatacaagttttcataagcacacttct

SEQ ID NO: 156416 - DNA, 2045 bp, Homo sapiens
  Payload ID: 10666
  Gene Symbol: MOG
  Gene Name: myelin oligodendrocyte glycoprotein
  Uniprot ID: Q16653
  ENST ID: ENST00000551175
  CDS Start-End: 230-856
gtcatcccctcagtctgtagcccttttgtgtgagtgcctggcaagggtgacgtggggctgtttctgcgggcacagctgcagcaattaccggagtggaggcagggcccaggcagcactgccctccaagatcttcccttgggcttttcagcagtaaggggacatgcaccccaagggcctccacttggcctgaccttgctgcgggggctctctgtccccaggaacagtagagatggcaagcttatcgagaccctctctgcccagctgcctctgctccttcctcctcctcctcctcctccaagtgtcttccagctatgcagggcagttcagagtgataggaccaagacaccctatccgggctctggtcggggatgaagtggaattgccatgtcgcatatctcctgggaagaacgctacaggcatggaggtggggtggtaccgcccccccttctctagggtggttcatctctacagaaatggcaaggaccaagatggagaccaggcacctgaatatcggggccggacagagctgctgaaagatgctattggtgagggaaaggtgactctcaggatccggaatgtaaggttctcagatgaaggaggtttcacctgcttcttccgagatcattcttaccaagaggaggcagcaatggaattgaaagtagaagatcctttctactgggtgagccctggagtgctggttctcctcgcggtgctgcctgtgctcctcctgcagatcactgttggcctcgtcttcctctgcctgcagtacagactgagaggaaaacttcgagcagagatagagaatctccaccggacttttgggcaattccttgaagagctacgaaatcccttctgagtgatgtcacatcttggcaggggtggaggagagcctggttgcccagggatttgtccttggggacatctcatccatcaagttgcacactcactggcatctttgctatggggacattccaatttgcactttcaggaacactctgaattccaagtagaattgatttcccttcttctgtcatctaccttttctcttcattttcccatttttattacccttctttccatttctctctccagtcttccacctggaagccctctctggctaaggacaggcaggtgcccctctctccatcagaggacacctgtactggagagcaacacaggatggtctctgccatgaactggaggccaggaatctcctcactgaaaattacagtatggtaactttgcaaatggtggttgtttcttccaagactccagccctgattgcgcaaaactgaaaggcatgtgaagggaaggaagaggaagagtgcaaaacattgaagagagagctgagtgagctgaagagtgaggatatgagtagccccaacccaaacctggagatggggagaaacctacagaatactagccagagctcctccttgtcttggcagcctactagggacctggggaagcaaaaacgaaagctgggcaacatgcctgctttagaatgttttccttctacttacacatcttccacaggtctcagaatctttccttcctctcatccttttctcctatcttcatatctatcagagtatccactgtttattcaacaactactacttgatggtcagacacaaacaaacaagctaggtgctaattaataaagatatgagttttggccgggtgcggtggctcacgcctgtaatcccagcactttgggaggccgaggcgggcgaatcacgaggtcaggagttcgagaccagcctggccaacatggtgaaaccccatctctactaaaaatacaaacaattaactgagcatagtggtgggcacctataataccagctactccggaggctgaggcaggagaatcgcttgaacccaggaggcagaggttgcagtgagctgagatcgcgccactgcactctagccagagtgacagagtaagactctgtctcaaaaataaataaataaataaataaataaataaataaataaataaataaataaaaaataataatacaagttttcataagcacacttct

SEQ ID NO: 156417 - DNA, 2045 bp, Homo sapiens; identical to SEQ ID NO: 156416
  Payload ID: 10666
  Gene Symbol: MOG
  Gene Name: myelin oligodendrocyte glycoprotein
  Uniprot ID: Q16653
  ENST ID: ENST00000547083
  CDS Start-End: 230-856

SEQ ID NO: 156418 - DNA, 2049 bp, Homo sapiens
  Payload ID: 10666
  Gene Symbol: MOG
  Gene Name: myelin oligodendrocyte glycoprotein
  Uniprot ID: Q16653
  ENST ID: ENST00000550849
  CDS Start-End: 230-856
gtcatcccctcagtctgtagcccttttgtgtgagtgcctggcaagggtgacgtggggctgtttctgcgggcacagctgcagcaattaccggagtggaggcagggcccaggcagcactgccctccaagatcttcccttgggcttttcagcagtaaggggacatgcaccccaagggcctccacttggcctgaccttgctgcgggggctctctgtccccaggaacagtagagatggcaagcttatcgagaccctctctgcccagctgcctctgctccttcctcctcctcctcctcctccaagtgtcttccagctatgcagggcagttcagagtgataggaccaagacaccctatccgggctctggtcggggatgaagtggaattgccatgtcgcatatctcctgggaagaacgctacaggcatggaggtggggtggtaccgcccccccttctctagggtggttcatctctacagaaatggcaaggaccaagatggagaccaggcacctgaatatcggggccggacagagctgctgaaagatgctattggtgagggaaaggtgactctcaggatccggaatgtaaggttctcagatgaaggaggtttcacctgcttcttccgagatcattcttaccaagaggaggcagcaatggaattgaaagtagaagatcctttctactgggtgagccctggagtgctggttctcctcgcggtgctgcctgtgctcctcctgcagatcactgttggcctcgtcttcctctgcctgcagtacagactgagaggaaaacttcgagcagagatagagaatctccaccggacttttgggcaattccttgaagagctacgaaatcccttctgagtgatgtcacatcttggcaggggtggaggagagcctggttgcccagggatttgtccttggggacatctcatccatcaagttgcacactcactggcatctttgctatggggacattccaatttgcactttcaggaacactctgaattccaagtagaattgatttcccttcttctgtcatctaccttttctcttcattttcccatttttattacccttctttccatttctctctccagtcttccacctggaagccctctctggctaaggacaggcaggtgcccctctctccatcagaggacacctgtactggagagcaacacaggatggtctctgccatgaactggaggccaggaatctcctcactgaaaattacagtatggtaactttgcaaatggtggttgtttcttccaagactccagccctgattgcgcaaaactgaaaggcatgtgaagggaaggaagaggaagagtgcaaaacattgaagagagagctgagtgagctgaagagtgaggatatgagtagccccaacccaaacctggagatggggagaaacctacagaatactagccagagctcctccttgtcttggcagcctactagggacctggggaagcaaaaacgaaagctgggcaacatgcctgctttagaatgttttccttctacttacacatcttccacaggtctcagaatctttccttcctctcatccttttctcctatcttcatatctatcagagtatccactgtttattcaacaactactacttgatggtcagacacaaacaaacaagctaggtgctaattaataaagatacgagttttggccgggtgcggtggctcacgcctgtaatcccagcactttgggaggccgaggcgggcgaatcacgaggtcaggagttcaagaccagcctggccaacatggtgaaaccccatctctactaaaaatacaaacaattaactgagcatagtggtgggcacctataataccagctactccggaggctgaggcaggagaatcgcttgaacccaggaggcagaggttgcagtgagctgagatcgcgccactgcactctagccggagtgacagagtaagactctgtctcaaaaataaataaataaataaataaataaataaataaataaataaataaataaataaaaaataataatacaagttttcataagcacacttct

SEQ ID NO: 156419 - DNA, 1824 bp, Homo sapiens
  Payload ID: 10667
  Gene Symbol: MPZ
  Gene Name: myelin protein zero
  ENST ID: ENST00000491222
  CDS Start-End: 569-727
cttactgggcccataggtgcatctgattccccactttgtgcttgcagtgctgtccccggcccaggccatcgtggtttacaccgacagggaggtccatggtgctgtgggctcccgggtgaccctgcactgctccttctggtccagtgagtgggtctcagatgacatctccttcacctggcgctaccagcccgaagggggcagagatgccatttcgatcttccactatgccaagggacaaccctacattgacgaggtggggaccttcaaagagcgcatccagtgggtaggggaccctcgctggaaggatggctccattgtcatacacaacctagactacagtgacaatggcacgttcacttgtgacgtcaaaaaccctccagacatagtgggcaagacctctcaggtcacgctgtatgtctttgaaaaagtgccaactaggtacggggtcgttctgggagctgtgatcgggggtgtcctcggggtggtgctgttgctgctgctgcttttctacgtggttcggtactgctggctacgcaggcaggcggccctgcagaggaggctcagtgctatggagaaggggaaattgcacaagccaggaaaggacgcgtcgaagcgcgggcggcagacgccagtgctgtatgcaatgctggaccacagcagaagcaccaaagctgtcagtgagaagaaggccaaggggctgggggagtctcgcaaggataagaaatagcggttagcgggccgggcgggggatcgggggttaggggtggagtccgccaaaggcccaaaggtgatggtcatcgagatggagctacgaaaggatgagcagagcccggagctccggcctgctgtcaagtcccccagcagaaccagcctcaaaaacgccctcaagaacatgatgggcctgaactcggacaagtgatcgccacccccccaccccaggccctgccagagcagggggacctaggctcctcttacccccgtctaggtgctttccctctttgctcccccgccctgccctgccctcacctccctttgagatgtaagtttcattccagaattcattccccaggcaattgtattctcccccaccttcacccctggctttctgggagcccaggagctaatcctacccctcacctgccccgggggctgtgtgtttggtgcctgtccacctgagcactgagaagaaagggactttgataccctctgcctcaagtccaggccacctggcattcccatctcctgcatcccccagcctgtccccctggctgtttcctctcccgtccctccctcccctctaccaggtggcccagctccatactctgtccccccagctaatacccagagcacccagatcagactctccttcagggtttatttaggttattattttttattttttaatccattctttgtttgtttacctgtgctcatcctctgcccttacacccatgactgaggaccaatgacgtcatgtggcttttgcaattcacgccccccttaagtccttaatgaagagccagcccaagtagaggggcccctgatcctcacacttcagtatagcattggttccccctgaccactttggagcactgttctgggactccaggtcttgaggagagagacagagagagagaatggatcctcataggtcagggagtgggggagggggcaaatgagccttaagaaatggtttttaaacaaccaaacaaaaagcaggaaaaacaaatgggaaatgggggggcgggggggaggaagaggctgcactgcagccacaggggattcttaggatttttctacattctgtatatttcttctcaaacc

SEQ ID NO: 156420 - DNA, 1693 bp, Homo sapiens
  Payload ID: 10667
  Gene Symbol: MPZ
  Gene Name: myelin protein zero
  Uniprot ID: P25189
  ENST ID: ENST00000463290
  CDS Start-End: 50-796
cactttctcaaccccacagatgctccgggcccctgcccctgccccagctatggctcctggggctccctcatccagccccagccctatcctggctgtgctgctcttctcttctttggtgctgtccccggcccaggccatcgtggtttacaccgacagggaggtccatggtgctgtgggctcccgggtgaccctgcactgctccttctggtccagtgagtgggtctcagatgacatctccttcacctggcgctaccagcccgaagggggcagagatgccatttcgatcttccactatgccaagggacaaccctacattgacgaggtggggaccttcaaagagcgcatccagtgggtaggggaccctcgctggaaggatggctccattgtcatacacaacctagactacagtgacaatggcacgttcacttgtgacgtcaaaaaccctccagacatagtgggcaagacctctcaggtcacgctgtatgtctttgaaaaagtgccaactaggtacggggtcgttctgggagctgtgatcgggggtgtcctcggggtggtgctgttgctgctgctgcttttctacgtggttcggtactgctggctacgcaggcaggcggccctgcagaggaggctcagtgctatggagaaggggaaattgcacaagccaggaaaggacgcgtcgaagcgcgggcggcagacgccagtgctgtatgcaatgctggaccacagcagaagcaccaaagctgtcagtgagaagaaggccaaggggctgggggagtctcgcaaggataagaaatagcggttagcgggccgggcgggggatcgggggttaggggtggagtccgccaaaggcccaaaggtgatggtcatcgagatggagctacgaaaggatgagcagagcccggagctccggcctgctgtcaagtcccccagcagaaccagcctcaaaaacgccctcaagaacatgatgggcctgaactcggacaagtgatcgccacccccccaccccaggccctgccagagcagggggacctaggctcctcttacccccgtctaggtgctttccctctttgctcccccgccctgccctgccctcacctccctttgagatgtaagtttcattccagaattcattccccagctccatactctgtccccccagctaatacccagagcacccagatcagactctccttcagggtttatttaggttattattttttattttttaatccattctttgtttgtttacctgtgctcatcctctgcccttacacccatgactgaggaccaatgacgtcatgtggcttttgcaattcacgccccccttaagtccttaatgaagagccagcccaagtagaggggcccctgatcctcacacttcagtatagcattggttccccctgaccactttggagcactgttctgggactccaggtcttgaggagagagacagagagagagaatggatcctcataggtcagggagtgggggagggggcaaatgagccttaagaaatggtttttaaacaaccaaacaaaaagcaggaaaaacaaatgggaaatgggggggcgggggggaggaagaggctgcactgcagccacaggggattcttaggatttttctacattctgtatatttcttctcaaacctccaaatgtccttaaatgtttaataaacactgacatttccagaa

SEQ ID NO: 156421 - DNA, 1955 bp, Homo sapiens
  Payload ID: 10667
  Gene Symbol: MPZ
  Gene Name: myelin protein zero
  Uniprot ID: P25189
  ENST ID: ENST00000533357
  CDS Start-End: 68-814
gttcagttcctggtcccccactttctcaaccccacagatgctccgggcccctgcccctgccccagctatggctcctggggctccctcatccagccccagccctatcctggctgtgctgctcttctcttctttggtgctgtccccggcccaggccatcgtggtttacaccgacagggaggtccatggtgctgtgggctcccgggtgaccctgcactgctccttctggtccagtgagtgggtctcagatgacatctccttcacctggcgctaccagcccgaagggggcagagatgccatttcgatcttccactatgccaagggacaaccctacattgacgaggtggggaccttcaaagagcgcatccagtgggtaggggaccctcgctggaaggatggctccattgtcatacacaacctagactacagtgacaatggcacgttcacttgtgacgtcaaaaaccctccagacatagtgggcaagacctctcaggtcacgctgtatgtctttgaaaaagtgccaactaggtacggggtcgttctgggagctgtgatcgggggtgtcctcggggtggtgctgttgctgctgctgcttttctacgtggttcggtactgctggctacgcaggcaggcggccctgcagaggaggctcagtgctatggagaaggggaaattgcacaagccaggaaaggacgcgtcgaagcgcgggcggcagacgccagtgctgtatgcaatgctggaccacagcagaagcaccaaagctgtcagtgagaagaaggccaaggggctgggggagtctcgcaaggataagaaatagcggttagcgggccgggcgggggatcgggggttaggggtggagtccgccaaaggcccaaaggtgatggtcatcgagatggagctacgaaaggatgagcagagcccggagctccggcctgctgtcaagtcccccagcagaaccagcctcaaaaacgccctcaagaacatgatgggcctgaactcggacaagtgatcgccacccccccaccccaggccctgccagagcagggggacctaggctcctcttacccccgtctaggtgctttccctctttgctcccccgccctgccctgccctcacctccctttgagatgtaagtttcattccagaattcattccccaggcaattgtattctcccccaccttcacccctggctttctgggagcccaggagctaatcctacccctcacctgccccgggggctgtgtgtttggtgcctgtccacctgagcactgagaagaaagggactttgataccctctgcctcaagtccaggccacctggcattcccatctcctgcatcccccagcctgtccccctggctgtttcctctcccgtccctccctcccctctaccaggtggcccagctccatactctgtccccccagctaatacccagagcacccagatcagactctccttcagggtttatttaggttattattttttattttttaatccattctttgtttgtttacctgtgctcatcctctgcccttacacccatgactgaggaccaatgacgtcatgtggcttttgcaattcacgccccccttaagtccttaatgaagagccagcccaagtagaggggcccctgatcctcacacttcagtatagcattggttccccctgaccactttggagcactgttctgggactccaggtcttgaggagagagacagagagagagaatggatcctcataggtcagggagtgggggagggggcaaatgagccttaagaaatggtttttaaacaaccaaacaaaaagcaggaaaaacaaatgggaaatgggggggcgggggggaggaagaggctgcactgcagccacaggggattcttaggatttttctacattctgtatatttcttctcaaacctccaaatgtccttaaatgtttaataaacactgacatttccagaa

SEQ ID NO: 156422 - DNA, 957 bp, Homo sapiens
  Payload ID: 10667
  Gene Symbol: MPZ
  Gene Name: myelin protein zero
  ENST ID: ENST00000526189
  CDS Start-End: 1-410
aaccctacattgacgaggtggggaccttcaaagagcgcatccagtgggtaggggaccctcgctggaaggatggctccattgtcatacacaacctagactacagtgacaatgtgccaactaggtacggggtcgttctgggagctgtgatcgggggtgtcctcggggtggtgctgttgctgctgctgcttttctacgtggttcggtactgctggctacgcaggcaggcggccctgcagaggaggctcagtgctatggagaaggggaaattgcacaagccaggaaaggacgcgtcgaagcgcgggcggcagacgccagtgctgtatgcaatgctggaccacagcagaagcaccaaagctgtcagtgagaagaaggccaaggggctgggggagtctcgcaaggataagaaatagcggttagcgggccgggcgggggatcgggggttaggggtggagtccgccaaaggcccaaaggtgatggtcatcgagatggagctacgaaaggatgagcagagcccggagctccggcctgctgtcaagtcccccagcagaaccagcctcaaaaacgccctcaagaacatgatgggcctgaactcggacaagtgatcgccacccccccaccccaggccctgccagagcagggggacctaggctcctcttacccccgtctaggtgctttccctctttgctcccccgccctgccctgccctcacctccctttgagatgtaagtttcattccagaattcattccccaggcaattgtattctcccccaccttcacccctggctttctgggagcccaggagctaatcctacccctcacctgccccgggggctgtgtgtttggtgcctgtccacctgagcactgagaagaaagggactttgataccctctgcctcaagtccaggccacctggcattcccatctcctgcatcccccagcctgtccccctggctgttt

SEQ ID NO: 156423 - DNA, 5010 bp, Homo sapiens
  Payload ID: 10668
  Gene Symbol: MPZL1
  Gene Name: myelin protein zero-like 1
  Uniprot ID: O95297
  ENST ID: ENST00000359523
  CDS Start-End: 203-1012
agcgagggccggagtggggctgaggcttcggtgcagagctggagagccgcggctgggaccggagtggggagcgcggcgtggaggtgccacccggcgcgggtggcggagagatcagaagcctcttccccaagccgagccaacctcagcggggacccgggctcagggacgcggcggcggcggcggcgactgcagtggctggacgatggcagcgtccgccggagccggggcggtgattgcagccccagacagccggcgctggctgtggtcggtgctggcggcggcgcttgggctcttgacagctggagtatcagccttggaagtatatacgccaaaagaaatcttcgtggcaaatggtacacaagggaagctgacctgcaagttcaagtctactagtacgactggcgggttgacctcagtctcctggagcttccagccagagggggccgacactactgtgtcgtttttccactactcccaagggcaagtgtaccttgggaattatccaccatttaaagacagaatcagctgggctggagaccttgacaagaaagatgcatcaatcaacatagaaaatatgcagtttatacacaatggcacctatatctgtgatgtcaaaaaccctcctgacatcgttgtccagcctggacacattaggctctatgtcgtagaaaaagagaatttgcctgtgtttccagtttgggtagtggtgggcatagttactgctgtggtcctaggtctcactctgctcatcagcatgattctggctgtcctctatagaaggaaaaactctaaacgggattacactggctgcagtacatcagagagtttgtcaccagttaagcaggctcctcggaagtccccctccgacactgagggtcttgtaaagagtctgccttctggatctcaccagggcccagtcatatatgcacagttagaccactccggcggacatcacagtgacaagattaacaagtcagagtctgtggtgtatgcggatatccgaaagaattaagagaatacctagaacatatcctcagcaagaaacaaaaccaaactggactctcgtgcagaaaatgtagcccattaccacatgtagccttggagacccaggcaaggacaagtacacgtgtactcacagagggagagaaagatgtgtacaaaggatatgtataaatattctatttagtcatcctgatatgaggagccagtgttgcatgatgaaaagatggtatgattctacatatgtacccattgtcttgctgtttttgtactttcttttcaggtcatttacaattgggagatttcagaaacattcctttcaccatcatttagaaatggtttgccttaatggagacaatagcagatcctgtagtatttccagtagacatggccttttaatctaagggcttaagactgattagtcttagcatttactgtagttggaggatggagatgctatgatggaagcatacccagggtggcctttagcacagtatcagtaccatttatttgtctgccgcttttaaaaaatacccattggctatgccacttgaaaacaatttgagaagtttttttgaagtttttctcactaaaatatggggcaattgttagccttacatgttgtgtagacttactttaagtttgcacccttgaaatgtgtcatatcaatttctggattcataatagcaagattagcaaaggataaatgccgaaggtcacttcattctggacacagttggatcaatactgattaagtagaaaatccaagctttgcttgagaacttttgtaacgtggagagtaaaaagtatcggttttattctttgctgatgtcctttctgcttgaaataacagtcaccatacagctaaaggagaggagtttctttccttctaagtaggcagaaatggtatcattatgttgccgctctccaatctcccagagctcgctctctagagaatcaccttctttcgcttttttttttttttttgaggtagagtctcactatgttgcccagactagccttgaactcttgggctcaagtgattctccctcctcagcctcccgagtagctggaacgaactatagttgcaccactgcagctggcaagaatcaccttctttataaagcgtcagtcatgcttccagcaagaggcagcatcagtcatggctttataacagcttcatggtgcctcaaagactgttgaggttaatgagagcctagattagacagtttggctgtccttccctaaaacttgttttctcctattcactactccccaccgcacttaaaatctatgagtttttactttttactgggaatggaaagtgtggtgaagatcattcaacacttatgttgtcatttctcccattttctgaatttttttttaaatttccccccttttaaaattgttcgaaagcccacagttatggaaagaattactgtctagatggtctgcagaacgtgtttggggtgagtgggagtgaggggcaatgttactttttctccctgtagtttggagtccattatgagctgctgctttttcttctcatcttgtcatcttctggggatgtttgaaggctgagttccaacagaattcacaaagggaataaaacaggattgagattttgaggtgtgcacaaggtggtaagataaagggcatatgagcttcaaaactaatgctgttgcatacatgaagccttttgttttttgaggagctatttttgttattcttgtaacgctccaccttacatgccacatctgtgtgagtcaacagggatcaggtttggtcaccacacatgtctgaagctgggcagcgtctgctctgtgttctgtgtggaatggagaaaaaaacgcctgccctgctgccttccatgttcataggcccagcccaagagagtgacacacagtgctggccctgagacatttccacaaagtggtcaactctgccttgcatcctaaaactttttgggcatctattttgaaaactataggagcctttggaaggcctcttatgtttggaggggaagggtgttgagattgtcaccatccttcaagctgagactcctggtgagcctttgccaccatgaaaaccacatagctgaccagggctgtgcttgaggtacagaggacacacattgtagacaggcctgtgtcatgtttccttacagtcgttttttacagagaaaaggggcattgttttttcactgctttctcaacagttcctgtgaataaatgaaacatttcggagctccctgagagcaagagccttcacttcttcttgcggtgccgggaccatgtgttggtgaagctggtgctgtgggggccactcactcgaatgacacctggaggcctgttcctcccttaccactcccttccccagcccgacttcttggcctcctgcccaaccagacacctcaaactctgtcagtgccctggcattctggcagagaatcctcaccagttctcaccaaccttccccccaggcaagggcagctgccagcatggtgctctgccaggacaggtttccctgaaggaagctgctcacactgagatgagcctctcagggcaggacctcttcccaagccctgcacacccacccctgcagcccttttggctccccttttccctgtgcctcagcactcctttcctggttgcagataacgaactaaggttgcctaaagggcagatctgccctctccatgtcttcgtcctggcaaacagggtcgtcttaaaattatgcgctaattctgtatgggagcactcaaaaggcattacttagagattgaaatttcaaactatctctagtttttcaatggaaatatatcagctagggaaaaaccatcaagctcattattattttttgatcttcagttgtatttttgtgaatattttaatacatctttttcaatttctgaattgtgttgtgtgctcattttgaccagaatagaaaaagagatatgcctttcactcatatcattccagctacacctgccttcttttcttcaaaaatgccgtccgtgtgcctgcttctgggcctttgcacatgctgttccctgggcctgaagcatgccttctgccaatattcctgtggtttgctctctgacttcctttaagcctctgctcaaatgttacctcctcagggagaccttctgtgatatataaaagagcaagccccccaccccaccgcctcagccttcctggccccctcagttctgctctagttactctatttctctccctctttcccagtacacacttgtctgttctcccgcattagaacatagttaacaagagaccagaaccttgctgttttgttcactgctccgtctgcagtaaagggaacagcacctggcacttagctgctcaatacatgttacgtggatggatgagtaggtggaagcattcatccattcagcaacctacactgagaacaatcctgtgccaagcactgtgctaagcataaggaaacaaaacaagacaaagctcctcaaggagcttgccacagggtggaggtgacaggtgacatgaatggaagtaactagtagttaccaaatacttggtgtgagccaggcactttgcatttctttctctattatttctgtgagttaacagtaattgtactaatcttaatcccattgtttgaaagattatatggcttacccagggccacttagctaataaaggaacagagaagaggggctgggcctggggccgctgtttgatccacagccttgttcctaaccactatgccctgtggcctctcacaccaaaaggaagtaccaaactgcttccttactcaaataaatgtgctgaaatgcagttgcagttttctcccagtcccttaggagctggttagagagtcccttaggaacttgagagggtagtgtagtctaggtggtaggcacagatgtctgagagctttaacctcagtctggaagacaatgtggtgacttaatttgttgagaactatgttacaaataatgtgttactaataaaacattgaggcttcgca

SEQ ID NO: 156424 - DNA, 881 bp, Homo sapiens
  Payload ID: 10668
  Gene Symbol: MPZL1
  Gene Name: myelin protein zero-like 1
  ENST ID: ENST00000367853
  CDS Start-End: 1-552
cctttctcttcagtgacagctggagtatcagccttggaagtatatacgccaaaagaaatcttcgtggcaaatggtacacaagggaagctgacctgcaagttcaagtctactagtacgactggcgggttgacctcagtctcctggagcttccagccagagggggccgacactactgtgtcgtttttccactactcccaagggcaagtgtaccttgggaattatccaccatttaaagacagaatcagctgggctggagaccttgacaagaaagatgcatcaatcaacatagaaaatatgcagtttatacacaatggcacctatatctgtgatgtcaaaaaccctcctgacatcgttgtccagcctggacacattaggctctatgtcgtagaaaaagagaatttgcctgtgtttccagtttgggtagtggtgggcatagttactgctgtggtcctaggtctcactctgctcatcagcatgattctggctgtcctctatagaaggaaaaactctaaacgggattacactggggcccagtcatatatgcacagttagaccactccggcggacatcacagtgacaagattaacaagtcagagtctgtggtgtatgcggatatccgaaagaattaagagaatacctagaacatatcctcagcaagaaacaaaaccaaactggactctcgtgcagaaaatgtagcccattaccacatgtagccttggagacccaggcaaggacaagtacacgtgtactcacagagggagagaaagatgtgtacaaaggatatgtataaatattctatttagtcatcctgatatgaggagccagtgttgcatgatgaaaagatggtatgattctacatatgtacccattgtcttgctgtt

SEQ ID NO: 156425 - DNA, 3421 bp, Homo sapiens
  Payload ID: 10668
  Gene Symbol: MPZL1
  Gene Name: myelin protein zero-like 1
  Uniprot ID: O95297
  ENST ID: ENST00000392121
  CDS Start-End: 164-523
tggagagccgcggctgggaccggagtggggagcgcggcgtggaggtgccacccggcgcgggtggcggagagatcagaagcctcttccccaagccgagccaacctcagcggggacccgggctcagggacgcggcggcggcggcggcgactgcagtggctggacgatggcagcgtccgccggagccggggcggtgattgcagccccagacagccggcgctggctgtggtcggtgctggcggcggcgcttgggctcttgacagctggagtatcagccttggaagtatatacgccaaaagaaatcttcgtggcaaatggtacacaagggaagctgacctgcaagttcaagtctactagtacgactggcgggttgacctcagtctcctggagcttccagccagagggggccgacactactgtgtcgggcccagtcatatatgcacagttagaccactccggcggacatcacagtgacaagattaacaagtcagagtctgtggtgtatgcggatatccgaaagaattaagagaatacctagaacatatcctcagcaagaaacaaaaccaaactggactctcgtgcagaaaatgtagcccattaccacatgtagccttggagacccaggcaaggacaagtacacgtgtactcacagagggagagaaagatgtgtacaaaggatatgtataaatattctatttagtcatcctgatatgaggagccagtgttgcatgatgaaaagatggtatgattctacatatgtacccattgtcttgctgtttttgtactttcttttcaggtcatttacaattgggagatttcagaaacattcctttcaccatcatttagaaatggtttgccttaatggagacaatagcagatcctgtagtatttccagtagacatggccttttaatctaagggcttaagactgattagtcttagcatttactgtagttggaggatggagatgctatgatggaagcatacccagggtggcctttagcacagtatcagtaccatttatttgtctgccgcttttaaaaaatacccattggctatgccacttgaaaacaatttgagaagtttttttgaagtttttctcactaaaatatggggcaattgttagccttacatgttgtgtagacttactttaagtttgcacccttgaaatgtgtcatatcaatttctggattcataatagcaagattagcaaaggataaatgccgaaggtcacttcattctggacacagttggatcaatactgattaagtagaaaatccaagctttgcttgagaacttttgtaacgtggagagtaaaaagtatcggttttattctttgctgatgtcctttctgcttgaaataacagtcaccatacagctaaaggagaggagtttctttccttctaagtaggcagaaatggtatcattatgttgccgctctccaatctcccagagctcgctctctagagaatcaccttctttcgcttttttttttttttttgaggtagagtctcactatgttgcccagactagccttgaactcttgggctcaagtgattctccctcctcagcctcccgagtagctggaacgaactatagttgcaccactgcagctggcaagaatcaccttctttataaagcgtcagtcatgcttccagcaagaggcagcatcagtcatggctttataacagcttcatggtgcctcaaagactgttgaggttaatgagagcctagattagacagtttggctgtccttccctaaaacttgttttctcctattcactactccccaccgcacttaaaatctatgagtttttactttttactgggaatggaaagtgtggtgaagatcattcaacacttatgttgtcatttctcccattttctgaatttttttttaaatttccccccttttaaaattgttcgaaagcccacagttatggaaagaattactgtctagatggtctgcagaacgtgtttggggtgagtgggagtgaggggcaatgttactttttctccctgtagtttggagtccattatgagctgctgctttttcttctcatcttgtcatcttctggggatgtttgaaggctgagttccaacagaattcacaaagggaataaaacaggattgagattttgaggtgtgcacaaggtggtaagataaagggcatatgagcttcaaaactaatgctgttgcatacatgaagccttttgttttttgaggagctatttttgttattcttgtaacgctccaccttacatgccacatctgtgtgagtcaacagggatcaggtttggtcaccacacatgtctgaagctgggcagcgtctgctctgtgttctgtgtggaatggagaaaaaaacgcctgccctgctgccttccatgttcataggcccagcccaagagagtgacacacagtgctggccctgagacatttccacaaagtggtcaactctgccttgcatcctaaaactttttgggcatctattttgaaaactataggagcctttggaaggcctcttatgtttggaggggaagggtgttgagattgtcaccatccttcaagctgagactcctggtgagcctttgccaccatgaaaaccacatagctgaccagggctgtgcttgaggtacagaggacacacattgtagacaggcctgtgtcatgtttccttacagtcgttttttacagagaaaaggggcattgttttttcactgctttctcaacagttcctgtgaataaatgaaacatttcggagctccctgagagcaagagccttcacttcttcttgcggtgccgggaccatgtgttggtgaagctggtgctgtgggggccactcactcgaatgacacctggaggcctgttcctcccttaccactcccttccccagcccgacttcttggcctcctgcccaaccagacacctcaaactctgtcagtgccctggcattctggcagagaatcctcaccagttctcaccaaccttccccccaggcaagggcagctgccagcatggtgctctgccaggacaggtttccctgaaggaagctgctcacactgagatgagcctctcagggcaggacctcttcccaagccctgcacacccacccctgcagcccttttggctccccttttccctgtgcctcagcactcctttcctggttgcagataacgaactaaggttgcctaaagggcagatctgccctctccatgtcttcgtcctggcaaacagggtcgtcttaaaattatgcgctaattctgtatgggagcactcaaaaggcattacttagagattgaaatttcaaactatctctagtttttcaatggaaatatatcagctagggaaaaaccatcaagctcattattattttttgatcttcagttgtatttttgtgaatattttaatacatctttttcaatttc

SEQ ID NO: 156426 - DNA, 1596 bp, Homo sapiens
  Payload ID: 10668
  Gene Symbol: MPZL1
  Gene Name: myelin protein zero-like 1
  ENST ID: ENST00000448405
  CDS Start-End: 169-456
agagctggagagccgcggctgggaccggagtggggagcgcggcgtggaggtgccacccggcgcgggtggcggagagatcagaagcctcttccccaagccgagccaacctcagcggggacccgggctcagggacgcggcggcggcggcggcgactgcagtggctggacgatggcagcgtccgccggagccggggcggtgattgcagccccagacagccggcgctggctgtggtcggtgctggcggcggcgcttgggctcttgacagctggagtatcagccttggaagtatatacgccaaaagaaatcttcgtggcaaatggtacacaagggaagctgacctgcaagttcaagtctactagtacgactggcgggttgacctcagtctcctggagcttccagccagagggggccgacactactgtgtcgagaatttgcctgtgtttccagtttgggtagtggtgggcatagttactgctgtggtcctaggtctcactctgctcatcagcatgattctggctgtcctctatagaaggaaaaactctaaacgggattacactggctgcagtacatcagagagtttgtcaccagttaagcaggctcctcggaagtccccctccgacactgagggtcttgtaaagagtctgccttctggatctcaccagggcccagtcatatatgcacagttagaccactccggcggacatcacagtgacaagattaacaagtcagagtctgtggtgtatgcggatatccgaaagaattaagagaatacctagaacatatcctcagcaagaaacaaaaccaaactggactctcgtgcagaaaatgtagcccattaccacatgtagccttggagacccaggcaaggacaagtacacgtgtactcacagagggagagaaagatgtgtacaaaggatatgtataaatattctatttagtcatcctgatatgaggagccagtgttgcatgatgaaaagatggtatgattctacatatgtacccattgtcttgctgtttttgtactttcttttcaggtcatttacaattgggagatttcagaaacattcctttcaccatcatttagaaatggtttgccttaatggagacaatagcagatcctgtagtatttccagtagacatggccttttaatctaagggcttaagactgattagtcttagcatttactgtagttggaggatggagatgctatgatggaagcatacccagggtggcctttagcacagtatcagtaccatttatttgtctgccgcttttaaaaaatacccattggctatgccacttgaaaacaatttgagaagtttttttgaagtttttctcactaaaatatggggcaattgttagccttacatgttgtgtagacttactttaagtttgcacccttgaaatgtgtcatatcaatttctggattcataatagcaagattagcaaaggataaatgccgaaggtcacttcattctggacacagttggatcaatactgattaagtagaaaatccaagctttgcttgagaacttttgtaacgtggagagtaaaaagtatcggttttattctttgctgatgtcctttctgcttga

SEQ ID NO: 156427 - DNA, 630 bp, Homo sapiens
  Payload ID: 10668
  Gene Symbol: MPZL1
  Gene Name: myelin protein zero-like 1
  Uniprot ID: O95297
  ENST ID: ENST00000474859
  CDS Start-End: 1-630
atggcagcgtccgccggagccggggcggtgattgcagccccagacagccggcgctggctgtggtcggtgctggcggcggcgcttgggctcttgacagctggagtatcagccttggaagtatatacgccaaaagaaatcttcgtggcaaatggtacacaagggaagctgacctgcaagttcaagtctactagtacgactggcgggttgacctcagtctcctggagcttccagccagagggggccgacactactgtgtcgtttttccactactcccaagggcaagtgtaccttgggaattatccaccatttaaagacagaatcagctgggctggagaccttgacaagaaagatgcatcaatcaacatagaaaatatgcagtttatacacaatggcacctatatctgtgatgtcaaaaaccctcctgacatcgttgtccagcctggacacattaggctctatgtcgtagaaaaagagaatttgcctgtgtttccagtttgggtagtggtgggcatagttactgctgtggtcctaggtctcactctgctcatcagcatgattctggctgtcctctatagaaggaaaaactctaaacgggattacactggggcccagtcatatatgcacagttag

SEQ ID NO: 156428 - DNA, 2620 bp, Homo sapiens
  Payload ID: 10669
  Gene Symbol: MPZL2
  Gene Name: myelin protein zero-like 2
  Uniprot ID: O60487
  ENST ID: ENST00000278937
  CDS Start-End: 130-777
gaggaactcaactcaaactcctctctctgggaaaacgcggtgcttgctcctcccggagtggccttggcagggtgttggagccctcggtctgccccgtccggtctctggggccaaggctgggtttccctcatgtatggcaagagctctactcgtgcggtgcttcttctccttggcatacagctcacagctctttggcctatagcagctgtggaaatttatacctcccgggtgctggaggctgttaatgggacagatgctcggttaaaatgcactttctccagctttgcccctgtgggtgatgctctaacagtgacctggaattttcgtcctctagacgggggacctgagcagtttgtattctactaccacatagatcccttccaacccatgagtgggcggtttaaggaccgggtgtcttgggatgggaatcctgagcggtacgatgcctccatccttctctggaaactgcagttcgacgacaatgggacatacacctgccaggtgaagaacccacctgatgttgatggggtgataggggagatccggctcagcgtcgtgcacactgtacgcttctctgagatccacttcctggctctggccattggctctgcctgtgcactgatgatcataatagtaattgtagtggtcctcttccagcattaccggaaaaagcgatgggccgaaagagctcataaagtggtggagataaaatcaaaagaagaggaaaggctcaaccaagagaaaaaggtctctgtttatttagaagacacagactaacaattttagatggaagctgagatgatttccaagaacaagaaccctagtatttcttgaagttaatggaaacttttctttggcttttccagttgtgacccgttttccaaccagttctgcagcatattagattctagacaagcaacacccctctggagccagcacagtgctcctccatatcaccagtcatacacagcctcattattaaggtcttatttaatttcagagtgtaaattttttcaagtgctcattaggttttataaacaagaagctacatttttgcccttaagacactacttacagtgttatgacttgtatacacatatattggtatcaaaagggataaaagccaatttgtctgttacatttcctttcacgtatttcttttagcagcacttctgctactaaagttaatgtgtttactctctttccttcccacattctcaattaaaaggtgagctaagcctcctcggtgtttctgattaacagtaaatcctaaattcaaactgttaaatgacatttttatttttatgtctctccttaactatgagacacatcttgttttactgaatttctttcaatattccaggtgatagatttttgttgttttgttaattaatccaagatttacaatagcacaacgctaaatcacacagtaactacaaaaggttacatagatatgaaaagattggcagaggccattgcaggatgaatcacttgtcacttttcttctgtgctgggaaaaataatcaacaatgtgggtctttcatgagcagtgacggatagtttagcttactatgtttcccccccaattcaatgatctataacaacagagcaaagtctatgctcatttgcagactggaatcattaagtaatttaataaaaaaattgtgaaacagcatattacaagtttgaaaattcagggctggtgaaaaaaatcaactctaaatgatgataattttgtacagttttatataaaactctgagaactagaagaaattattaactttttttcttttttaattctaattcacttgtttattttgggggaggaagactttggtatggagcaaagaaataccaaaactactttaaatggaataaaaccaactttattctttttttcccccatactggtagataaagcaaactttataagtgggctattgaaagaaaagttacaagcttaagatacagaagcatttgttcaaaggatagaaagcatctaaaagtttaggctcaagatcaatctttacagattgatattttcagtttttaatcgactggactgcagatgttttttcttttaacaaactggaattttcaaacagattatctgtatttaaatgtatagaccttgatatttttccaatactattttttaaaaaattgtatgatttacatatgaacctcagttctgaaattcattacatatctgtctcattctgccttttatactgtctaaaaaagcaaagttttaaagtgcaattttaaaactgtaaattacatctgaaggctatatatcctttaatcacattttatattttttcttcacaattctaacctttgaaaatattataactggatatttcttcaaacagatgtcctggatgatggtccataagaataatgaagaagtagttaaaaatgtatggacagtttttccggcaaaatttgtagcttatgtcttggctaaatagtcaaggggtaatatgggcctgttgtttagtgtctccttcctaaagagcacttttgtattgtaatttattttttattatgctttaaacactatgtaaataaacctttagtaataaagaattatcagttatataatttgtgtatatac

SEQ ID NO: 156429 - DNA, 1370 bp, Homo sapiens
  Payload ID: 10669
  Gene Symbol: MPZL2
  Gene Name: myelin protein zero-like 2
  Uniprot ID: O60487
  ENST ID: ENST00000438295
  CDS Start-End: 384-1031
aacagtctgggacatttcagactggcaccacctcctctggctgtttccgaggccatctagaggccagagcccagtcagattaactgaaagtaaagagaggactgcgggagtttgggacctttgtgcagacgtgctcatgctcgttcgtgtagagggcgggagagaggaaaggaaggagggcattgggagctgaggccccacctttcatttcagaaaagtgcacaggcagagcgggctgagtcacaggcacaggtgaggaactcaactcaaactcctctctctgggaaaacgcggtgcttgctcctcccggagtggccttggcagggtgttggagccctcggtctgccccgtccggtctctggggccaaggctgggtttccctcatgtatggcaagagctctactcgtgcggtgcttcttctccttggcatacagctcacagctctttggcctatagcagctgtggaaatttatacctcccgggtgctggaggctgttaatgggacagatgctcggttaaaatgcactttctccagctttgcccctgtgggtgatgctctaacagtgacctggaattttcgtcctctagacgggggacctgagcagtttgtattctactaccacatagatcccttccaacccatgagtgggcggtttaaggaccgggtgtcttgggatgggaatcctgagcggtacgatgcctccatccttctctggaaactgcagttcgacgacaatgggacatacacctgccaggtgaagaacccacctgatgttgatggggtgataggggagatccggctcagcgtcgtgcacactgtacgcttctctgagatccacttcctggctctggccattggctctgcctgtgcactgatgatcataatagtaattgtagtggtcctcttccagcattaccggaaaaagcgatgggccgaaagagctcataaagtggtggagataaaatcaaaagaagaggaaaggctcaaccaagagaaaaaggtctctgtttatttagaagacacagactaacaattttagatggtaaggttcacaaataggttgatttctttcttcagctttctgacatgtccagcccatctctaatgaggactcccagatcatcactttatggctgttaggtgtttcccatatgaaattagaggagctgggtcagggagacaaaagtcttctattagtcttatggatagctcctccttgagtgtattttgtgcaaaagattaagaagctggactctactgccattaaagctgagagaatcctaaggttatttgtggcttcggggttatatttattactactactactaataaatattcaacaagtaaataaatcttttttaaatcaaaa

SEQ ID NO: 156430 - DNA, 3968 bp, Homo sapiens
  Payload ID: 10670
  Gene Symbol: MPZL3
  Gene Name: myelin protein zero-like 3
  Uniprot ID: Q6UWV2
  ENST ID: ENST00000278949
  CDS Start-End: 57-764
tgtgtcgttaccgggagctgtaaacaaggtgtgcaagcatctgaagagctgccgggatgcagcagagaggagcagctggaagccgtggctgcgctctcttccctctgctgggcgtcctgttcttccagggtgtttatatcgtcttttccttggagattcgtgcagatgcccatgtccgaggttatgttggagaaaagatcaagttgaaatgcactttcaagtcaacttcagatgtcactgacaaacttactatagactggacatatcgccctcccagcagcagccacacagtatcaatatttcattatcagtctttccagtacccaaccacagcaggcacatttcgggatcggatttcctgggttggaaatgtatacaaaggggatgcatctataagtataagcaaccctaccataaaggacaatgggacattcagctgtgctgtgaagaatcccccagatgtgcatcataatattcccatgacagagctaacagtcacagaaaggggttttggcaccatgctttcctctgtggcccttctttccatccttgtctttgtgccctcagccgtggtggttgctctgctgctggtgagaatggggaggaaggctgctgggctgaagaagaggagcaggtctggctataagaagtcatctattgaggtttccgatgacactgatcaggaggaggaagaggcgtgtatggcgaggctttgtgtccgttgcgctgagtgcctggattcagactatgaagagacatattgatgaaagtctgtatgacacaagaagagtcacctaaagacaggaaacatcccattccactggcagctaaagcctgtcagagaaagtggagctggcctggaccatagcgatggacaatcctggagatcatcagtaaagactttaggaaccacttatttattgaataaatgttcttgttgtatttataaactgttcaggaactctcataagagactcatgacttcccctttcaatgaattatgctgtaattgaatgaagaaattcttttcctgagcaaaaagatactttttgattcatctttgctctggaatgtattacatgttttcttccaactgtttgaaggagaattttgaatgtttgccacaccgctgatacccaaataattttttaaatgaagtggagcttgtggcttcctgatgtgtcaccagacaaaatattcgcttgggatatgtattctttgttttttgctccatgtacactttcagctgtgagttagtatagggcgtatacttaccggtttaatgacctcaacctcagttgtgtttggataacttagggtgtatacccttagtttccttagagttggtaggatcaagtcattggtttgctttgactgggtttttaaagtattaagtacagtgtcatcaatttacagttaaggaaaggaatcgtgaagtagaaaaattattttctttagtcttgctggtacaatttgggctaaggagtctttgttattttctgtcttgcttttttttttttttttttttttttgaggcagagtctcactctgtcgccaggctggagtgcagtggtgtgatcttggctcactgcaacctctgcctcctgggttcaagcgattcttgtgcctcagcctctcgagtagctgggattacaggcatgcgccaccacacccagctaatttttgtgtttttagtagagacggggtttcaccattttggccaggatggtctcaatcccctgacctcgtgatccacctgcctcggcctcccaaagtgttgggattacaggcatgagccactgtgcttggcctgttattttattttcttataactacaacttttcttcttgaattttcaggtcagaggcaagaaaaactctttacaggtttttagtggggggcttatggagtatttcaggagttctttgcaaattaaatcatcttttcacttgtattgtttttcaaaactttgttgatttctaaaatgtgccaactgtgagtaaactatggtatttgcaagtggtttttacataatatttgagatgaggaagtgagattgtgcatgacatacttctcctttgtattctctcagtgccttacagcaggttactccattctgctatgacaacttgtttcaaatgttaatttacataggattttttataagccattaaggcatatgtatagtatatcagtaaagatggatggtgcatatataaatagtcttctgtaatagtgattggatttacttctcaattatgagagacaaaaattatcccctcacctgtctctattctttcaacaggttgatcccttttcatgatttttcattaggtggttcaggaagtttccatattacagcgcttcagactgtatatgttagtttaaaaatcacttttctctctctcaacttctttcttttttttttgaagacttaatttaaaaaatttgggttgttagatccgtatcatagatttggcctagcctcttctgttaacctagtccacagatgagcgaatctggttagttgaaggacattgtgatttgactctggtcacgcgaggaagtagaagggcaaagacaggaccggcagtttacatttccagtggttaaacctcacggtactttgggactgcttgttaacttttgtggttgtctgaggccaatctaacgtgaccatttctgacacctcaacagagagaggaaagcaacttgagcaatgagagtaaataacttgggctctcagagatttgaagatagagatctcattgtgagggggactattttgcaggtcctcatttctccaagaaagagatggtgttacaggaacccactgaaagccatatcccattaaatgaggaactaattttggctgggccttcttgtaatgtcctcgcaggtgtgttgtgaagattaatgcagggtagtatgtttgtagattgacacctagtctaaacttgaggtaattggtgctctgtgaatactcagtcgtgttcttttatagccttaatcatgatttgaactagtcccttgctttttaaatgactgaatgaagtccttcgtggtaagggagtacgttgataacttagtttactatatgggtttgtggtcgcatcccagtcatcagctgctatcattttccttcttcatcccttatactgagatttgggttacagctttttattcttcgaaggatcacaaagcagtgtacagacacctgccttctttaaggatgaaaggaagataaagtggtctttttttgtttacttatttgtttcacctcttgtttgagtaacttctaaggtgctattctctctctctttttgctacctcatgagctcttgtcacagccatggaaaccagcctcgtttagaaagggaacttagttcagaaggggttaaaagccttccagaatttttctttagctgctgaagtttttacatgtggttacatgactttaagttttatgcattacgctcttaattctattacaaaatgtggactcaccaattgctttgtgttttccatgtgacctgttacttcaggctacttggggaacatcttagtcctctgtagctcctgaacccagcactggtgcttcaagagagaaggtagcacgtctttgttcaaaacaaaacaaaacgacacttctggaggccacatcctgaatatgaatgttctactaagtcactcagttatggttctaaagggaaactgtaagaagacccacaaggagtggaccaagactattatttaattgcacaacttgaaactttgctgccagaagaggcagctccattcctttgactccagtgttgggctgttaactgctgcacctcattgcctttttttgtttttgtttttgttttgtaggagggtaggcactgttgggccatatgcacaaatattgtaactcttggtatctttactgcatcatagtcaataaacttctttgtaccctttggcta

SEQ ID NO: 156431 - DNA, 963 bp, Homo sapiens
  Payload ID: 10670
  Gene Symbol: MPZL3
  Gene Name: myelin protein zero-like 3
  Uniprot ID: Q6UWV2
  ENST ID: ENST00000446386
  CDS Start-End: 27-353
gtgcaagcatctgaagagctgccgggatgcagcagagaggagcagctggaagccgtggctgcgctctcttccctctgctgggcgtcctgttcttccagggtgtttatatcgtcttttccttggagattcgtgcagatgcccatgtccgaggttatgttggagaaaagatcaagttgaaatgcactttcaagtcaacttcagatgtcactgacaaacttactatagactggacatatcgccctcccagcagcagccacacagtatcagttttggcaccatgctttcctctgtggcccttctttccatccttgtctttgtgccctcagccgtggtggttgctctgctgctggtgagaatggggaggaaggctgctgggctgaagaagaggagcaggtctggctataagaagtcatctattgaggtttccgatgacactgatcaggaggaggaagaggcgtgtatggcgaggctttgtgtccgttgcgctgagtgcctggattcagactatgaagagacatattgatgaaagtctgtatgacacaagaagagtcacctaaagacaggaaacatcccattccactggcagctaaagcctgtcagagaaagtggagctggcctggaccatagcgatggacaatcctggagatcatcagtaaagactttaggaaccacttatttattgaataaatgttcttgttgtatttataaactgttcaggaactctcataagagactcatgacttcccctttcaatgaattatgctgtaattgaatgaagaaattcttttcctgagcaaaaagatactttttgattcatctttgctctggaatgtattacatgttttcttccaactgtttgaaggagaattttgaatgtttgccacaccgctgatacccaaataattttttaaatgaagtggagcttgtggcttcctgatgtgtcaccagacaaaatattcgctt

SEQ ID NO: 156432 - DNA, 1381 bp, Homo sapiens
  Payload ID: 10670
  Gene Symbol: MPZL3
  Gene Name: myelin protein zero-like 3
  Uniprot ID: Q6UWV2
  ENST ID: ENST00000527472
  CDS Start-End: 54-725
gtcgttaccgggagctgtaaacaaggtgtgcaagcatctgaagagctgccgggatgcagcagagaggagcagctggaagccgtggctgcgctctcttccctctgctgggcgtcctgttcttccaggatgcccatgtccgaggttatgttggagaaaagatcaagttgaaatgcactttcaagtcaacttcagatgtcactgacaaacttactatagactggacatatcgccctcccagcagcagccacacagtatcaatatttcattatcagtctttccagtacccaaccacagcaggcacatttcgggatcggatttcctgggttggaaatgtatacaaaggggatgcatctataagtataagcaaccctaccataaaggacaatgggacattcagctgtgctgtgaagaatcccccagatgtgcatcataatattcccatgacagagctaacagtcacagaaaggggttttggcaccatgctttcctctgtggcccttctttccatccttgtctttgtgccctcagccgtggtggttgctctgctgctggtgagaatggggaggaaggctgctgggctgaagaagaggagcaggtctggctataagaagtcatctattgaggtttccgatgacactgatcaggaggaggaagaggcgtgtatggcgaggctttgtgtccgttgcgctgagtgcctggattcagactatgaagagacatattgatgaaagtctgtatgacacaagaagagtcacctaaagacaggaaacatcccattccactggcagctaaagcctgtcagagaaagtggagctggcctggaccatagcgatggacaatcctggagatcatcagtaaagactttaggaaccacttatttattgaataaatgttcttgttgtatttataaactgttcaggaactctcataagagactcatgacttcccctttcaatgaattatgctgtaattgaatgaagaaattcttttcctgagcaaaaagatactttttgattcatctttgctctggaatgtattacatgttttcttccaactgtttgaaggagaattttgaatgtttgccacaccgctgatacccaaataattttttaaatgaagtggagcttgtggcttcctgatgtgtcaccagacaaaatattcgcttgggatatgtattctttgttttttgctccatgtacactttcagctgtgagttagtatagggcgtatacttaccggtttaatgacctcaacctcagttgtgtttggataacttagggtgtatacccttagtttccttagagttggtaggatcaagtcattggtttgctttgactgggtttttaaagtattaagtacagtgtcatcaatttacagttaa

SEQ ID NO: 156433 - DNA, 973 bp, Homo sapiens
  Payload ID: 10670
  Gene Symbol: MPZL3
  Gene Name: myelin protein zero-like 3
  ENST ID: ENST00000525386
  CDS Start-End: 54-251
gtcgttaccgggagctgtaaacaaggtgtgcaagcatctgaagagctgccgggatgcagcagagaggagcagctggaagccgtggctgcgctctcttccctctgctgggcgtcctgttcttccaggcactgatcaggaggaggaagaggcgtgtatggcgaggctttgtgtccgttgcgctgagtgcctggattcagactatgaagagacatattgatgaaagtctgtatgacacaagaagagtcacctaaagacaggaaacatcccattccactggcagctaaagcctgtcagagaaagtggagctggcctggaccatagcgatggacaatcctggagatcatcagtaaagactttaggaaccacttatttattgaataaatgttcttgttgtatttataaactgttcaggaactctcataagagactcatgacttcccctttcaatgaattatgctgtaattgaatgaagaaattcttttcctgagcaaaaagatactttttgattcatctttgctctggaatgtattacatgttttcttccaactgtttgaaggagaattttgaatgtttgccacaccgctgatacccaaataattttttaaatgaagtggagcttgtggcttcctgatgtgtcaccagacaaaatattcgcttgggatatgtattctttgttttttgctccatgtacactttcagctgtgagttagtatagggcgtatacttaccggtttaatgacctcaacctcagttgtgtttggataacttagggtgtatacccttagtttccttagagttggtaggatcaagtcattggtttgctttgactgggtttttaaagtattaagtacagtgtcatcaatttacagttaaggaaaggaatcgtgaagtagaaaaattattttctttagtcttgctggtacaatttgggctaaggagtctttgttattttctgtcttgctttttttttttt

SEQ ID NO: 156434 - DNA, 5745 bp, Homo sapiens
  Payload ID: 10671
  Gene Symbol: MYRF
  Gene Name: myelin regulatory factor
  Uniprot ID: Q9Y2G1
  ENST ID: ENST00000265460
  CDS Start-End: 36-3371
cacagggcctgcagagaggggacccaccgggcaggatgcactggcttccagcaggccacgacatcaacggtgccctggagccctccaacatagacaccagcatcctggaggagtacatcagcaaggaggatgcctccgacctctgcttccctgacatctctgctccagccagctcggcctcctactcccacgggcagcctgcgatgcctggctccagcggggtccaccacctgagcccccctgggggtggaccctccccggggcgccatggtcccctcccacccccgggctacggcaccccgctgaactgcaacaacaacaacggcatgggcgctgcccccaagcccttcccggggggcaccgggccccccatcaaggctgagcccaaggctccctatgccccaggcacactgccggactctcccccagactcgggctccgaggcctactccccccagcaggtgaatgagccccacctcctgcgcacgataacccctgagacactgtgccacgtgggagtgccctcccgcctggagcatccgcccccacctccagcccacttgccaggccccccgccacccccaccacccccacctcactaccctgtcctgcagcgggatctgtacatgaaggccgagcccccgatcccccactacgctgccatggggcaggggctggtgcccactgatcttcaccacacccagcagtcccagatgctgcaccagctcctgcagcagcacggagctgagctccctacacacccctccaagaagaggaagcactctgaatccccccccagcaccctcaatgcccagatgctgaatggaatgatcaaacaggagcctgggaccgtgacagccctgcctctgcaccccactcgagccccatcgccaccctggcctccccagggtccgctctccccgggccctggttccttgcctctcagcattgcccgtgtccagacaccgccttggcacccgccaggtgccccctccccaggcctcctgcaggacagtgacagcctcagtggctcctacctggaccccaactaccagtccatcaagtggcagcctcatcagcagaacaagtgggcgaccctgtacgatgctaactacaaggagctgcccatgctcacctaccgcgtggatgcggacaagggcttcaacttttcggtgggcgacgacgcctttgtgtgccagaagaagaaccacttccaggtgacagtgtacatcggcatgctgggcgagcccaagtacgtcaagacgcccgagggcctcaagcccctcgactgcttctatctgaagctgcacggagtgaagctggaggccctgaaccagtccattaacatcgagcagtcccagtcagaccggagcaagcggcccttcaacccggtcacggtcaatctgccccctgagcaggtcacgaaggtgactgtggggcggctgcacttcagcgagaccaccgctaacaacatgcgtaagaagggcaagcccaacccggaccagaggtacttcatgctggtggtggccctccaggctcatgcacagaaccagaactacacgctggccgcccagatctcagagcgcatcattgtgcgggcctccaacccaggccagttcgagagcgacagcgatgtgttgtggcagcgggcacaggtgcccgacaccgtcttccaccacggccgcgtgggcatcaacacagaccggccggatgaggcgctggttgtgcacgggaatgtcaaggtcatgggctcgcttatgcacccctccgacctgcgcgccaaggaacacgtgcaggaggtggacaccaccgagcaattgaagaggatctcgcgcatgcggctggtgcactacagatacaagcccgagttcgccgccagcgcgggcatcgaggccaccgcgccagagacaggtgtcatcgctcaggaggtgaaggagatcttgcctgaggctgtgaaagacaccggagacatggtctttgccaatgggaaaaccatagagaacttcctggtggtgaacaaggagcgcatcttcatggagaacgtaggggccgtgaaggagctgtgcaagctgacagacaacctggagacgcgcattgatgagctggagcgctggagccacaagctggccaagctgcggcggctcgacagcctcaagtccaccggcagctcgggcgccttcagccatgcagggagccagttcagtcgggcgggcagcgtcccccacaagaagaggccccccaaggtggccagcaagtcatcgtccgtggttccggaccaggcctgcatcagccagcgcttcctgcagggaaccatcattgccctggtggtggtcatggccttcagcgtggtgtccatgtccacactgtacgtgctgagcctgcgcacagaggaggacctggtagacactgatggcaggtccagccagagctttgggaccacgcagctccgacagtcccccttgaccacggggctaccaggcatacagccctctttgctgctggtgaccaccagcctcaccagctcggccccaggttctgctgtccgcaccttggacatgtgttccagccacccctgccctgtcatctgctgttcctcacccactaccaaccctaccactggtcctagtcttggccccagctttaaccctggccatgttctcagcccaagtcccagccccagcaccaaccgctcaggccccagccagatggcccttctgccagtcaccaacatcagagccaagtcctggggtctttcagtcaatggcattggccactccaagcatcacaagagtctggagcctctggccagccctgcagtccccttccctggggggcagggcaaagccaagaacagtcccagccttggtttccatggccgggcccgccgaggggccctccagtccagcgtgggccctgctgagcccacctgggcccagggccagtcagagccagtgccctccctgacctccatccaggtgctggagaattcgatgtccatcacctcccagtactgtgctccaggggatgcctgcaggcctgggaacttcacctaccacatccctgtcagtagtggcaccccactgcacctcagcctgactctgcagatgaactcctcctcccccgtgtctgtggtgctgtgcagcctgaggtcaaaggaggaaccatgtgaggaggggagccttccacagagtctccacacccaccaggacacccagggcacctctcaccggtggccaataaccatcctgtccttccgtgaattcacctaccacttccgggtggcactgctgggtcaggccaactgcagttcagaggctctcgcccagccagccacagactaccacttccacttctaccgcctgtgtgactgagctgccctcctgaggcagcaccacaccagggaccaggggtgcccaggcaccccccaacactggatgcaatggtgttacactggagcccgctgcaggccagctctgctgttcactggccctacccgagactggtgaaactggaagtcttcacactggagttgctgttccagctggtcgcccctcacggcacagagggaacctgagagccagagacttcttgggccttcctgcctgccaccccctaggggccaggacaggaccagtttacctctttccagatatggtggttggagggctggttcaggtgccctggagggaaggggaagcctgtggccctgatttgttcagagcccattctcccttgcctccccttttgagactggagccaacccttttggagagaggacctgcccacctttgagatcagcagggggctcggatccagccctaagagacttgggtggacccccatgagtcaatggagggcagacggctctcccccttaaagctgttccctgggggatggcttggtagtggactttctggggtttgcctgttacgccagactcggacttctaagctttaagtgtggcccaggaggtttcttctccctgggagggcttggctcccaagaagtcccagggcagccgaggccagccctgcctgggttggagaaactgactttgtgccttaagtctactcagtgcctggtgaagccaccctcagcccttcacaggcctgaaccagtaggggccagtgggccaggtaagccctagagccttgaaccaggaatatccaggaagaggaaattccctttgagcccccagatggtattgcagcttcactgcctgcgttcctgggagcgtctggagctcacagtgatcagtgaccacatcattctctctgagcagaggagcaggaatccctcaagcagcagcctggtcttggctggtgggcagatgcaaatagcttttgctgttattaatgaagtaattactaaatgcacttaaaccagggcaggaaggaatggaaggatggagctagaaagctcagagtgggccagagcaggggtgtgacacttgcaaagacagggctctgactctgatccctcccagggagcctccgacacccatcccactcccaaccaccaagaccctgggttagggaagaagttgtatcttaagtgccaccttcaagtttcttagtggtgcctggtgcattccgaggctacatccaggctcatggaaggagtgtagtattcatttagccatgtctgccatgggtccagaaatgggaaagggaattgctgtccttgccctgtggtatgctgccacctctttgggaagcaggccttgcccctgtcccaccactcattctcagctttgaatgggaggcctttctatagtggaggcctttccttgaagcctatgaactgcaggcccccttttgccattgatctcaaagcacttgtcctcaggatagggaagagcagggggatgcaggaatagcagggatagcttgctcccagccccctccccaatttggttccgttgacataggaattttacgattcccaaaccatgcaggggctgagccttccttatgatgactttgttctccctcccactgggggaatcctccctatgccttaaaactgccgagccccactccatgtaataggattcctgggcttcctcaatgggggttcatgttcttggactgcgggccctcagtccttaactggaaagtgaccgtccactgccccatggagcccatctggacacagcacagccccaaaaccgttagcagctggctctgtttccaagcctggggaggggttcctcagtgcaggagttggggacaggctggggatccaagctgcttgagggggtcaaccttggaccaaagttgccttaagcctgtggtaaaagggcttcagggaaggtaagtgggccacctgctggaagctgccagctgcccggctggcaatggtgtgagtgtcttggccctgtccctgccctggggtccagcaggtcatccctcccttcttctctctcctttggcgtttgttcctgtagtcactgggctaatctccccctagcttcaagctgtacatagggcctcccagtgcaaatcctcctgcccataccgtgcacccttagaagcctgcgtgtgcatagagcgccccctacttcccagttaactcccagttcttctccctgagcttggtatttgtcatgtgccaactctgactctgaggtgggcagtgagggaagcagccccgggcctgcttgcttcctgtccccgaaatgttcgtttcttctgaagtaaatatacatatataaataaatgtataaatactgctttgtatctg

SEQ ID NO: 156435 - DNA, 5927 bp, Homo sapiens
  Payload ID: 10671
  Gene Symbol: MYRF
  Gene Name: myelin regulatory factor
  Uniprot ID: Q9Y2G1
  ENST ID: ENST00000278836
  CDS Start-End: 97-3552
agccgggactgtcgcgcgggccgcgccggcgatgccgcgcccccgggccgggctgtagcggggccgcggctggagtgtgcgccgggcaggcgggacatggaggtggtggacgagacggaggcgctgcagcgcttcttcgaaggccacgacatcaacggtgccctggagccctccaacatagacaccagcatcctggaggagtacatcagcaaggaggatgcctccgacctctgcttccctgacatctctgctccagccagctcggcctcctactcccacgggcagcctgcgatgcctggctccagcggggtccaccacctgagcccccctgggggtggaccctccccggggcgccatggtcccctcccacccccgggctacggcaccccgctgaactgcaacaacaacaacggcatgggcgctgcccccaagcccttcccggggggcaccgggccccccatcaaggctgagcccaaggctccctatgccccaggcacactgccggactctcccccagactcgggctccgaggcctactccccccagcaggtgaatgagccccacctcctgcgcacgataacccctgagacactgtgccacgtgggagtgccctcccgcctggagcatccgcccccacctccagcccacttgccaggccccccgccacccccaccacccccacctcactaccctgtcctgcagcgggatctgtacatgaaggccgagcccccgatcccccactacgctgccatggggcaggggctggtgcccactgatcttcaccacacccagcagtcccagatgctgcaccagctcctgcagcagcacggagctgagctccctacacacccctccaagaagaggaagcactctgaatccccccccagcaccctcaatgcccagatgctgaatggaatgatcaaacaggagcctgggaccgtgacagccctgcctctgcaccccactcgagccccatcgccaccctggcctccccagggtccgctctccccgggccctggttccttgcctctcagcattgcccgtgtccagacaccgccttggcacccgccaggtgccccctccccaggcctcctgcaggacagtgacagcctcagtggctcctacctggaccccaactaccagtccatcaagtggcagcctcatcagcagaacaagtgggcgaccctgtacgatgctaactacaaggagctgcccatgctcacctaccgcgtggatgcggacaagggcttcaacttttcggtgggcgacgacgcctttgtgtgccagaagaagaaccacttccaggtgacagtgtacatcggcatgctgggcgagcccaagtacgtcaagacgcccgagggcctcaagcccctcgactgcttctatctgaagctgcacggagtgaagctggaggccctgaaccagtccattaacatcgagcagtcccagtcagaccggagcaagcggcccttcaacccggtcacggtcaatctgccccctgagcaggtcacgaaggtgactgtggggcggctgcacttcagcgagaccaccgctaacaacatgcgtaagaagggcaagcccaacccggaccagaggtacttcatgctggtggtggccctccaggctcatgcacagaaccagaactacacgctggccgcccagatctcagagcgcatcattgtgcgggcctccaacccaggccagttcgagagcgacagcgatgtgttgtggcagcgggcacaggtgcccgacaccgtcttccaccacggccgcgtgggcatcaacacagaccggccggatgaggcgctggttgtgcacgggaatgtcaaggtcatgggctcgcttatgcacccctccgacctgcgcgccaaggaacacgtgcaggaggtggacaccaccgagcaattgaagaggatctcgcgcatgcggctggtgcactacagatacaagcccgagttcgccgccagcgcgggcatcgaggccaccgcgccagagacaggtgtcatcgctcaggaggtgaaggagatcttgcctgaggctgtgaaagacaccggagacatggtctttgccaatgggaaaaccatagagaacttcctggtggtgaacaaggagcgcatcttcatggagaacgtaggggccgtgaaggagctgtgcaagctgacagacaacctggagacgcgcattgatgagctggagcgctggagccacaagctggccaagctgcggcggctcgacagcctcaagtccaccggcagctcgggcgccttcagccatgcagggagccagttcagtcgggcgggcagcgtcccccacaagaagaggccccccaaggtggccagcaagtcatcgtccgtggttccggaccaggcctgcatcagccagcgcttcctgcagggaaccatcattgccctggtggtggtcatggccttcagcgtggtgtccatgtccacactgtacgtgctgagcctgcgcacagaggaggacctggtagacactgatggctcttttgccgtgtccacttcctgtctcctggccctgctccggccccagccccctggggggagtgaggccttgtgcccatggtccagccagagctttgggaccacgcagctccgacagtcccccttgaccacggggctaccaggcatacagccctctttgctgctggtgaccaccagcctcaccagctcggccccaggttctgctgtccgcaccttggacatgtgttccagccacccctgccctgtcatctgctgttcctcacccactaccaaccctaccactggtcctagtcttggccccagctttaaccctggccatgttctcagcccaagtcccagccccagcaccaaccgctcaggccccagccagatggcccttctgccagtcaccaacatcagagccaagtcctggggtctttcagtcaatggcattggccactccaagcatcacaagagtctggagcctctggccagccctgcagtccccttccctggggggcagggcaaagccaagaacagtcccagccttggtttccatggccgggcccgccgaggggccctccagtccagcgtgggccctgctgagcccacctgggcccagggccagtcagcctctctccttgcagagccagtgccctccctgacctccatccaggtgctggagaattcgatgtccatcacctcccagtactgtgctccaggggatgcctgcaggcctgggaacttcacctaccacatccctgtcagtagtggcaccccactgcacctcagcctgactctgcagatgaactcctcctcccccgtgtctgtggtgctgtgcagcctgaggtcaaaggaggaaccatgtgaggaggggagccttccacagagtctccacacccaccaggacacccagggcacctctcaccggtggccaataaccatcctgtccttccgtgaattcacctaccacttccgggtggcactgctgggtcaggccaactgcagttcagaggctctcgcccagccagccacagactaccacttccacttctaccgcctgtgtgactgagctgccctcctgaggcagcaccacaccagggaccaggggtgcccaggcaccccccaacactggatgcaatggtgttacactggagcccgctgcaggccagctctgctgttcactggccctacccgagactggtgaaactggaagtcttcacactggagttgctgttccagctggtcgcccctcacggcacagagggaacctgagagccagagacttcttgggccttcctgcctgccaccccctaggggccaggacaggaccagtttacctctttccagatatggtggttggagggctggttcaggtgccctggagggaaggggaagcctgtggccctgatttgttcagagcccattctcccttgcctccccttttgagactggagccaacccttttggagagaggacctgcccacctttgagatcagcagggggctcggatccagccctaagagacttgggtggacccccatgagtcaatggagggcagacggctctcccccttaaagctgttccctgggggatggcttggtagtggactttctggggtttgcctgttacgccagactcggacttctaagctttaagtgtggcccaggaggtttcttctccctgggagggcttggctcccaagaagtcccagggcagccgaggccagccctgcctgggttggagaaactgactttgtgccttaagtctactcagtgcctggtgaagccaccctcagcccttcacaggcctgaaccagtaggggccagtgggccaggtaagccctagagccttgaaccaggaatatccaggaagaggaaattccctttgagcccccagatggtattgcagcttcactgcctgcgttcctgggagcgtctggagctcacagtgatcagtgaccacatcattctctctgagcagaggagcaggaatccctcaagcagcagcctggtcttggctggtgggcagatgcaaatagcttttgctgttattaatgaagtaattactaaatgcacttaaaccagggcaggaaggaatggaaggatggagctagaaagctcagagtgggccagagcaggggtgtgacacttgcaaagacagggctctgactctgatccctcccagggagcctccgacacccatcccactcccaaccaccaagaccctgggttagggaagaagttgtatcttaagtgccaccttcaagtttcttagtggtgcctggtgcattccgaggctacatccaggctcatggaaggagtgtagtattcatttagccatgtctgccatgggtccagaaatgggaaagggaattgctgtccttgccctgtggtatgctgccacctctttgggaagcaggccttgcccctgtcccaccactcattctcagctttgaatgggaggcctttctatagtggaggcctttccttgaagcctatgaactgcaggcccccttttgccattgatctcaaagcacttgtcctcaggatagggaagagcagggggatgcaggaatagcagggatagcttgctcccagccccctccccaatttggttccgttgacataggaattttacgattcccaaaccatgcaggggctgagccttccttatgatgactttgttctccctcccactgggggaatcctccctatgccttaaaactgccgagccccactccatgtaataggattcctgggcttcctcaatgggggttcatgttcttggactgcgggccctcagtccttaactggaaagtgaccgtccactgccccatggagcccatctggacacagcacagccccaaaaccgttagcagctggctctgtttccaagcctggggaggggttcctcagtgcaggagttggggacaggctggggatccaagctgcttgagggggtcaaccttggaccaaagttgccttaagcctgtggtaaaagggcttcagggaaggtaagtgggccacctgctggaagctgccagctgcccggctggcaatggtgtgagtgtcttggccctgtccctgccctggggtccagcaggtcatccctcccttcttctctctcctttggcgtttgttcctgtagtcactgggctaatctccccctagcttcaagctgtacatagggcctcccagtgcaaatcctcctgcccataccgtgcacccttagaagcctgcgtgtgcatagagcgccccctacttcccagttaactcccagttcttctccctgagcttggtatttgtcatgtgccaactctgactctgaggtgggcagtgagggaagcagccccgggcctgcttgcttcctgtccccgaaatgttcgtttcttctgaagtaaatatacatatataaataaatgtataaatactgctttgtatctga

SEQ ID NO: 156436 - DNA, 2052 bp, Homo sapiens
  Payload ID: 10671
  Gene Symbol: MYRF
  Gene Name: myelin regulatory factor
  ENST ID: ENST00000389602
  CDS Start-End: 165-1778
atctaaccactccagtggtggggtctcctctccacactgcagcctccaggctgccgccctcctgggctccggggcctgctccgggacggccgcaggaggggttcattcccgggcctggctccccgcaggtggacaccaccgagcaattgaagaggatctcgcgcatgcggctggtgcactacagatacaagcccgagttcgccgccagcgcgggcatcgaggccaccgcgccagagacaggtgtcatcgctcaggaggtgaaggagatcttgcctgaggctgtgaaagacaccggagacatggtctttgccaatgggaaaaccatagagaacttcctggtggtgaacaaggagcgcatcttcatggagaacgtaggggccgtgaaggagctgtgcaagctgacagacaacctggagacgcgcattgatgagctggagcgctggagccacaagctggccaagctgcggcggctcgacagcctcaagtccaccggcagctcgggcgccttcagccatgcagggagccagttcagtcgggcgggcagcgtcccccacaagaagaggccccccaaggtggccagcaagtcatcgtccgtggttccggaccaggcctgcatcagccagcgcttcctgcagggaaccatcattgccctggtggtggtcatggccttcagcgtggtgtccatgtccacactgtacgtgctgagcctgcgcacagaggaggacctggtagacactgatggctcttttgccgtgtccacttcctgtctcctggccctgctccggccccagccccctggggggagtgaggccttgtgcccatggtccagccagagctttgggaccacgcagctccgacagtcccccttgaccacggggctaccaggcatacagccctctttgctgctggtgaccaccagcctcaccagctcggccccaggttctgctgtccgcaccttggacatgtgttccagccacccctgccctgtcatctgctgttcctcacccactaccaaccctaccactggtcctagtcttggccccagctttaaccctggccatgttctcagcccaagtcccagccccagcaccaaccgctcaggccccagccagatggcccttctgccagtcaccaacatcagagccaagtcctggggtctttcagtcaatggcattggccactccaagcatcacaagagtctggagcctctggccagccctgcagtccccttccctggggggcagggcaaagccaagaacagtcccagccttggtttccatggccgggcccgccgaggggccctccagtccagcgtgggccctgctgagcccacctgggcccagggccagtcagagccagtgccctccctgacctccatccaggtgctggagaattcgatgtccatcacctcccagtactgtgctccaggggatgcctgcaggcctgggaacttcacctaccacatccctgtcagtagtggcaccccactgcacctcagcctgactctgcagatgaactcctcctcccccgtgtctgtggtgctgtgcagcctgaggtcaaaggaggaaccatgtgaggaggggagccttccacagagtctccacacccaccaggacacccagggcacctctcaccggtggccaataaccatcctgtccttccgtgaattcacctaccacttccgggtggcactgctgggtcaggccaactgcagttcagaggctctcgcccagccagccacagactaccacttccacttctaccgcctgtgtgactgagctgccctcctgaggcagcaccacaccagggaccaggggtgcccaggcaccccccaacactggatgcaatggtgttacactggagcccgctgcaggccagctctgctgttcactggccctacccgagactggtgaaactggaagtcttcacactggagttgctgttccagctggtcgcccctcacggcacagagggaacctgagagccagagacttcttgggccttcctgcctgccaccccctaggggccaggacaggaccagtttacctcttt

SEQ ID NO: 156437 - DNA, 820 bp, Homo sapiens
  Payload ID: 10672
  Gene Symbol: MYRFL
  Gene Name: myelin regulatory factor-like
  ENST ID: ENST00000299350
  CDS Start-End: 1-753
atggtgtttcttgctttgacgatagttgccctctatatacttagcttaaaagatcaagaccgacgtgtcccaaatctccctccaagcaatatcacaagctcacaggagccagctctgctgcccacagcctcctcctcagcacctaatacatccctggtaaccacaccggcctccttacaagtacctgaaattactttctgtgaaatcctgccgtgtcaggagacttattgctgccccatccggggaatgaaagaagtctcttcaagtcctgtgcaaagacaatctgaggagaaggaattccatcagaggcgatggtcagaagacaaaagcaaatcagttttggcaagaaatgcactcagcggccctgactgggagagtgactggattgatacaaccatcagttctattcagattatggaaatccagcaaataatagatcatcagtattgcattcaaagcctccagtgcggcacaacagagccattgatagtcttccagtgcaaattcacccttggaaatatatgtttccatagtaaaaggggaaccaaagggctggaaagccacagagaaatctcccaggagatgacacagggatatcagcacatttggagcctccctgtagccccattttctgacagcatgttccatttccgtgtagctgcaccggatttagctgactgttcaactgatccttattttgctgggatattcttcaccgattacttcttttacttctatcgacgctgtgcctaatttgttcaagtttggggactttaccaaagaaaaatactcaggaatacatttaacagaaacgaacatc

SEQ ID NO: 156438 - DNA, 881 bp, Homo sapiens
  Payload ID: 10672
  Gene Symbol: MYRFL
  Gene Name: myelin regulatory factor-like
  ENST ID: ENST00000535034
  CDS Start-End: 53-805
ggcgtgtcctaattgggttttccagaccttggttataactctgattgctgtgatggcattttgtgctttgacgatagttgccctctatatacttagcttaaaagatcaagaccgacgtgtcccaaatctccctccaagcaatatcacaagctcacaggagccagctctgctgcccacagcctcctcctcagcacctaatacatccctggtaaccacaccggcctccttacaagtacctgaaattactttctgtgaaatcctgccgtgtcaggagacttattgctgccccatccggggaatgaaagaagtctcttcaagtcctgtgcaaagacaatctgaggagaaggaattccatcagaggcgatggtcagaagacaaaagcaaatcagttttggcaagaaatgcactcagcggccctgactgggagagtgactggattgatacaaccatcagttctattcagattatggaaatccagcaaataatagatcatcagtattgcattcaaagcctccagtgcggcacaacagagccattgatagtcttccagtgcaaattcacccttggaaatatatgtttccatagtaaaaggggaaccaaagggctggaaagccacagagaaatctcccaggagatgacacagggatatcagcacatttggagcctccctgtagccccattttctgacagcatgttccatttccgtgtagctgcaccggatttagctgactgttcaactgatccttattttgctgggatattcttcaccgattacttcttttacttctatcgacgctgtgcctaatttgttcaagtttggggactttaccaaagaaaaatactcaggaatacatttaacagaaacgaacatcctcttgcaa

SEQ ID NO: 156439 - DNA, 1319 bp, Homo sapiens
  Payload ID: 10672
  Gene Symbol: MYRFL
  Gene Name: myelin regulatory factor-like
  ENST ID: ENST00000548892
  CDS Start-End: 1-1127
agatctttatggaaaatgtaggtgcagtgaagcaactgtgcaaactaactaacaaccttgaggaaagaatagaagagttagaaatatggaacagaaagctggcccggctaaagcggctcagtagttggaagtcatcagccagtgaagcaagcacaatcagcaaatctagcagagccgttagtgcatcttctccaagaagggccgttcataaaaaaaacaacaaggtttatttttcaggaaaaagacaggcgtgtcctaattgggttttccagaccttggttataactctgattgctgtgatggcattttgtgctttgacgatagttgccctctatatacttagcttaaaagatcaagaccgacgtgtcccaaatctccctccaagcaatatcacaagctcacaggagccagctctgctgcccacagcctcctcctcagcacctaatacatccctggtaaccacaccggcctccttacaagtacctgaaattactttctgtgaaatcctgccgtgtcaggagacttattgctgccccatccggggaatgaaagaagtctcttcaagtcctgtgcaaagacaatctgaggagaaggaattccatcagaggcgatggtcagaagacaaaagcaaatcagttttggcaagaaatgcactcagcggccctgactgggagagtgactggattgatacaaccatcagttctattcagattatggaaatccagcaaataatagatcatcagtattgcattcaaagcctccagtgcggatctggaaattataattacaatattcctgttaataaacacacacccaccaatgtcaagttctctctggaaataaacacaacagagccattgatagtcttccagtgcaaattcacccttggaaatatatgtttccatagtaaaaggggaaccaaagggctggaaagccacagagaaatctcccaggagatgacacagggatatcagcacatttggagcctccctgtagccccattttctgacagcatgttccatttccgtgtagctgcaccggatttagctgactgttcaactgatccttattttgctgggatattcttcaccgattacttcttttacttctatcgacgctgtgcctaatttgttcaagtttggggactttaccaaagaaaaatactcaggaatacatttaacagaaacgaacatcctcttgcaacttcttttttcttctttgtaaaacatttacgtttattgctgaaggactttttcaggctttagcttccaacagttttgagacattaatgaggagaataaaatgtttgctgaaacttg

SEQ ID NO: 156440 - DNA, 3139 bp, Homo sapiens
  Payload ID: 10672
  Gene Symbol: MYRFL
  Gene Name: myelin regulatory factor-like
  Uniprot ID: Q96LU7
  ENST ID: ENST00000552032
  CDS Start-End: 215-2947
tggttgtatatccttccagttttataatcacatttgaaaactcaaccatctttctgggcacaatttgatggctgaagatatgcttcactccaataaaaagaaaatgaagatttttcaagagcattcgtaggcttcgaatcaaaaggacagtacttatttcctgaggtctgataaccgttgttttatgaggaaatagtactaggatcacagtaccatggatgtggtaggcgaaaatgaggccctgcagcagttctttgaagctcagggagccaatggtactctggagaacccagccctggacacaagtctgttggaggaatttctgggcaatgactttgatttgggggccttgcaacgccagctcccagacaccccgccctattctgcatccgactcatgctctcctccgcaggtcaaaggtgcatgctacccaaccctgaggcccacagctgggaggactccagctccttttctccaccccacagctgctcctgcgatgccgcccatgcacccgctgcagagcacctctggaatgggcgactcctgccaaatccacggaggctttcacagctgccactcaaacgccagtcatcttgccacccccctggaccaatccgtgtcctcccatctggggataggttgttcttaccctcagcagcctctgtgtcacagccctggagcctcattgcctccaaccaagaagagaaagtgcacgcaggcactggaggactccggggaatgccgagtgtgggcctgccactgcagaccgatgacaagtaggagtcgcagcagtgaagtccaggaccctgacagtgagggacagaacagaatgcctacagaccagtgctctcctgctctgaagtggcaaccatgccatagtgttccttggcacagcttattaaacagtcattatgaaaaactacctgatgtgggctatcgagttgtaacagacaaaggatttaatttttcaccagcagatgaagcttttgtttgccaaaagaagaatcatttccagataaccattcacatccaagtttggggaagtccaaaatttgttgaaaccgagatgggcctaaagccaatagaaatgttttacttgaaagtttttggcactaaggtggaagctaccaatcaaataattgctattgaacagtcccaagcagataggagcaaaaagattttcaatcctgttaaaattgacctactggctgaccaggtcaccaaagtaacactgggacgattacacttcagcgaaaccacagcaaataatatgagaaaaaagggaaaaccaaatccagaccagagatacttcatgttggtggttggactgtatgctgctaaccaagaccagttctatctgttgtctgcccacatctctgaaaggatcattgtaagggcctctaaccctgggcagtttgaaaatgacagtgatgcattgtggcagcgaggacaagttccagaatctattgtctgtcacggtcgagtaggaatcaacacagatgcgccggacgaagccctggttgtctgtggcaacatgaaagtgatggggaccatcatgcatccctctgacagccgggcaaagcagaatatccaggaggttgacacgaatgaacagctgaaaagaatagcccaaatgagaattgttgaatatgactacaaacctgaatttgcatctgcaatgggaataaacactgcccatcaaacaggaatgattgcccaggaggtgcaagaaatcctgcccagagcagtaagagaggttggtgatgtcacctgcggaaacggagagaccttggagaacttcctcatggtggataaggaccagatctttatggaaaatgtaggtgcagtgaagcaactgtgcaaactaactaacaaccttgaggaaagaatagaagagttagaaatatggaacagaaagctggcccggctaaagcggctcagtagttggaagtcatcagccagtgaagcaagcacaatcagcaaatctagcagagccgttagtgcatcttctccaagaagggccgttcataaaaaaaacaacaaggtttatttttcaggaaaaagacaggcgtgtcctaattgggttttccagaccttggttataactctgattgctgtgatggcattttgtgctttgacgatagttgccctctatatacttagcttaaaagatcaagaccgacgtgtcccaaatctccctccaagcaatatcacaagctcacaggagccagctctgctgcccacagcctcctcctcagcacctaatacatccctggtaaccacaccggcctccttacaagtacctgaaattactttctgtgaaatcctgccgtgtcaggagacttattgctgccccatccggggaatgaaagaagtctcttcaagtcctgtgcaaagacaatctgaggagaaggaattccatcagaggcgatggtcagaagacaaaagcaaatcagttttggcaagaaatgcactcagcggccctgactgggagagtgactggattgatacaaccatcagttctattcagattatggaaatccagcaaataatagatcatcagtattgcattcaaagcctccagtgcggatctggaaattataattacaatattcctgttaataaacacacacccaccaatgtcaagttctctctggaaataaacacaacagagccattgatagtcttccagtgcaaattcacccttggaaatatatgtttccatagtaaaaggggaaccaaagggctggaaagccacagagaaatctcccaggagatgacacagggatatcagcacatttggagcctccctgtagccccattttctgacagcatgttccatttccgtgtagctgcaccggatttagctgactgttcaactgatccttattttgctgggatattcttcaccgattacttcttttacttctatcgacgctgtgcctaatttgttcaagtttggggactttaccaaagaaaaatactcaggaatacatttaacagaaacgaacatcctcttgcaacttcttttttcttctttgtaaaacatttacgtttattgctgaaggactttttcaggctttagcttccaacagttttgagacattaatgaggagaataaaatgtttgctgaaacttg

SEQ ID NO: 156441 - DNA, 3465 bp, Homo sapiens
  Payload ID: 10672
  Gene Symbol: MYRFL
  Gene Name: myelin regulatory factor-like
  ENST ID: ENST00000547771
  CDS Start-End: 203-2899
cttccagttttataatcacatttgaaaactcaaccatctttctgggcacaatttgatggctgaagatatgcttcactccaataaaaagaaaatgaagatttttcaagagcattcgtaggcttcgaatcaaaaggacagtacttatttcctgaggtctgataaccgttgttttatgaggaaatagtactaggatcacagtaccatggatgtggtaggcgaaaatgaggccctgcagcagttctttgaagctcagggagccaatggtactctggagaacccagccctggacacaagtctgttggaggaatttctgggcaatgactttgatttgggggccttgcaacgccagctcccagacaccccgccctattctgcatccgactcatgctctcctccgcaggtcaaaggtgcatgctacccaaccctgaggcccacagctgggaggactccagctccttttctccaccccacagctgctcctgcgatgccgcccatgcacccgctgcagagcacctctggaatgggcgactcctgccaaatccacggaggctttcacagctgccactcaaacgccagtcatcttgccacccccctggaccaatccgtgtcctcccatctggggataggttgttcttaccctcagcagcctctgtgtcacagccctggagcctcattgcctccaaccaagaagagaaagtgcacgcaggcactggaggactccggggaatgccgagtgtgggcctgccactgcagaccgatgacaagtaggagtcgcagcagtgaagtccaggaccctgacagtgagggacagaacagaatgcctacagaccagtgctctcctgctctgaagtggcaaccatgccatagtgttccttggcacagcttattaaacagtcattatgaaaaactacctgatgtgggctatcgagttgtaacagacaaaggatttaatttttcaccagcagatgaagcttttgtttgccaaaagaagaatcatttccagataaccattcacatccaagtttggggaagtccaaaatttgttgaaaccgagatgggcctaaagccaatagaaatgttttacttgaaagtttttggcactaaggtggaagctaccaatcaaataattgctattgaacagtcccaagcagataggagcaaaaagattttcaatcctgttaaaattgacctactggctgaccaggtcaccaaagtaacactgggacgattacacttcagcgaaaccacagcaaataatatgagaaaaaagggaaaaccaaatccagaccagagatacttcatgttggtggttggactgtatgctgctaaccaagaccagttctatctgttgtctgcccacatctctgaaaggatcattgtaagggcctctaaccctgggcagtttgaaaatgacagtgatgcattgtggcagcgaggacaagttccagaatctattgtctgtcacggtcgagtaggaatcaacacagatgcgccggacgaagccctggttgtctgtggcaacatgaaagtgatggggaccatcatgcatccctctgacagccgggcaaagcagaatatccaggaggttgacacgaatgaacagctgaaaagaatagcccaaatgagaattgttgaatatgactacaaacctgaatttgcatctgcaatgggaataaacactgcccatcaaacaggaatgattgcccaggaggtgcaagaaatcctgcccagagcagtaagagaggttggtgatgtcacctgcggaaacggagagaccttggagaacttcctcatggtggataaggaccagatctttatggaaaatgtaggtgcagtgaagcaactgtgcaaactaactaacaaccttgaggaaagaatagaagagttagaaatatggaacagaaagctggcccggctaaagcggctcagtagttggaagtcatcagccagtgaagcaagcacaatcagcaaatctagcagagccgttagtgcatcttctccaagaagggccgttcataaaaaaaacaacaaggtttatttttcaggaaaaagacaggcgtgtcctaattgggttttccagaccttggttataactctgattgctgtgatggcattttgcttaaaagatcaagaccgacgtgtcccaaatctccctccaagcaatatcacaagctcacaggagccagctctgctgcccacagcctcctcctcagcacctaatacatccctggtaaccacaccggcctccttacaagtacctgaaattactttctgtgaaatcctgccgtgtcaggagacttattgctgccccatccggggaatgaaagaagtctcttcaagtcctgtgcaaagacaatctgaggagaaggaattccatcagaggcgatggtcagacaaaagcaaatcagttttggcaagaaatgcactcagcggccctgactgggagagtgactggattgatacaaccatcagttctattcagattatggaaatccagcaaataatagatcatcagtattgcattcaaagcctccagtgcggatctggaaattataattacaatattcctgttaataaacacacacccaccaatgtcaagttctctctggaaataaacacaacagagccattgatagtcttccagtgcaaattcacccttggaaatatatgtttccatagtaaaaggggaaccaaagggctggaaagccacagagaaatctcccaggagatgacacagggatatcagcacatttggagcctccctgtagccccattttctgacagcatgttccatttccgtgtagctgcaccggatttagctgactgttcaactgatccttattttgctgggatattcttcaccgattacttcttttacttctatcgacgctgtgcctaatttgttcaagtttggggactttaccaaagaaaaatactcaggaatacatttaacagaaacgaacatcctcttgcaacttcttttttcttctttgtaaaacatttacgtttattgctgaaggactttttcaggctttagcttccaacagttttgagacattaatgaggagaataaaatgtttgctgaaacttgaaataatgtgatgtttgattttgccatgactatgaagaaaacatttcctggagcaaacagttctgttgaatttaaaaatactattatttctggtattaaggaagttgtgagctcaaaataaggagatctagcctctattttgttttaatgtattttaaagcttttgaaaaaaccaaaagggccatgtcgacttcggcccactaaacatagactcttgagaatgtgtgatatggtatgtggaggagatgtggggggtggtatctgatactgagctcacatttaggcaaattgtcctatgtgtgtgtgtattgtataaacacatacactagagtacagaatgtagtttgttaatcaaatggatttaagagaaataa

SEQ ID NO: 156442 - DNA, 5535 bp, Homo sapiens
  Payload ID: 10673
  Gene Symbol: MYT1
  Gene Name: myelin transcription factor 1
  Uniprot ID: Q01538
  ENST ID: ENST00000328439
  CDS Start-End: 365-3730
ctccgccagcccgtgccaccgctgctaatgagagcagtcattaagtaaatgagacgtcgcctttagctggcttaggagttcgcacactaaggggagaagatatttaattgaaacccgcacgcaggcttccccacatgtgaccgctgtacgggaggcagctgccttccctctcctcccccagtccaccctgcaccccccatgtaaatttcatgattgctttccgtgatgtcattttgaaagaggacagacaatagctgtggggaaagaaaatgagttccgaggtgagctgttaaatcagaggtggacacacggaggcaaggccagcagctgcaggacctcaagacacctgggcagacactgcaagatgagcttagaaaatgaagacaagcgagctcgcacccgatccaaggccctgcgaggacccccagagaccacagctgcagacctcagctgccccaccccaggatgcacaggctcagggcacgtccggggcaagtactccaggcaccgaagtttacagagctgccccctggccaagaagaggaagctggagggcgctgaggctgagcacctggtgtccaagaggaagtcacaccccctgaagctggctctggacgagggctatggtgtggacagcgacggcagtgaggacactgaggtgaaggacgcctctgtttcggatgaatcggaaggaactctggagggggccgaggctgagacgtcaggacaggacgagattcatcgccccgagacagctgaaggaaggagccccgtcaagtcccattttggatccaaccccatcggcagcgccactgcctcctccaagggcagctacagcagctaccagggaatcatcgcaacttctctcctgaacttgggtcaaattgctgaagagaccctggtggaagaggacttgggccaggcggccaagccaggtcctggcattgtgcacctgcttcaggaggctgcagagggagctgccagcgaggagggtgaaaagggcctcttcatccagccagaggatgccgaggaggtcgtcgaagtcaccaccgagcgctcccaggacctgtgtccccagtccctggaggatgcagccagtgaggagtccagcaagcagaaaggcatcctgagtcacgaagaggaggacgaggaggaggaggaggaggaagaggaggaggaggaggatgaagaagaggaagaggaagaggaggaggaagaggaagaggaggaggaggaagaggaagaggaggaggaagaggaagaggaagaggaggaggaggaggcagctcctgatgtgatctttcaggaagacacctctcacacctctgcccagaaggcccctgagctccggggcccagaatcacccagtcccaagcctgagtactctgttattgtggaggtccgctcggatgatgacaaggacgaggacacccactcccggaagtcaacagtcactgacgagtcggagatgcaggacatgatgacccggggaaacctgggcctcctggagcaggccatcgccctgaaggctgaacaggtgcgcacagtctgcgagccgggctgcccgcctgccgagcagagccagctgggcctgggagagccagggaaggcagcaaagcccctggacactgtgcggaagagttactacagtaaagatccttcaagagctgagaagcgtgagatcaagtgtccaacaccaggctgtgatggcactggccacgttaccgggttgtaccctcaccaccgcagcctttctggctgtccccacaaggataggatccccccagagatcttagccatgcatgagaacgtgctgaagtgccccactcctggctgcacaggccagggtcacgtgaacagcaaccgcaacacgcacagaagtttgtctgggtgtcccattgctgccgccgaaaaattagccaaatcccatgagaagcagcagccgcagacaggagatccttccaagagtagctccaattccgatcggatcctcaggcccatgtgcttcgtgaagcagctcgaggtccctccatatgggagctaccggcccaacgtggcccccgccacacccagggccaacttggccaaggagctggagaagttctccaaggtcacctttgactacgcaagtttcgatgctcaggtttttggcaaacgcatgcttgccccaaagattcagaccagcgaaacctcacctaaagcctttcaatgctttgactactcgcaggacgccgaggctgcacacatggctgccactgccatcctgaacctctccacgcgctgctgggagatgcctgagaacctcagcacgaagccacaggacctccccagcaagtctgtggatatcgaggtagacgaaaatggaaccctggacttgagcatgcacaaacaccgcaaacgagaaaatgctttccccagcagcagcagctgcagcagcagccccggtgtgaagtctcccgacgcctcccagcgccacagcagcaccagcgcccccagcagctccatgacctctccccagtccagccaggcctcccgccaggacgagtgggaccggcccctggactacaccaagcctagccgcctgagagaggaggaacctgaggagtcagagccagcagcccattcttttgcttcttctgaagcagatgaccaggaagtgtcggaagagaattttgaggagcggaagtatccgggggaagtcaccctgaccaactttaagctgaagtttctctccaaggacataaagaaggagctgctcacctgtcccacccctggctgtgacggcagcggccacatcaccgggaactacgcctcccaccgcagcctctctggttgccctcttgctgacaagagcctcagaaacctcatggctgcccactctgctgacctcaagtgccccacgcccggctgtgacggctctggccacatcacagggaactacgcttcacaccggagcttgtccggctgccctcgtgcaaagaaaagtggagtcaaggtggcacccaccaaggacgacaaggaggaccccgagctgatgaagtgcccagttccaggctgtgtggggctcggtcacatcagcgggaaatacgcctctcacaggagcgcatccggctgcccactggccgcccgcaggcagaaggaagggtccctcaatggctcgtcattctcctggaagtccctgaagaatgaaggaccgacctgccccaccccgggctgtgacggctctggccacgccaatgggagtttcctcacccaccggagtttgtcaggctgtcccagagcaacctttgctggaaagaagggaaaactgtcaggggatgaggtcctcagtccaaagttcaagactagcgacgtgttggagaatgatgaggagatcaagcagctgaaccaggagatccgagacctgaacgagtccaactcggagatggaggctgccatggtgcagctgcagtcccagatctcctccatggagaagaacctgaagaacatcgaggaggagaacaagctcattgaggagcagaatgaagccctgtttctggagctgtccggcctgagccaggccctcatccaaagtctcgccaatatccgccttccgcacatggagccaatatgcgaacagaatttcgatgcctatgtgagcaccctcaccgacatgtactccaaccaggacccggagaacaaggacctcctggagagcatcaagcaggctgtgaggggcatccaggtctaggccgtgtggtacccagaagtgtcccagcccaccacaccgtttacctccctcgccctgccccgcaccgtggggatgcccaactcacagtgacttcccgtttggggcccggtgtggccgcgggcgggtttatccaaagggatggctggaaattggccgctcccacgaggctccctccaggcttggggccgtggtggccctatctgtgtgcataggggcactgaagaattacaaagtgatttatttttgttttctgaaagaaatctgaagagcagctcaaagtctccagtggaagctcatggacaaggttctcagggaagttttggagtttgcaaccacagtattcctttgtctgtcgaggctgggagggtagccgtgagcgtggtgggtgggtggtgtgagtggcatcttggcctggaggacacgcctggggcagcgtgtctgtgctcagtgagggccgatgaagaaagtgcgttttctgttttcatttaattcagttttgtgttaagggtggaacaaagctctgttctagagggaaagttaggaataggcctcccagaggatactccagacagttgacaagcatcgcagcccctgtcaggtcaaggaattttaacctgggagactcctgaaaatcagcctaatgtctgggggcagctggcgctgaggctgtgcagatgtgtatggccttgggtcacagctccctactggggctgcagcctttagaccctgggtctgggatccacgtctagggaccactctggcttctgtgcatccacccaggcccccgacccatcactgccacattctccgggtcatggccgagcttgacctctgcatccatggtgacggaggtggcaatgacatcatcaaggtcagagggtaaattcctaacaggagaccacaaaggtttcacttcttttagatccatccaatatgcgaaaaaagggtacattttaatttaatgtgttaaaaacacaatgtccctaccgtgtaaatagaatccaagtcaattgtgactgcaattccaagttagtatttaaaaatagagaaattgcacttcctggaaaaaattaaaaagtagttagtttaattattctgtaaattatttaattttgtcaagatgtaagtatttatattcacagcctcttatgttaacgtttgctatttatttaacatttttatttattaattttatactatttcaactagaccccacaccagggcaccctaagaggggaaaaaagtgaattcaaagcaaaaataactatttgactataatataggccacaaaaaatcttgatataactcctagttataattttgatgcaaccaagttattttttatatattttgttatttattcttttaataatggaatttttttaaaaagtattttgtaactgaggaattttgataatttggggattttgttttcccttggtctaatggagagaaagacattttggttttctttttccattttgggttccttttgtttcaggcacggataacagcaaatggaattctgtatttattattatttaagtgtagcgcagatgtgtgtgcttgggcgtgtttctcgtgtcgcgtttgcgtgtcggctcttgcggtggagtcctgttgctgtgagggagtgctggccgcaggcagcctcgagtcaccgccaggctcacaggctgtgccacccgtccctccgacagctccaatactgtgaccctccttcctcaggaagcgcgttgaacccacagcactccgtggtgtgtttgcagggtgatttcctaataaaagtccactctgactgtgaa

SEQ ID NO: 156443 - DNA, 2061 bp, Homo sapiens
  Payload ID: 10673
  Gene Symbol: MYT1
  Gene Name: myelin transcription factor 1
  ENST ID: ENST00000360149
  CDS Start-End: 219-1994
cggagtagcaggagtttgcaagctgcttcattaacttggagccagtggaatgtctgggatcgtctgtgatttggaaaccggtggcagaatgttcccgcgtttctggtcctcatcagtcagaaaatgagttccgaggtgagctgttaaatcagaggtggacacacggaggcaaggccagcagctgcaggacctcaagacacctgggcagacactgcaagatgagcttagaaaatgaagacaagcgagctcgcacccgatccaaggccctgcgaggacccccagagaccacagctgcagacctcagctgccccaccccaggatgcacaggctcagggcacgtccggggcaagtactccaggcaccgaagtttacagagctgccccctggccaagaagaggaagctggagggcgctgaggctgagcacctggtgtccaagaggaagtcacaccccctgaagctggctctggacgagggctatggtgtggacagcgacggcagtgaggacactgaggtgaaggacgcctctgtttcggatgaatcggaaggaactctggagggggccgaggctgagacgtcaggacaggacgagattcatcgccccgagacagctgaagatccttcaagagctgagaagcgtgagatcaagtgtccaacaccaggctgtgatggcactggccacgttaccgggttgtaccctcaccaccgcagcctttctggctgtccccacaaggataggatccccccagagatcttagccatgcatgagaacgtgctgaagtgccccactcctggctgcacaggccagggtcacgtgaacagcaaccgcaacacgcacagaagtttgtctgggtgtcccattgctgccgccgaaaaattagccaaatcccatgagaagcagcagccgcagacaggagatccttccaagagtagctccaattccgatcggatcctcaggcccatgtgcttcgtgaagcagctcgaggtccctccatatgggagctaccggcccaacgtggcccccgccacacccagggccaacttggccaaggagctggagaagttctccaaggtcacctttgactacgcaagtttcgatgctcaggtttttggcaaacgcatgcttgccccaaagattcagaccagcgaaacctcacctaaagcctttcaatgctttgactactcgcaggacgccgaggctgcacacatggctgccactgccatcctgaacctctccacgcgctgctgggagatgcctgagaacctcagcacgaagccacaggacctccccagcaagtctgtggatatcgaggtagacgaaaatggaaccctggacttgagcatgcacaaacaccgcaaacgagaaaatgctttccccagcagcagcagctgcagcagcagccccggtgtgaagtctcccgacgcctcccagcgccacagcagcaccagcgcccccagcagctccatgacctctccccagtccagccaggcctcccgccaggacgagtgggaccggcccctggactacaccaagcctagccgcctgagagaggaggaacctgaggagtcagagccagcagcccattcttttgcttcttctgaagcagatgaccaggaagtgtcggaagagaattttgaggagcggaagtatccgggggaagtcaccctgaccaactttaagctgaagtttctctccaaggacataaagaaggagctgctcacctgtcccacccctggctgtgacggcagcggccacatcaccgggaactacgcctcccaccgcaggtgccccacgcccggctgtgacggctctggccacatcacagggaactacgcttcacaccggagcttgtccggctgccctcgtgcaaagaaaagtggagtcaaggtggcacccaccaaggacgacaaggaggaccccgagctgatgaagtacgttgggccatgctggctctttcattgcattgcggaattgagattttcgtgtgttttataatgtaaaaaaactcctactagattcccttttcattaatacaacgggtcacctaactgaccaacgccaa

SEQ ID NO: 156444 - DNA, 5614 bp, Homo sapiens
  Payload ID: 10673
  Gene Symbol: MYT1
  Gene Name: myelin transcription factor 1
  Uniprot ID: Q01538
  ENST ID: ENST00000536311
  CDS Start-End: 365-3811
ctccgccagcccgtgccaccgctgctaatgagagcagtcattaagtaaatgagacgtcgcctttagctggcttaggagttcgcacactaaggggagaagatatttaattgaaacccgcacgcaggcttccccacatgtgaccgctgtacgggaggcagctgccttccctctcctcccccagtccaccctgcaccccccatgtaaatttcatgattgctttccgtgatgtcattttgaaagaggacagacaatagctgtggggaaagaaaatgagttccgaggtgagctgttaaatcagaggtggacacacggaggcaaggccagcagctgcaggacctcaagacacctgggcagacactgcaagatgagcttagaaaatgaagacaagcgagctcgcacccgatccaaggccctgcgaggacccccagagaccacagctgcagacctcagctgccccaccccaggatgcacaggctcagggcacgtccggggcaagtactccaggcaccgaagtttacagagctgccccctggccaagaagaggaagctggagggcgctgaggctgagcacctggtgtccaagaggaagtcacaccccctgaagctggctctggacgagggctatggtgtggacagcgacggcagtgaggacactgaggtgaaggacgcctctgtttcggatgaatcggaaggaactctggagggggccgaggctgagacgtcaggacaggacgagattcatcgccccgagacagctgaaggaaggagccccgtcaagtcccattttggatccaaccccatcggcagcgccactgcctcctccaagggcagctacagcagctaccagggaatcatcgcaacttctctcctgaacttgggtcaaattgctgaagagaccctggtggaagaggacttgggccaggcggccaagccaggtcctggcattgtgcacctgcttcaggaggctgcagagggagctgccagcgaggagggtgaaaagggcctcttcatccagccagaggatgccgaggaggtcgtcgaagtcaccaccgagcgctcccaggacctgtgtccccagtccctggaggatgcagccagtgaggagtccagcaagcagaaaggcatcctgagtcacgaagaggaggacgaggaggaggaggaggaggaagaggaggaggaggaggatgaagaagaggaagaggaagaggaggaggaagaggaagaggaggaggaggaagaggaagaggaggaggaagaggaagaggaagaggaggaggaggaggcagctcctgatgtgatctttcaggaagacacctctcacacctctgcccagaaggcccctgagctccggggcccagaatcacccagtcccaagcctgagtactctgttattgtggaggtccgctcggatgatgacaaggacgaggacacccactcccggaagtcaacagtcactgacgagtcggagatgcaggacatgatgacccggggaaacctgggcctcctggagcaggccatcgccctgaaggctgaacaggtgcgcacagtctgcgagccgggctgcccgcctgccgagcagagccagctgggcctgggagagccagggaaggcagcaaagcccctggacactgtgcggaagagttactacagtaaagatccttcaagagctgagaagcgtgagatcaagtgtccaacaccaggctgtgatggcactggccacgttaccgggttgtaccctcaccaccgcagcctttctggctgtccccacaaggataggatccccccagagatcttagccatgcatgagaacgtgctgaagtgccccactcctggctgcacaggccagggtcacgtgaacagcaaccgcaacacgcacagaagtttgtctgggtgtcccattgctgccgccgaaaaattagccaaatcccatgagaagcagcagccgcagacaggagatccttccaagagtagctccaattccgatcggatcctcaggcccatgtgcttcgtgaagcagctcgaggtccctccatatgggagctaccggcccaacgtggcccccgccacacccagggccaacttggccaaggagctggagaagttctccaaggtcacctttgactacgcaagtttcgatgctcaggtttttggcaaacgcatgcttgccccaaagattcagaccagcgaaacctcacctaaagcctttcaatccaaacctttcccaaaggcctcttcccccaggcacagcccctccagtagttatgtgaggagcacttcatcctcttctgcaggctttgactactcgcaggacgccgaggctgcacacatggctgccactgccatcctgaacctctccacgcgctgctgggagatgcctgagaacctcagcacgaagccacaggacctccccagcaagtctgtggatatcgaggtagacgaaaatggaaccctggacttgagcatgcacaaacaccgcaaacgagaaaatgctttccccagcagcagcagctgcagcagcagccccggtgtgaagtctcccgacgcctcccagcgccacagcagcaccagcgcccccagcagctccatgacctctccccagtccagccaggcctcccgccaggacgagtgggaccggcccctggactacaccaagcctagccgcctgagagaggaggaacctgaggagtcagagccagcagcccattcttttgcttcttctgaagcagatgaccaggaagtgtcggaagagaattttgaggagcggaagtatccgggggaagtcaccctgaccaactttaagctgaagtttctctccaaggacataaagaaggagctgctcacctgtcccacccctggctgtgacggcagcggccacatcaccgggaactacgcctcccaccgcagcctctctggttgccctcttgctgacaagagcctcagaaacctcatggctgcccactctgctgacctcaagtgccccacgcccggctgtgacggctctggccacatcacagggaactacgcttcacaccggagcttgtccggctgccctcgtgcaaagaaaagtggagtcaaggtggcacccaccaaggacgacaaggaggaccccgagctgatgaagtgcccagttccaggctgtgtggggctcggtcacatcagcgggaaatacgcctctcacaggagcgcatccggctgcccactggccgcccgcaggcagaaggaagggtccctcaatggctcgtcattctcctggaagtccctgaagaatgaaggaccgacctgccccaccccgggctgtgacggctctggccacgccaatgggagtttcctcacccaccggagtttgtcaggctgtcccagagcaacctttgctggaaagaagggaaaactgtcaggggatgaggtcctcagtccaaagttcaagactagcgacgtgttggagaatgatgaggagatcaagcagctgaaccaggagatccgagacctgaacgagtccaactcggagatggaggctgccatggtgcagctgcagtcccagatctcctccatggagaagaacctgaagaacatcgaggaggagaacaagctcattgaggagcagaatgaagccctgtttctggagctgtccggcctgagccaggccctcatccaaagtctcgccaatatccgccttccgcacatggagccaatatgcgaacagaatttcgatgcctatgtgagcaccctcaccgacatgtactccaaccaggacccggagaacaaggacctcctggagagcatcaagcaggctgtgaggggcatccaggtctaggccgtgtggtacccagaagtgtcccagcccaccacaccgtttacctccctcgccctgccccgcaccgtggggatgcccaactcacagtgacttcccgtttggggcccggtgtggccgcgggcgggtttatccaaagggatggctggaaattggccgctcccacgaggctccctccaggcttggggccgtggtggccctatctgtgtgcataggggcactgaagaattacaaagtgatttatttttgttttctgaaagaaatctgaagagcagctcaaagtctccagtggaagctcatggacaaggttctcagggaagttttggagtttgcaaccacagtattcctttgtctgtcgaggctgggagggtagccgtgagcgtggtgggtgggtggtgtgagtggcatcttggcctggaggacacgcctggggcagcgtgtctgtgctcagtgagggccgatgaagaaagtgcgttttctgttttcatttaattcagttttgtgttaagggtggaacaaagctctgttctagagggaaagttaggaataggcctcccagaggatactccagacagttgacaagcatcgcagcccctgtcaggtcaaggaattttaacctgggagactcctgaaaatcagcctaatgtctgggggcagctggcgctgaggctgtgcagatgtgtatggccttgggtcacagctccctactggggctgcagcctttagaccctgggtctgggatccacgtctagggaccactctggcttctgtgcatccacccaggcccccgacccatcactgccacattctccgggtcatggccgagcttgacctctgcatccatggtgacggaggtggcaatgacatcatcaaggtcagagggtaaattcctaacaggagaccacaaaggtttcacttcttttagatccatccaatatgcgaaaaaagggtacattttaatttaatgtgttaaaaacacaatgtccctaccgtgtaaatagaatccaagtcaattgtgactgcaattccaagttagtatttaaaaatagagaaattgcacttcctggaaaaaattaaaaagtagttagtttaattattctgtaaattatttaattttgtcaagatgtaagtatttatattcacagcctcttatgttaacgtttgctatttatttaacatttttatttattaattttatactatttcaactagaccccacaccagggcaccctaagaggggaaaaaagtgaattcaaagcaaaaataactatttgactataatataggccacaaaaaatcttgatataactcctagttataattttgatgcaaccaagttattttttatatattttgttatttattcttttaataatggaatttttttaaaaagtattttgtaactgaggaattttgataatttggggattttgttttcccttggtctaatggagagaaagacattttggttttctttttccattttgggttccttttgtttcaggcacggataacagcaaatggaattctgtatttattattatttaagtgtagcgcagatgtgtgtgcttgggcgtgtttctcgtgtcgcgtttgcgtgtcggctcttgcggtggagtcctgttgctgtgagggagtgctggccgcaggcagcctcgagtcaccgccaggctcacaggctgtgccacccgtccctccgacagctccaatactgtgaccctccttcctcaggaagcgcgttgaacccacagcactccgtggtgtgtttgcagggtgatttcctaataaaagtccactctgactgtg

SEQ ID NO: 156445 - DNA, 5535 bp, Homo sapiens; identical to SEQ ID NO: 156442
  Payload ID: 10673
  Gene Symbol: MYT1
  Gene Name: myelin transcription factor 1
  Uniprot ID: Q01538
  ENST ID: ENST00000613234
  CDS Start-End: 365-3730

SEQ ID NO: 156446 - DNA, 2140 bp, Homo sapiens
  Payload ID: 10673
  Gene Symbol: MYT1
  Gene Name: myelin transcription factor 1
  ENST ID: ENST00000621996
  CDS Start-End: 365-2140
ctccgccagcccgtgccaccgctgctaatgagagcagtcattaagtaaatgagacgtcgcctttagctggcttaggagttcgcacactaaggggagaagatatttaattgaaacccgcacgcaggcttccccacatgtgaccgctgtacgggaggcagctgccttccctctcctcccccagtccaccctgcaccccccatgtaaatttcatgattgctttccgtgatgtcattttgaaagaggacagacaatagctgtggggaaagaaaatgagttccgaggtgagctgttaaatcagaggtggacacacggaggcaaggccagcagctgcaggacctcaagacacctgggcagacactgcaagatgagcttagaaaatgaagacaagcgagctcgcacccgatccaaggccctgcgaggacccccagagaccacagctgcagacctcagctgccccaccccaggatgcacaggctcagggcacgtccggggcaagtactccaggcaccgaagtttacagagctgccccctggccaagaagaggaagctggagggcgctgaggctgagcacctggtgtccaagaggaagtcacaccccctgaagctggctctggacgagggctatggtgtggacagcgacggcagtgaggacactgaggtgaaggacgcctctgtttcggatgaatcggaaggaactctggagggggccgaggctgagacgtcaggacaggacgagattcatcgccccgagacagctgaagatccttcaagagctgagaagcgtgagatcaagtgtccaacaccaggctgtgatggcactggccacgttaccgggttgtaccctcaccaccgcagcctttctggctgtccccacaaggataggatccccccagagatcttagccatgcatgagaacgtgctgaagtgccccactcctggctgcacaggccagggtcacgtgaacagcaaccgcaacacgcacagaagtttgtctgggtgtcccattgctgccgccgaaaaattagccaaatcccatgagaagcagcagccgcagacaggagatccttccaagagtagctccaattccgatcggatcctcaggcccatgtgcttcgtgaagcagctcgaggtccctccatatgggagctaccggcccaacgtggcccccgccacacccagggccaacttggccaaggagctggagaagttctccaaggtcacctttgactacgcaagtttcgatgctcaggtttttggcaaacgcatgcttgccccaaagattcagaccagcgaaacctcacctaaagcctttcaatgctttgactactcgcaggacgccgaggctgcacacatggctgccactgccatcctgaacctctccacgcgctgctgggagatgcctgagaacctcagcacgaagccacaggacctccccagcaagtctgtggatatcgaggtagacgaaaatggaaccctggacttgagcatgcacaaacaccgcaaacgagaaaatgctttccccagcagcagcagctgcagcagcagccccggtgtgaagtctcccgacgcctcccagcgccacagcagcaccagcgcccccagcagctccatgacctctccccagtccagccaggcctcccgccaggacgagtgggaccggcccctggactacaccaagcctagccgcctgagagaggaggaacctgaggagtcagagccagcagcccattcttttgcttcttctgaagcagatgaccaggaagtgtcggaagagaattttgaggagcggaagtatccgggggaagtcaccctgaccaactttaagctgaagtttctctccaaggacataaagaaggagctgctcacctgtcccacccctggctgtgacggcagcggccacatcaccgggaactacgcctcccaccgcaggtgccccacgcccggctgtgacggctctggccacatcacagggaactacgcttcacaccggagcttgtccggctgccctcgtgcaaagaaaagtggagtcaaggtggcacccaccaaggacgacaaggaggaccccgagctgatgaagtacgttgggccatgctggctctttcattgcattgcggaattgagattttcgtgtgttttataa

SEQ ID NO: 156447 - DNA, 2140 bp, Homo sapiens; identical to SEQ ID NO: 156446
  Payload ID: 10673
  Gene Symbol: MYT1
  Gene Name: myelin transcription factor 1
  ENST ID: ENST00000622439
  CDS Start-End: 365-2140

SEQ ID NO: 156448 - DNA, 2061 bp, Homo sapiens; identical to SEQ ID NO: 156443
  Payload ID: 10673
  Gene Symbol: MYT1
  Gene Name: myelin transcription factor 1
  ENST ID: ENST00000616597
  CDS Start-End: 219-1994

SEQ ID NO: 156449 - DNA, 5614 bp, Homo sapiens; identical to SEQ ID NO: 156444
  Payload ID: 10673
  Gene Symbol: MYT1
  Gene Name: myelin transcription factor 1
  Uniprot ID: Q01538
  ENST ID: ENST00000616648
  CDS Start-End: 365-3811

SEQ ID NO: 156450 - DNA, 670 bp, Homo sapiens
  Payload ID: 10674
  Gene Symbol: MYT1L
  Gene Name: myelin transcription factor 1-like
  ENST ID: ENST00000399157
  CDS Start-End: 1-609
gaagatcaagaacccatcaggtgtccggtccccgggtgcgacggccagggccacatcactgggaagtacgcgtcccatcgcagcgcctccgggtgccccttggcggccaagaggcagaaagacgggtacctgaatggctcccagttctcctggaagtcggtcaagacggaaggcatgtcctgccccacgccaggatgcgacggctcaggccacgtcagcggcagcttcctcacacaccgcagcttgtcaggatgcccgagagccacgtcagcgatgaagaaggcaaagctttctggagagcagatgctgaccatcaaacagcgggccagcaacggtatagaaaatgatgaagaaatcaaacagttagatgaagaaatcaaggagctaaatgaatccaattcccagatggaagccgatatgattaaactcagaactcagattaccacgatggagagcaacctgaagaccatcgaagaggagaacaaagtgattgagcagcagaacgagtctctcctccacgagctggcgaacctgagccagtctctgatccacagcctggctaacatccagctgccgcacatggaggatggtgtatggtgggggcaataaatgaggttttttgcattccaaggaaatggcatatggattaactgtaagaaatgaaataagt

SEQ ID NO: 156451 - DNA, 7063 bp, Homo sapiens
  Payload ID: 10674
  Gene Symbol: MYT1L
  Gene Name: myelin transcription factor 1-like
  Uniprot ID: Q9UL68
  ENST ID: ENST00000399161
  CDS Start-End: 749-4309
ggtgggtgcattttaattttttcattccctggactatgggttatgatatccatactcactgaagacaaaaagccaccttttctgcgtcttggtggcatgcatgtgtctcatcatcctttcaaacttgtggtggaacagggttttcttccctgtctgtgtattttgagccagcacagttaccaaaattgaacttgtctttcgcttgtgagcggttgtggtcattgtgagggcgggtcatgaggaggctgtagccaaggacgaggtgtgtgcggctgttgcctggacgtttgtccaatccacgttgacatttgagggatcacagcgtgtgaaaatgaactcagaggagaattggtgaattcctatccagtgggcatcttcaaaccctggtcgacggcggaagaatatcaggtcctgagatcacccacccggcgcggcaacagtgcagagtggccacatctggtggaagaagaaaaaaatgtagttattgaattcaatcaagtgtttgcatctttcaagctatcaacaaaattccatcaagaaaggttccagttggtctcacagacgtatggatatccgaggagccacctaaagatggagaaatcaaggcatagagagattaagtgactttgccacagtcacaagctggagaggaccaggagtagagcttagagcgagcccctgactctgggcctgcgtcctgccaggagtcacgctgcctccgttcctaggagagaagacttcctgtaagatggaggtggacaccgaggagaagcggcatcgcacgcggtccaaaggggttcgagttcccgtggaaccagccatacaagagctgttcagctgtcccacccctggctgtgacggcagtggtcatgtcagtggcaaatatgcaagacacagaagtgtatatggttgtcccttggcgaaaaaaagaaaaacacaagataaacagccccaggaacctgctcctaaacgaaagccatttgccgtgaaagcagacagctcctcagtggatgagtgtgacgacagtgatgggactgaggacatggatgagaaggaggaggatgagggggaggagtactccgaggacaatgatgagccaggggatgaggacgaggaggacgaggagggggaccgggaggaggaggaggagatcgaggaggaggatgaggacgatgacgaggatggagaagatgtggaggatgaagaagaggaagaggaggaggaggaggaggaggaagaggaagaagaaaacgaagaccatcaaatgaattgtcacaatactcgaataatgcaagacacagaaaaggatgataacaataatgacgaatatgacaattacgatgaactggtggccaagtcattgttaaacctcggcaaaatcgctgaggatgcagcctaccgggccaggactgagtcagaaatgaacagcaatacctccaatagtctggaagacgatagtgacaaaaacgaaaacctgggtcggaaaagtgagttgagtttagacttagacagtgatgttgttagagaaacagtggactcccttaaactattagcccaaggacacggtgttgtgctctcagaaaacatgaatgacagaaattatgcagacagcatgtcgcagcaagacagtagaaatatgaattacgtcatgttggggaagcccatgaacaacggactcatggaaaagatggtggaggagagcgatgaggaggtgtgtctgagcagtctggagtgtttgaggaatcagtgcttcgacctggccaggaagctcagtgagaccaacccgcaggagaggaatccgcagcagaacatgaacatccgtcagcatgtccggccagaagaggacttccccggaaggacgccggacagaaactactcggacatgctgaacctcatgcggctggaggagcagttgagcccccggtcgagagtgtttgccagctgtgcgaaggaggatgggtgtcatgagcgggacgacgataccacctctgtgaactcggacaggtctgaagaggtgttcgacatgaccaaggggaacctgaccctgctggagaaagccatcgctttggaaacggaaagagcaaaggccatgagggagaagatggccatggaagctgggaggagggacaatatgaggtcatatgaggaccagtctccgagacaacttcccggggaggacagaaagcctaaatccagtgacagccatgtcaaaaagccatactatggtaaagatccctcaagaacagaaaagaaagagagcaagtgtccaacccccgggtgtgatggaaccggccacgtaactgggctgtacccacatcaccgcagcctgtccggatgcccgcacaaagatagggtccctccagaaatccttgccatgcatgaaagtgtcctcaagtgccccactccgggctgcacggggcgcgggcatgtcaacagcaacaggaactcccaccgaagcctctccggatgcccgatcgctgcagcagagaaactggccaaggcacaggaaaagcaccagagctgcgacgtgtccaagtccagccaggcctcggaccgcgtgctcaggccaatgtgctttgtgaagcagctggagattcctcagtatggctacagaaacaatgtccccacaactacgccgcgttccaacctggccaaggagctcgagaaatattccaagacctcgtttgaatacaacagttacgacaaccatacttatggcaagcgagccatagctcccaaggtgcaaaccagggatatatcccccaaaggatatgatgatgcgaagcggtactgcaaggaccccagccccagcagcagcagcaccagcagctacgcgcccagcagcagcagcaacctgagctgcggcgggggcagcagcgccagcagcacgtgcagcaagagcagcttcgactacacgcacgacatggaggcggcccacatggcggccaccgccatcctcaacctgtccacgcgctgccgcgagatgccgcagaacctgagcaccaagccgcaggacctgtgcgccacgcggaaccctgacatggaggtggatgagaacgggaccctggacctcagcatgaacaagcagaggccgcgggacagctgctgccccatcctgacccctctggagcccatgtccccccagcagcaggcagtgatgaacaaccggtgtttccagctgggcgagggcgactgctgggacttgcccgtagactacaccaaaatgaaaccccggaggatagacgaggacgagtccaaagacattactccagaagacttggacccattccaggaggctctagaagaaagacggtatcccggggaggtgaccatcccaagtcccaaacccaagtaccctcagtgcaaggagagcaaaaaggacttaataactctgtctggctgccccctggcggacaaaagcattcgaagtatgctggccaccagctcccaagaactcaagtgccccacgcctggctgtgatggttctggacatatcaccggcaattatgcttctcatcggagcctttcaggttgcccaagagcaaagaaaagtggtatcaggatagcacagagcaaagaagataaagaagatcaagaacccatcaggtgtccggtccccgggtgcgacggccagggccacatcactgggaagtacgcgtcccatcgcagcgcctccgggtgccccttggcggccaagaggcagaaagacgggtacctgaatggctcccagttctcctggaagtcggtcaagacggaaggcatgtcctgccccacgccaggatgcgacggctcaggccacgtcagcggcagcttcctcacacaccgcagcttgtcaggatgcccgagagccacgtcagcgatgaagaaggcaaagctttctggagagcagatgctgaccatcaaacagcgggccagcaacggtatagaaaatgatgaagaaatcaaacagttagatgaagaaatcaaggagctaaatgaatccaattcccagatggaagccgatatgattaaactcagaactcagattaccacgatggagagcaacctgaagaccatcgaagaggagaacaaagtgattgagcagcagaacgagtctctcctccacgagctggcgaacctgagccagtctctgatccacagcctggctaacatccagctgccgcacatggatccaatcaatgaacaaaattttgatgcttacgtgactactttgacggaaatgtatacaaatcaagatcgttatcagagtccagaaaataaagccctactggaaaatataaagcaggctgtgagaggaattcaggtctgaacagctgctgtagtgatgaaactcttgcttaaaaaggatgcctcttgttttttgctgctgtaacttaccagaaagtgttctatatttatttctgtttgaatttgaaacagtgttatgcttacaagacttcataatgattttatgtcttgctttaaagatagtacctgcagaatagtttttgaatacacccacattttgtacgtttccatgtaagctgacatagtgttctgccatgtaatgtttatagctgctgatgtatgcacatttgggggtatatctatttctgaagaggtaagctgatcaaaataaatagagtgtaaattctttttaatgctttagtgattaaatgttttagtattttgaactgaaatggacacacaaacacacacacgcacacacagacccacagctttgaatgatcatgttgtggctgagcagccgctttttagacgttatcattttgcctcatgttggaggactttatggaatttaagaaatacattttgtgtgcatattgtttcatagcaagaattcgttgcaaaaatgctttatttttgaacaatgcttggaaatattatgtgacttttttgtttgtttgttttaggaggatggtgtatggtgggggcaataaatgaggttttttgcattccaaggaaatggcatatggattaactgtaagaaatgaaataagtaatttattgtaagacaacatcaagccatggaaacttggcagaagattcaaagcagcttaaacagcacttttaaattaactcctaagcgttacatggttgtgactatggaaactccagttaagacaggatcttatcagaggtggacaacgtgaagatttccttttccattttcaataaactttggaacaaccttctcgtatctcccctagagtttcgtgcccctctgaactgtctgttattgcaatgtagtttatcaacagaatttgtgtgttttcgatttaagctaaaagataatttaagaacatttatttccccttttcactttaaaaaattatgattattcctattattgttatgaaccttcttattttacatttgagggataaaggcaaatgatttgtgagtcttctagttactggaccgagttttctgctggatctggtgggaaggcagctcggtaaagtttccctcctgctccccccgcccgactttgactctgaatcagcatttggtcctattcagaggactcttaccacgacgtttctgttctacacttgggtggagaccagttgaccatagagcatttgcagagcctcattgtttgatttcttgtgactattctaagaatgaatgcaatcagattttaaaagtaactaaatatacttcagcacttttttgctttaaactagatcatcttagacttgtttataccttccagatttgattgttttactcccaatgactgcactatatgtatgcataagaccacttttgagcgctgtgttcccccttctgagtagtcctttgacgacgtgttgtgttttctgatgttgacttgagttccatttagtagcatctcttccttccatgtcttgatgttatgcaggaagtacagacgtactttaaatttttgttatgaaataaaaaaaagatgggttttgtaaaaataaaaaaaaaatatttttagcagaacaggacttacagggtcattgtccccacaatgtgccagtcgactatttgcacttaccttgtcctatatatccgtacggaggtgtgcaattcctcgtgtcagtagccttgtgacactgaacctggatggattatagaggagccctcacggctgatcaataatgttgcaaagggagactacagggatctcacgacgaatattctgatacaatactcaacctcggtatatatatatgtgtataaatatatgtatatcccagcggcactttatactgttcactgtacaaaagcttacagttttccacaaggactttaataactagctgggaaaagacgatgtaattatttcggggctctgcggaaccttctctgtacagcgccccctttctgttgtgctattggttgcagctgccatgctcagaatgcgttttgagagctgaagcaaggtgcttgcagtcacctgaggccgtccgtgtggcccagggccccagctgcctttagggcccccattgttcataacagcatatgcatttccccaccgcgttgtgtctgcagcttctttgccaatatagtaatgcttttagtagagtactagatagtatcagttttggattcttattgttatcacctatgtacaatggaaagggattttaagcacaaacctgctgctcatctaacgttggtacataatctcaaatcaaaagttatctgtgactattatatagggatcacaaaagtgtcacatattagaatgctgacctttcatatggattattgtgagtcatcagagtttattataacttattgttcatattcatttctaagttaatttaagtaatcatttattaagacagaattttgtataaactatttattgtgctctctgtggaactgaagtttgatttatttttgtactacacggcatgggtttgttgacactttaattttgctataaatgtgtggaatcacaagttgctgtgatacttcatttttaaattgtgaactttgtacaaattttgtcatgctggatgttaacacatcttactctaaataaacaaggtgttgccacatttgtagcacgaaggatctctaa

SEQ ID NO: 156452 - DNA, 3642 bp, Homo sapiens
  Payload ID: 10674
  Gene Symbol: MYT1L
  Gene Name: myelin transcription factor 1-like
  Uniprot ID: Q9UL68
  ENST ID: ENST00000407844
  CDS Start-End: 357-911
aagcgcctggaagcggaagctggacagacgaggagaggccttgggtgtgacatcaacggaacctgagggaagcaaaactcagcaaggacgcacccggtctgctggactggggctttggcctttcaggttgcccaagagcaaagaaaagtggtatcaggatagcacagagcaaagaagataaagaagatcaagaacccatcaggtgtccggtccccgggtgcgacggccagggccacatcactgggaagtacgcgtcccatcgcagcgcctccgggtgccccttggcggccaagaggcagaaagacgggtacctgaatggctcccagttctcctggaagtcggtcaagacggaaggcatgtcctgccccacgccaggatgcgacggctcaggccacgtcagcggcagcttcctcacacaccgcagcttgtcaggatgcccgagagccacgtcagcgatgaagaaggcaaagctttctggagagcagatgctgaccatcaaacagcgggccagcaacggtatagaaaatgatgaagaaatcaaacagttagatgaagaaatcaaggagctaaatgaatccaattcccagatggaagccgatatgattaaactcagaactcaggtaacaattaccacgatggagagcaacctgaagaccatcgaagaggagaacaaagtgattgagcagcagaacgagtctctcctccacgagctggcgaacctgagccagtctctgatccacagcctggctaacatccagctgccgcacatggatccaatcaatgaacaaaattttgatgcttacgtgactactttgacggaaatgtatacaaatcaagatcgttatcagagtccagaaaataaagccctactggaaaatataaagcaggctgtgagaggaattcaggtctgaacagctgctgtagtgatgaaactcttgcttaaaaaggatgcctcttgttttttgctgctgtaacttaccagaaagtgttctatatttatttctgtttgaatttgaaacagtgttatgcttacaagacttcataatgattttatgtcttgctttaaagatagtacctgcagaatagtttttgaatacacccacattttgtacgtttccatgtaagctgacatagtgttctgccatgtaatgtttatagctgctgatgtatgcacatttgggggtatatctatttctgaagaggtaagctgatcaaaataaatagagtgtaaattctttttaatgctttagtgattaaatgttttagtattttgaactgaaatggacacacaaacacacacacgcacacacagacccacagctttgaatgatcatgttgtggctgagcagccgctttttagacgttatcattttgcctcatgttggaggactttatggaatttaagaaatacattttgtgtgcatattgtttcatagcaagaattcgttgcaaaaatgctttatttttgaacaatgcttggaaatattatgtgacttttttgtttgtttgttttaggaggatggtgtatggtgggggcaataaatgaggttttttgcattccaaggaaatggcatatggattaactgtaagaaatgaaataagtaatttattgtaagacaacatcaagccatggaaacttggcagaagattcaaagcagcttaaacagcacttttaaattaactcctaagcgttacatggttgtgactatggaaactccagttaagacaggatcttatcagaggtggacaacgtgaagatttccttttccattttcaataaactttggaacaaccttctcgtatctcccctagagtttcgtgcccctctgaactgtctgttattgcaatgtagtttatcaacagaatttgtgtgttttcgatttaagctaaaagataatttaagaacatttatttccccttttcactttaaaaaattatgattattcctattattgttatgaaccttcttattttacatttgagggataaaggcaaatgatttgtgagtcttctagttactggaccgagttttctgctggatctggtgggaaggcagctcggtaaagtttccctcctgctccccccgcccgactttgactctgaatcagcatttggtcctattcagaggactcttaccacgacgtttctgttctacacttgggtggagaccagttgaccatagagcatttgcagagcctcattgtttgatttcttgtgactattctaagaatgaatgcaatcagattttaaaagtaactaaatatacttcagcacttttttgctttaaactagatcatcttagacttgtttataccttccagatttgattgttttactcccaatgactgcactatatgtatgcataagaccacttttgagcgctgtgttcccccttctgagtagtcctttgacgacgtgttgtgttttctgatgttgacttgagttccatttagtagcatctcttccttccatgtcttgatgttatgcaggaagtacagacgtactttaaatttttgttatgaaataaaaaaaagatgggttttgtaaaaataaaaaaaaaatatttttagcagaacaggacttacagggtcattgtccccacaatgtgccagtcgactatttgcacttaccttgtcctatatatccgtacggaggtgtgcaattcctcgtgtcagtagccttgtgacactgaacctggatggattatagaggagccctcacggctgatcaataatgttgcaaagggagactacagggatctcacgacgaatattctgatacaatactcaacctcggtatatatatatgtgtataaatatatgtatatcccagcggcactttatactgttcactgtacaaaagcttacagttttccacaaggactttaataactagctgggaaaagacgatgtaattatttcggggctctgcggaaccttctctgtacagcgccccctttctgttgtgctattggttgcagctgccatgctcagaatgcgttttgagagctgaagcaaggtgcttgcagtcacctgaggccgtccgtgtggcccagggccccagctgcctttagggcccccattgttcataacagcatatgcatttccccaccgcgttgtgtctgcagcttctttgccaatatagtaatgcttttagtagagtactagatagtatcagttttggattcttattgttatcacctatgtacaatggaaagggattttaagcacaaacctgctgctcatctaacgttggtacataatctcaaatcaaaagttatctgtgactattatatagggatcacaaaagtgtcacatattagaatgctgacctttcatatggattattgtgagtcatcagagtttattataacttattgttcatattcatttctaagttaatttaagtaatcatttattaagacagaattttgtataaactatttattgtgctctctgtggaactgaagtttgatttatttttgtactacacggcatgggtttgttgacactttaattttgctataaatgtgtggaatcacaagttgctgtgatacttcatttttaaattgtgaactttgtacaaattttgtcatgctggatgttaacacatcttactctaaataaacaaggtgttgccaca

SEQ ID NO: 156453 - DNA, 4850 bp, Homo sapiens
  Payload ID: 10674
  Gene Symbol: MYT1L
  Gene Name: myelin transcription factor 1-like
  Uniprot ID: Q9UL68
  ENST ID: ENST00000428368
  CDS Start-End: 671-4225
tttctgcgtcttggtggcatgcatgtgtctcatcatcctttcaaacttgtggtggaacagggttttcttccctgtctgtgtattttgagccagcacagttaccaaaattgaacttgtctttcgcttgtgagcggttgtggtcattgtgagggcgggtcatgaggaggctgtagccaaggacgaggtgtgtgcggctgttgcctggacgtttgtccaatccacgttgacatttgagggatcacagcgtgtgaaaatgaactcagaggagaattggtgaattcctatccagtgggcatcttcaaaccctggtcgacggcggaagaatatcaggtcctgagatcacccacccggcgcggcaacagtgcagagtggccacatctggtggaagaagaaaaaaatgtagttattgaattcaatcaagtgtttgcatctttcaagctatcaacaaaattccatcaagaaaggttccagttggtctcacagacgtatggatatccgaggagccacctaaagatggagaaatcaaggcatagagagattaagtgactttgccacagtcacaagctggagaggaccaggagtagagcttagagcgagcccctgactctgggcctgcgtcctgccaggagtcacgctgcctccgttcctaggagagaagacttcctgtaagatggaggtggacaccgaggagaagcggcatcgcacgcggtccaaaggggttcgagttcccgtggaaccagccatacaagagctgttcagctgtcccacccctggctgtgacggcagtggtcatgtcagtggcaaatatgcaagacacagaagtgtatatggttgtcccttggcgaaaaaaagaaaaacacaagataaacagccccaggaacctgctcctaaacgaaagccatttgccgtgaaagcagacagctcctcagtggatgagtgtgacgacagtgatgggactgaggacatggatgagaaggaggaggatgagggggaggagtactccgaggacaatgatgagccaggggatgaggacgaggaggacgaggagggggaccgggaggaggaggaggagatcgaggaggaggatgaggacgatgacgaggatggagaagatgtggaggatgaagaagaggaagaggaggaggaggaggaggaggaagaggaagaagaaaacgaagaccatcaaatgaattgtcacaatactcgaataatgcaagacacagaaaaggatgataacaataatgacgaatatgacaattacgatgaactggtggccaagtcattgttaaacctcggcaaaatcgctgaggatgcagcctaccgggccaggactgagtcagaaatgaacagcaatacctccaatagtctggaagacgatagtgacaaaaacgaaaacctgggtcggaaaagtgagttgagtttagacttagacagtgatgttgttagagaaacagtggactcccttaaactattagcccaaggacacggtgttgtgctctcagaaaacatgaatgacagaaattatgcagacagcatgtcgcagcaagacagtagaaatatgaattacgtcatgttggggaagcccatgaacaacggactcatggaaaagatggtggaggagagcgatgaggaggtgtgtctgagcagtctggagtgtttgaggaatcagtgcttcgacctggccaggaagctcagtgagaccaacccgcaggagaggaatccgcagcagaacatgaacatccgtcagcatgtccggccagaagaggacttccccggaaggacgccggacagaaactactcggacatgctgaacctcatgcggctggaggagcagttgagcccccggtcgagagtgtttgccagctgtgcgaaggaggatgggtgtcatgagcgggacgacgataccacctctgtgaactcggacaggtctgaagaggtgttcgacatgaccaaggggaacctgaccctgctggagaaagccatcgctttggaaacggaaagagcaaaggccatgagggagaagatggccatggaagctgggaggagggacaatatgaggtcatatgaggaccagtctccgagacaacttcccggggaggacagaaagcctaaatccagtgacagccatgtcaaaaagccatactatgatccctcaagaacagaaaagaaagagagcaagtgtccaacccccgggtgtgatggaaccggccacgtaactgggctgtacccacatcaccgcagcctgtccggatgcccgcacaaagatagggtccctccagaaatccttgccatgcatgaaagtgtcctcaagtgccccactccgggctgcacggggcgcgggcatgtcaacagcaacaggaactcccaccgaagcctctccggatgcccgatcgctgcagcagagaaactggccaaggcacaggaaaagcaccagagctgcgacgtgtccaagtccagccaggcctcggaccgcgtgctcaggccaatgtgctttgtgaagcagctggagattcctcagtatggctacagaaacaatgtccccacaactacgccgcgttccaacctggccaaggagctcgagaaatattccaagacctcgtttgaatacaacagttacgacaaccatacttatggcaagcgagccatagctcccaaggtgcaaaccagggatatatcccccaaaggatatgatgatgcgaagcggtactgcaaggaccccagccccagcagcagcagcaccagcagctacgcgcccagcagcagcagcaacctgagctgcggcgggggcagcagcgccagcagcacgtgcagcaagagcagcttcgactacacgcacgacatggaggcggcccacatggcggccaccgccatcctcaacctgtccacgcgctgccgcgagatgccgcagaacctgagcaccaagccgcaggacctgtgcgccacgcggaaccctgacatggaggtggatgagaacgggaccctggacctcagcatgaacaagcagaggccgcgggacagctgctgccccatcctgacccctctggagcccatgtccccccagcagcaggcagtgatgaacaaccggtgtttccagctgggcgagggcgactgctgggacttgcccgtagactacaccaaaatgaaaccccggaggatagacgaggacgagtccaaagacattactccagaagacttggacccattccaggaggctctagaagaaagacggtatcccggggaggtgaccatcccaagtcccaaacccaagtaccctcagtgcaaggagagcaaaaaggacttaataactctgtctggctgccccctggcggacaaaagcattcgaagtatgctggccaccagctcccaagaactcaagtgccccacgcctggctgtgatggttctggacatatcaccggcaattatgcttctcatcggagcctttcaggttgcccaagagcaaagaaaagtggtatcaggatagcacagagcaaagaagataaagaagatcaagaacccatcaggtgtccggtccccgggtgcgacggccagggccacatcactgggaagtacgcgtcccatcgcagcgcctccgggtgccccttggcggccaagaggcagaaagacgggtacctgaatggctcccagttctcctggaagtcggtcaagacggaaggcatgtcctgccccacgccaggatgcgacggctcaggccacgtcagcggcagcttcctcacacaccgcagcttgtcaggatgcccgagagccacgtcagcgatgaagaaggcaaagctttctggagagcagatgctgaccatcaaacagcgggccagcaacggtatagaaaatgatgaagaaatcaaacagttagatgaagaaatcaaggagctaaatgaatccaattcccagatggaagccgatatgattaaactcagaactcagattaccacgatggagagcaacctgaagaccatcgaagaggagaacaaagtgattgagcagcagaacgagtctctcctccacgagctggcgaacctgagccagtctctgatccacagcctggctaacatccagctgccgcacatggatccaatcaatgaacaaaattttgatgcttacgtgactactttgacggaaatgtatacaaatcaagatcgttatcagagtccagaaaataaagccctactggaaaatataaagcaggctgtgagaggaattcaggtctgaacagctgctgtagtgatgaaactcttgcttaaaaaggatgcctcttgttttttgctgctgtaacttaccagaaagtgttctatatttatttctgtttgaatttgaaacagtgttatgcttacaagacttcataatgattttatgtcttgctttaaagatagtacctgcagaatagtttttgaatacacccacattttgtacgtttccatgtaagctgacatagtgttctgccatgtaatgtttatagctgctgatgtatgcacatttgggggtatatctatttctgaagaggtaagctgatcaaaataaatagagtgtaaattctttttaatgctttagtgattaaatgttttagtattttgaactgaaatggacacacaaacacacacacgcacacacagacccacagctttgaatgatcatgttgtggctgagcagccgctttttagacgttatcattttgcctcatgttggaggactttatggaatttaagaaatacattttgtgtgcatattgtttcatagcaagaattcgttgcaaaaatgctttatttttgaacaatgcttggaaatattatgtgacttttttgtttgtttgttttaggaggatggtgtatggtggggg

SEQ ID NO: 156454 - DNA, 1848 bp, Homo sapiens
  Payload ID: 10674
  Gene Symbol: MYT1L
  Gene Name: myelin transcription factor 1-like
  ENST ID: ENST00000602387
  CDS Start-End: 1-1032
caggagaggaatccgcagcagaacatgaacatccgtcagcatgtccggccagaagaggacttccccggaaggacgccggacagaaactactcggacatgctgaacctcatgcggctggaggagcagttgagcccccggtcgagagtgtttgccagctgtgcgaaggaggatgggtgtcatgagcgggacgacgataccacctctgtgaactcggacaggtctgaagaggtgttcgacatgaccaaggggaacctgaccctgctggagaaagccatcgctttggaaacggaaagagcaaaggccatgagggagaagatggccatggaagctgggaggagggacaatatgaggtcatatgaggaccagtctccgagacaacttcccggggaggacagaaagcctaaatccagtgacagccatgtcaaaaagccatactatggtaaagatccctcaagaacagaaaagaaagagagcaagtgtccaacccccgggtgtgatggaaccggccacgtaactgggctgtacccacatcaccgcagcctgtccggatgcccgcacaaagatagggtccctccagaaatccttgccatgcatgaaagtgtcctcaagtgccccactccgggctgcacggggcgcgggcatgtcaacagcaacaggaactcccaccgaagcctctccggatgcccgatcgctgcagcagagaaactggccaaggcacaggaaaagcaccagagctgcgacgtgtccaagtccagccaggcctcggaccgcgtgctcaggccaatgtgctttgtgaagcagctggagattcctcagtatggctacagaaacaatgtccccacaactacgccgcgttccaacctggccaaggagctcgagaaatattccaagacctcgtttgaatacaacagttacgacaaccatacttatggcaagcgagccatagctcccaagcgaagcggtactgcaaggaccccagccccagcagcagcagcaccagcagctacgcgcccagcagcagcagcaacctgagctgcggcgggggcagcagcgccagcagcacgtgcagcaagagcagcttcgactacacgcacgacatggaggcggcccacatggcggccaccgccatcctcaacctgtccacgcgctgccgcgagatgccgcagaacctgagcaccaagccgcaggacctgtgcgccacgcggaaccctgacatggaggtggatgagaacgggaccctggacctcagcatgaacaagcagaggccgcgggacagctgctgccccatcctgacccctctggagcccatgtccccccagcagcaggcagtgatgaacaaccggtgtttccagctgggcgagggcgactgctgggacttgcccgtagactacaccaaaatgaaaccccggaggatagacgaggacgagtccaaagacattactccagaagacttggacccattccaggaggctctagaagaaagacggtatcccggggaggtgaccatcccaagtcccaaacccaagtaccctcagtgcaaggagagcaaaaaggacttaataactctgtctggctgccccctggcggacaaaagcattcgaagtatgctggccaccagctcccaagaactcaagacattcttgatcatggacaaaacaaattttccagataaactctcgctcttggatcctctaagctcttaaacttcctgagataacactttgcctggtcttacccaaagcagcaaacatgggacgttttgaaaagaaaatccatcacttcattgtctaattatgtataatatgtaaactgaaactggattaaaatttaacgtgcacctgaatctta

SEQ ID NO: 156455 - DNA, 3388 bp, Homo sapiens
  Payload ID: 10675
  Gene Symbol: MOBP
  Gene Name: myelin-associated oligodendrocyte basic protein
  Uniprot ID: Q13875
  ENST ID: ENST00000311042
  CDS Start-End: 150-770
aaaccctcagggacctggtatagacgcagaatctgtttcacacaacaactgctatttgaaggaaaaaaaaaaaaagaagcaaatgataccaagacaagctcataacagagatccaatcagcagatgtgtacggatgaaaatacagtgagatgagtcagaaaccggccaaggagggtcccagactctccaaaaaccagaagtactccgaacacttcagcatacactgctgcccgccgttcaccttcctcaattccaagaaggagatagtggatcggaaatacagcatctgtaagagcggctgcttctaccagaagaaagaggaggactggatctgctgcgcctgccagaagaccagctcctgccagcgtcgcttaagcagcagaggagagccctggctcccgcctccagcttcttttggccctctcagaaccagccgccgtgccaagtcccctcagaggcccaagcaacagccagctgcgccccccgcggtggtcagagcgccagccaagccacggtcccctccgaggtctgagcgtcagccacggtcccctccgaggtctgagcgtcagccacggtcccctccgaggtctgagcgtcagccacggtcccctccgaggtctgagcgtcagccacgtccccgcccagaggtccgaccaccgccagccaagcagcgtccccctcagaagtccaagcaacagccgcgcagcagccccctcagagggccaggcgccagccgtggggggtcccccgtcaaagcttctaggttctgattgaaaaggaagatcaggccaaccccaaagaagaagtgaccaaggaggagtttaaactgaatgaacaacctcggctcctggactcattgcttcacaacccatctacccctggatgaagttatctggcttcaaatattatgcaggggcaaacacctgctgatgtggcaactgctgatgctcatggtccccatggcatgggggcctcagggcagcctgcctggaggtgagcagggctatctctgtgtgttgtactccagtcagggggttccagcagcacccgcaggctctagagctcaatgcacagttctttttgtttcacctgcagtcctttcttctccaggatatgcacaggcctccagggtctttcatggctcagggtcagggtggctcaagtgccaacccacatgttgtcctccaaatattcccttctatccctggcatgctgttgctgagctcaacttttaatttttgactttctcctttgtaattaatctctatctgggtttctctctttctctgtgccatttggtttccttaattagttccctgtgccagcccatagtcagagccataattggctctggggaagatccaagttattttctgagtaagatattaggcttccatatgatccagagatgcaaagaaatccctagagagtgtaggagttgtctaaatccatgtgtcagatgtagccaacgaattatgtcagaagcagagagaaaaggcctgaaaagcagctctctcccactcctcaggcccttgtctccaaccttacatgaggctttttgaacatctcctcctggcccagctggggtgagagcaagtcctcgaaggcactgcctttgagccttgctcagcccatctgaactatcccaactctagaattgactgctttcgaattgtgtgaccttgggaatgttatctggcttcaaccacaatgccctacccccagctcctctcccaaatgatcctagatacagggctgcttccccccgaccctaccccacctcgggacacaggctcatggcctcatggcacttcaccaccagaagtggtgctcagagttcctatttccacatctaaccccctaattcctgggaaagtctgaggcctggtccccccagtgctttccctggctggcctctccacattttcatctgatggtggagtgagatcaggaaaaataggacaggagctttgccttgggggagaagagagttaagtgtggaaaggggtgagttataggaggttaagcagtccaagatttctctctctgtgtaggaggccatttcctgatgtgaggggtctgaacccaattatgatgggacagggttgggcattgacttcccatctcttctctctgtttttctcccactatctgtagcccaaaactcttatggaggactttgatctttagtataggctattggtcagggccataggaactaaccccgatcctcactccaccaggatctaccacatcccctacacacaaacacatgctgtggggagggagttttcccctgggtcaagttgaggatccttagatcaccttgtgctcctgtggactggtgtgtgcgtgtgtgtgtgtgtgtgtgtgtgtgtgtgtgtgtgtgtgtgtgtgtgtgtatgttgggaaacttagctttcagagaatgtctatgggctctcattttctctctcacacaaaaatactcgggacttctccaagtccctgaggagcctgaccactgaagctgatcatgagatgactgtatgctgacacacccccttcaggggcctggccttgacttagggctgcactgtatcctcagcaacggccttgcaggagccccttttggactgctttccctattcagcccagagttggggtggtgggagaagaggggttggagtgaatccatctctattcaaattccagctgggattactctaggagtcttcctggcttgttttgggcccaaacttagctacattgtttattggctcccaaagtcgggattgaagagtgaaaagatgcaggcaatgaatccttctgcacactcctccccaacctttccagcgcttttctacttaggaggccagtggaagggaggagaggccatgccctagcccacaggggacaaggttcattgttcttccaggcttggttcactctgcttttgattcagaagctctttccctacccagcaagactacactttcttgccttctttctattttttctttttgtgcgtataaatggtatgttgtgatatattctcagtgcttgtgcccaccttggaactctgttcttgctcttcattccgcatgtgatactctggtccaagatcttggccaggtgccttctgctcaaatatcgtctcagaggtgcttcccttgaaaactcggtgctgtttccatagttactctatttgatcactctaagtttggttgtcttcatagcacttgtcaccctctggaactattctattcatttatttacttgtttaatgcttggctcttttcccctcctaacgtaaactccatgattgccaacacctgtttacttactacagttccccctccccccacattcctgacactagtaagaaccaataaacacttgttgacgg

SEQ ID NO: 156456 - DNA, 3051 bp, Homo sapiens
  Payload ID: 10675
  Gene Symbol: MOBP
  Gene Name: myelin-associated oligodendrocyte basic protein
  Uniprot ID: Q13875
  ENST ID: ENST00000383754
  CDS Start-End: 225-470
aaaaacaccttgtgtaatgaaaaacccagatctataacctctccctatatattctgcatgcattgaagtaggctcaaaccctcagggacctggtatagacgcagaatctgtttcacacaacaactgctatttgaaggaaaaaaaaaaaaagaagcaaatgataccaagacaagctcataacagagatccaatcagcagatgtgtacggatgaaaatacagtgagatgagtcagaaaccggccaaggagggtcccagactctccaaaaaccagaagtactccgaacacttcagcatacactgctgcccgccgttcaccttcctcaattccaagaaggagatagtggatcggaaatacagcatctgtaagagcggctgcttctaccagaagaaagaggaggactggatctgctgcgcctgccagaagaccagattgaaaaggaagatcaggccaaccccaaagaagaagtgaccaaggaggagtttaaactgaatgaacaacctcggctcctggactcattgcttcacaacccatctacccctggatgaagttatctggcttcaaatattatgcaggggcaaacacctgctgatgtggcaactgctgatgctcatggtccccatggcatgggggcctcagggcagcctgcctggaggtgagcagggctatctctgtgtgttgtactccagtcagggggttccagcagcacccgcaggctctagagctcaatgcacagttctttttgtttcacctgcagtcctttcttctccaggatatgcacaggcctccagggtctttcatggctcagggtcagggtggctcaagtgccaacccacatgttgtcctccaaatattcccttctatccctggcatgctgttgctgagctcaacttttaatttttgactttctcctttgtaattaatctctatctgggtttctctctttctctgtgccatttggtttccttaattagttccctgtgccagcccatagtcagagccataattggctctggggaagatccaagttattttctgagtaagatattaggcttccatatgatccagagatgcaaagaaatccctagagagtgtaggagttgtctaaatccatgtgtcagatgtagccaacgaattatgtcagaagcagagagaaaaggcctgaaaagcagctctctcccactcctcaggcccttgtctccaaccttacatgaggctttttgaacatctcctcctggcccagctggggtgagagcaagtcctcgaaggcactgcctttgagccttgctcagcccatctgaactatcccaactctagaattgactgctttcgaattgtgtgaccttgggaatgttatctggcttcaaccacaatgccctacccccagctcctctcccaaatgatcctagatacagggctgcttccccccgaccctaccccacctcgggacacaggctcatggcctcatggcacttcaccaccagaagtggtgctcagagttcctatttccacatctaaccccctaattcctgggaaagtctgaggcctggtccccccagtgctttccctggctggcctctccacattttcatctgatggtggagtgagatcaggaaaaataggacaggagctttgccttgggggagaagagagttaagtgtggaaaggggtgagttataggaggttaagcagtccaagatttctctctctgtgtaggaggccatttcctgatgtgaggggtctgaacccaattatgatgggacagggttgggcattgacttcccatctcttctctctgtttttctcccactatctgtagcccaaaactcttatggaggactttgatctttagtataggctattggtcagggccataggaactaaccccgatcctcactccaccaggatctaccacatcccctacacacaaacacatgctgtggggagggagttttcccctgggtcaagttgaggatccttagatcaccttgtgctcctgtggactggtgtgtgcgtgtgtgtgtgtgtgtgtgtgtgtgtgtgtgtgtgtgtgtgtgtgtgtgtatgttgggaaacttagctttcagagaatgtctatgggctctcattttctctctcacacaaaaatactcgggacttctccaagtccctgaggagcctgaccactgaagctgatcatgagatgactgtatgctgacacacccccttcaggggcctggccttgacttagggctgcactgtatcctcagcaacggccttgcaggagccccttttggactgctttccctattcagcccagagttggggtggtgggagaagaggggttggagtgaatccatctctattcaaattccagctgggattactctaggagtcttcctggcttgttttgggcccaaacttagctacattgtttattggctcccaaagtcgggattgaagagtgaaaagatgcaggcaatgaatccttctgcacactcctccccaacctttccagcgcttttctacttaggaggccagtggaagggaggagaggccatgccctagcccacaggggacaaggttcattgttcttccaggcttggttcactctgcttttgattcagaagctctttccctacccagcaagactacactttcttgccttctttctattttttctttttgtgcgtataaatggtatgttgtgatatattctcagtgcttgtgcccaccttggaactctgttcttgctcttcattccgcatgtgatactctggtccaagatcttggccaggtgccttctgctcaaatatcgtctcagaggtgcttcccttgaaaactcggtgctgtttccatagttactctatttgatcactctaagtttggttgtcttcatagcacttgtcaccctctggaactattctattcatttatttacttgtttaatgcttggctcttttcccctcctaacgtaaactccatgattgccaacacctgtttacttactacagttccccctccccccacattcctgacactagtaagaaccaataaacacttgttgacggaa

SEQ ID NO: 156457 - DNA, 577 bp, Homo sapiens
  Payload ID: 10675
  Gene Symbol: MOBP
  Gene Name: myelin-associated oligodendrocyte basic protein
  Uniprot ID: Q13875
  ENST ID: ENST00000415443
  CDS Start-End: 207-452
aaaaacaccttgtgtaatgaaaaacccagatctataacctctccctatatattctgcatgcattgaagtaggctcaaaccctcagggacctggtatagacgcagaatctgtttcacacaacaactgctatttgaagcttgaaggcaggtccacgcctcctcctggaagccttcccttgactgactcctcgctgagttcacagtgagatgagtcagaaaccggccaaggagggtcccagactctccaaaaaccagaagtactccgaacacttcagcatacactgctgcccgccgttcaccttcctcaattccaagaaggagatagtggatcggaaatacagcatctgtaagagcggctgcttctaccagaagaaagaggaggactggatctgctgcgcctgccagaagaccagattgaaaaggaagatcaggccaaccccaaagaagaagtgaccaaggaggagtttaaactgaatgaacaacctcggctcctggactcattgcttcacaacccatctacccctggatgaagttatctggcttcaaatattatgcaggggcaaacacctgctgatgtg

SEQ ID NO: 156458 - DNA, 830 bp, Homo sapiens
  Payload ID: 10675
  Gene Symbol: MOBP
  Gene Name: myelin-associated oligodendrocyte basic protein
  Uniprot ID: Q13875
  ENST ID: ENST00000441980
  CDS Start-End: 132-683
aaaccctcagggacctggtatagacgcagaatctgtttcacacaacaactgctatttgaagcttgaaggcaggtccacgcctcctcctggaagccttcccttgactgactcctcgctgagttcacagtgagatgagtcagaaaccggccaaggagggtcccagactctccaaaaaccagaagtactccgaacacttcagcatacactgctgcccgccgttcaccttcctcaattccaagaaggagatagtggatcggaaatacagcatctgtaagagcggctgcttctaccagaagaaagaggaggactggatctgctgcgcctgccagaagaccagaaccagccgccgtgccaagtcccctcagaggcccaagcaacagccagctgcgccccccgcggtggtcagagcgccagccaagccacggtcccctccgaggtctgagcgtcagccacggtcccctccgaggtctgagcgtcagccacggtcccctccgaggtctgagcgtcagccacggtcccctccgaggtctgagcgtcagccacgtccccgcccagaggtccgaccaccgccagccaagcagcgtccccctcagaagtccaagcaacagccgcgcagcagccccctcagagggccaggcgccagccgtggggggtcccccgtcaaagcttctaggttctggtaacaccatctcttcccttttgttccccagccctaaggttagtagttgcttcctgtgtttactaacaccgggctgtctccatggccctcttcagccttattacccaacctgtgtaatcagctccctccattaaatcccctctgtttgaaa

SEQ ID NO: 156459 - DNA, 1340 bp, Homo sapiens
  Payload ID: 10675
  Gene Symbol: MOBP
  Gene Name: myelin-associated oligodendrocyte basic protein
  Uniprot ID: Q13875
  ENST ID: ENST00000424090
  CDS Start-End: 8-559
cagtgagatgagtcagaaaccggccaaggagggtcccagactctccaaaaaccagaagtactccgaacacttcagcatacactgctgcccgccgttcaccttcctcaattccaagaaggagatagtggatcggaaatacagcatctgtaagagcggctgcttctaccagaagaaagaggaggactggatctgctgcgcctgccagaagaccagaaccagccgccgtgccaagtcccctcagaggcccaagcaacagccagctgcgccccccgcggtggtcagagcgccagccaagccacggtcccctccgaggtctgagcgtcagccacggtcccctccgaggtctgagcgtcagccacggtcccctccgaggtctgagcgtcagccacggtcccctccgaggtctgagcgtcagccacgtccccgcccagaggtccgaccaccgccagccaagcagcgtccccctcagaagtccaagcaacagccgcgcagcagccccctcagagggccaggcgccagccgtggggggtcccccgtcaaagcttctaggttctggtaacaccatctcttcccttttgttccccagccctaagattgaaaaggaagatcaggccaaccccaaagaagaagtgaccaaggaggagtttaaactgaatgaacaacctcggctcctggactcattgcttcacaacccatctacccctggatgaagttatctggcttcaaatattatgcaggggcaaacacctgctgatgtggcaactgctgatgctcatggtccccatggcatgggggcctcagggcagcctgcctggagtactttgaagatgtcatcccattgtcttctgacctctataattgccactgagagatctgctgtcagtctgcttatccttccacggactcaagtttcttcaatctgaagatacatgtctttctccagggacatgtggaaaaaaaaaagatgttatacaaccatcaaagtggcaaaaataaaaaaaatcaagtattggcaaagatgtggggaaaattctcataagctactgatgagaatttataaattattatgacacctttgggttgcaatctggggatactggcaaagcagaaaattgtacaacctgtgatcaagcaataataattttaggcacccatcctagagaaaacttgaattcatagaaaaagtaggtacacgtaaatctgttcaaggaatcattgtttggcattgaaaataggagagagatcatgagaaattaccaaaatgtccaccaatagaatgagtgaatcacctgtggtatatttataaataaaaatattaaatagaaggtaaaacaaatcag

SEQ ID NO: 156460 - DNA, 940 bp, Homo sapiens
  Payload ID: 10675
  Gene Symbol: MOBP
  Gene Name: myelin-associated oligodendrocyte basic protein
  Uniprot ID: Q13875
  ENST ID: ENST00000420739
  CDS Start-End: 225-776
aaaaacaccttgtgtaatgaaaaacccagatctataacctctccctatatattctgcatgcattgaagtaggctcaaaccctcagggacctggtatagacgcagaatctgtttcacacaacaactgctatttgaaggaaaaaaaaaaaaagaagcaaatgataccaagacaagctcataacagagatccaatcagcagatgtgtacggatgaaaatacagtgagatgagtcagaaaccggccaaggagggtcccagactctccaaaaaccagaagtactccgaacacttcagcatacactgctgcccgccgttcaccttcctcaattccaagaaggagatagtggatcggaaatacagcatctgtaagagcggctgcttctaccagaagaaagaggaggactggatctgctgcgcctgccagaagaccagaaccagccgccgtgccaagtcccctcagaggcccaagcaacagccagctgcgccccccgcggtggtcagagcgccagccaagccacggtcccctccgaggtctgagcgtcagccacggtcccctccgaggtctgagcgtcagccacggtcccctccgaggtctgagcgtcagccacggtcccctccgaggtctgagcgtcagccacgtccccgcccagaggtccgaccaccgccagccaagcagcgtccccctcagaagtccaagcaacagccgcgcagcagccccctcagagggccaggcgccagccgtggggggtcccccgtcaaagcttctaggttctggtaacaccatctcttcccttttgttccccagccctaagattgaaaaggaagatcaggccaaccccaaagaagaagtgaccaaggaggagtttaaactgaatgaacaacctcggctcctggactcattgcttcacaacccatctacccctggatgaagttatctggctt

SEQ ID NO: 156461 - DNA, 561 bp, Homo sapiens
  Payload ID: 10675
  Gene Symbol: MOBP
  Gene Name: myelin-associated oligodendrocyte basic protein
  Uniprot ID: Q13875
  ENST ID: ENST00000428261
  CDS Start-End: 291-536
aaaaacaccttgtgtaatgaaaaacccagatctataacctctccctatatattctgcatgcattgaagtaggctcaaaccctcagggacctggtatagacgcagaatctgtttcacacaacaactgctatttgaaggaaaaaaaaaaaaagaagcaaatgataccaagacaagctcataacagagatccaatcagcagatgtgtacggatgaaaatacagcttgaaggcaggtccacgcctcctcctggaagccttcccttgactgactcctcgctgagttcacagtgagatgagtcagaaaccggccaaggagggtcccagactctccaaaaaccagaagtactccgaacacttcagcatacactgctgcccgccgttcaccttcctcaattccaagaaggagatagtggatcggaaatacagcatctgtaagagcggctgcttctaccagaagaaagaggaggactggatctgctgcgcctgccagaagaccagattgaaaaggaagatcaggccaaccccaaagaagaagtgaccaaggaggagtttaaactgaatga

SEQ ID NO: 156462 - DNA, 5675 bp, Homo sapiens
  Payload ID: 10675
  Gene Symbol: MOBP
  Gene Name: myelin-associated oligodendrocyte basic protein
  Uniprot ID: Q13875
  ENST ID: ENST00000452959
  CDS Start-End: 126-371
cgcagaatctgtttcacacaacaactgctatttgaaggaaaaaaaaaaaaagaagcaaatgataccaagacaagctcataacagagatccaatcagcagatgtgtacggatgaaaatacagtgagatgagtcagaaaccggccaaggagggtcccagactctccaaaaaccagaagtactccgaacacttcagcatacactgctgcccgccgttcaccttcctcaattccaagaaggagatagtggatcggaaatacagcatctgtaagagcggctgcttctaccagaagaaagaggaggactggatctgctgcgcctgccagaagaccagattgaaaaggaagatcaggccaaccccaaagaagaagtgaccaaggaggagtttaaactgaatgaacaacctcggctcctggactcattgcttcacaacccatctacccctggatgaagttatctggcttcaaatattatgcaggggcaaacacctgctgatgtggcaactgctgatgctcatggtccccatggcatgggggcctcagggcagcctgcctggagtactttgaagatgtcatcccattgtcttctgacctctataattgccactgagagatctgctgtcagtctgcttatccttccacggactcaagtttcttcaatctgaagatacatgtctttctccagggacatgtggaaaaaaaaaagatgttatacaaccatcaaagtggcaaaaataaaaaaaatcaagtattggcaaagatgtggggaaaattctcataagctactgatgagaatttataaattattatgacacctttgggttgcaatctggggatactggcaaagcagaaaattgtacaacctgtgatcaagcaataataattttaggcacccatcctagagaaaacttgaattcatagaaaaagtaggtacacgtaaatctgttcaaggaatcattgtttggcattgaaaataggagagagatcatgagaaattaccaaaatgtccaccaatagaatgagtgaatcacctgtggtatatttataaataaaaatattaaatagaaggtaaaacaaatcagacatacacacattagatagataaatttagaggacaaaataaggaacatgaaaagcaaatagtagatggcaaatgtaatataatatactatgcataaattttaacaacacacaatattatattgcatattgcccaataagcagaagccataaggtctcacacttttcttataatgcaatagaataaaaatgacaacaaagtaaaagggtatcccaaaaataaaactatccttttggaaaaaaaaagatttaaaataattcctggtttgaagaaataacaaattaaaagctatatataaacggttaacaatattaggtggacatatttgtttgaagagataggtgaaagatagttgaaaagcctgggggtatattcaaggttatatgtcttagaaaacaaaaatacttgtttgggttcagttttggatctgggcttgttcttgtggcttctgatgatttctgacttggggaaaaatggggaagagttgaaatacgtccttccacccaaacctttgtttagtaataggtaggaaaatgaagaagaaaatagaatgttgcagaatgtggagggatgtaaaatggacagtactagggtagaggggaagtcagattagaggaaagaaagagcatcaggaacagtcttgtgctaggagctggtgtggccaagcacagtcggatgcccaaagatccaacaaggccatggctctgtgtccttgagtgggcacaaccattcctagccaagtttaagaggcaagtaaaaatataggggcaatgtcagatgaagtcttgttcagggtatggggctaggatgagagagaatgccacagagtatgaaggaagagtgatagatccagatgagatacagctcagagtgccacgcccccagaaagaggaatcaggcaagtactgtcccaaggcagctggagggtgagggctgagtgccctggcttcctcacttggggagaccatgggtctctgtagaaattccaatataaaggcagggaaatttgactgcatggagtcttcaggtagaaatgtttctcttgcctaaattcaggtgctaaataaacaacaaaatggtaacctctactatgaagtgtttccaatgatgggatatctgaggccattacattcctgggaataacatggtgaggtgcagggtggtggtggtggtgaaacatacgacagaccactgtaagtgagaacaaattactggcccagcccaacccacaccaaataagaaatttaatatccctttggcctgttttagattttggcaaagccaggcccatagtgcttgctgggctctctcttccacatcatccagaagacacacatttgctatggaatgattgtggaggtgagagtatagtgcatattaattcatgcaaaaagttagatattagcccagaaatgttagtaacaagaaactactgaattctctgtttgtctgttgtggaaataaaaccttctggggatgaatcaaaactatctgacaattacttgaaatgggtgaatagctaaatgtaatgtgccttggatattataactaaaaggtgctataatccagttatattttttatcttttaaggattggttctgaggagcactaccagtaaatattgcaaaaattacataaagctccaaaagctactctgtgtaaacttcttgagtgggaattctcaaccataatatctggaatatgactgataattctggatgttaactgattttatgttctgatgttttgactggttttgggaaaaattttgggaaaaaagagttttcctcgtaaatacccaacaactgggtctctgggtaaaaaggcctaatttatagagattgctaatttccatggtgtaaatatttccacaatgcagattccttccttccttttttttttttttttttttgagatggagtttcactcttgttacccagactggagtgcaaaggtgcgaccttggctcactgcaatcttcacctcccgggttcaagccattctcctgcctcagcctcccaagtagctgggattacaggtgcccacgaccatgcctggctaattttgtatttttagtagagatagggattcaccatgttggccaggctggtctcaacctctggacctcaggtgatccacccgcctcggcctcctaaagtgctggagattacaggcatgagccaccacgcccggaccatgatgcagatttcaagctatgaacatgattctctggagtttaccatttgtcttttaattggcaaatttgatgcagaattgggaagagaagcacacaattgactctcgtcagctggcacaagctggtgccagtgcaccactgtatatatccatggccctctgtgaagctagagtttactactaaaatttgtgctccataaatatacaaaggcactagtaagagaaaaaatataaagagaatataaactaaattcaaattagggagctcaaatggagaaaattgacagataatatttttgaaactttgaaaagtagtatttgtctagattcaccttttattaccttttcctttttttcttttccttttttttttttttttgagacggagtttctctcttgttacccaggctggagtgcaatggcacgcaatctcagctcattgcaacctcggctcactgtaaccttcaccttccgtgttcaaatgattctcctgcctcagccttccgagtagctgggattacaggcacccaccaccatgcccagctaattctttgtatttttagtggagatggggtttcaccatgttggccaggctggtcttgaacccctgacctcaggtgatccacccacctgggcctcccaaagtgctgggattacaggcatgagccaccgcgcccggcctgttattatcttttattaagcaaacagcgtatctatgtatcatactgagtgttctgagctgttagtttctttggtgttcatctagatggaagctggggcttccttcctttcagatattggtgctaacatgaagctgaccaaagaattgatgggatctgcacactgtaaagccggtttcaggatggctgagctgacggtcaagaaagaagagaagatatgagccgcctgcattttggggtggtggcagtgaaatttagacttgtgatttggtatgacaatatatggctttttgtgattgttaacattaatgaaaacaagaaaaattagttgctcaaaagttgaaaaatggattcataaactttttattagagtaaggcaaaagaacatattaaaatagaggtaaattagaaatgtcaataagaacccatggacattttttataaggagactttatctgttctgtccctacagtgatttatgctcttggatatttttgctgtcatcctgacaaattctagttggaatatggaacaagcttatttgtagacctagtgcctgtggcttctaaagcaattttctgaaaagagaaaccactgcctgttggaagaatagttgattccatacctcaagctagggaaaaaaaatcagaattagtctgtgaattctagatgttgagagaaagcagggtttcattagggcatcggagagtcacaagtccataggatgcaaaaaggaagatgaaataaaattgcctgaaaaacgcacctgaatttctggcattgtttactgaaaaggctgtgtattgatgaaccccaattatgtgaggtctacatttaagagtttataatcaacagtttgaaaatgcagggtgttgtttctttctataaggagacaaaacagtcagaagggagtgtcacaggacattatcacaaaatcaaagttctccatgaaatgtggttcatttgctagaaaataatgcaagcctattggagagaatcagggcttctagtgatgctagggatgaccttaagcattgtttgtaaatcacactttttcctagtctttcagcagcagctgcacagagtaggcctgcttcttcccatgaaagccacactgagttttatcaactagtagtgtgtgggcactattgcaagttatgttgtgttgtttatggccatttatccaacagtgctttcctctgtgcggggctctgcagcctcgttctatgttatttttattaccacgtgtctgtgcgcctcaggtggcaaagcagaatcagcttctctaccctcagcagggctcactatgactcactataagggaagaaaatcttacagatgtcagaaaatgttaggtaagtggacagtgataaacacaaaacagcaagtggtcagtatcaaagagaaaaacagtatgttggtgaaggagaagtatcaaagctagttaaaaaagtaacaggagaaatgtaaagggacaatactccacaaaaatttagattgtaactgagcttcttctcctaaagagatttaaaaataaagtataggaaatacatgaagaaacaaagtaaaatgccaaggtgtaagtttgaccatgaatatctagggaaaaacatacttgcactaaaacaaccaaatatgcaaaaatcaagtggaaaaacaggtcaaaataatgccagttgatgtctgtaagaactaaatgtataataaaatgagcaaaaaaaa

SEQ ID NO: 156463 - DNA, 571 bp, Homo sapiens
  Payload ID: 10675
  Gene Symbol: MOBP
  Gene Name: myelin-associated oligodendrocyte basic protein
  ENST ID: ENST00000436143
  CDS Start-End: 384-571
aaaccctcagggacctggtatagacgcagaatctgtttcacacaacaactgctatttgaaggaaaaaaaaaaaaagaagcaaatgataccaagacaagctcataacagagatccaatcagcagatgtgtacggatgaaaatacagcttgaaggcaggtccacgcctcctcctggaagccttcccttgactgactcctcgctgagttcacaggtatcagtcattcccaagccctcatctttggccagatgaaatgcctctgcccatgaagtttcaccttgttctctagcccaacatattgccctctcttctgtggacttttcatgccattgcaccagcacattctcatgttgcagagcatgctggccttgtatgacactcactgatgtctgtggacattcctctacctacaagtgagatgagtcagaaaccggccaaggagggtcccagactctccaaaaaccagaagtactccgaacacttcagcatacactgctgcccgccgttcaccttcctcaattccaagaaggagatagtggatcggaaatacagcatctgtaagagcggctgctt

SEQ ID NO: 156464 - DNA, 566 bp, Homo sapiens
  Payload ID: 10675
  Gene Symbol: MOBP
  Gene Name: myelin-associated oligodendrocyte basic protein
  Uniprot ID: Q13875
  ENST ID: ENST00000447324
  CDS Start-End: 141-386
aaaaacaccttgtgtaatgaaaaacccagatctataacctctccctatatattctgcatgcattgaagtaggctcaaaccctcagggacctggtatagacgcagaatctgtttcacacaacaactgctatttgaagtgagatgagtcagaaaccggccaaggagggtcccagactctccaaaaaccagaagtactccgaacacttcagcatacactgctgcccgccgttcaccttcctcaattccaagaaggagatagtggatcggaaatacagcatctgtaagagcggctgcttctaccagaagaaagaggaggactggatctgctgcgcctgccagaagaccagattgaaaaggaagatcaggccaaccccaaagaagaagtgaccaaggaggagtttaaactgaatgaacaacctcggctcctggactcattgcttcacaacccatctacccctggatgaagttatctggcttcaaatattatgcaggggcaaacacctgctgatgtggcaactgctgatgctcatggtccccatggcatgggggcctcagggcagcctgcct

SEQ ID NO: 156465 - DNA, 567 bp, Homo sapiens
  Payload ID: 10675
  Gene Symbol: MOBP
  Gene Name: myelin-associated oligodendrocyte basic protein
  ENST ID: ENST00000451925
  CDS Start-End: 393-567
gtggtttggtagggtgagctggtgtgtggtgtggttggacctggcatggaacttaactggagtttatgtggaatgaaccttgagggccttttgtttaaactttgtgtggcctttttgtagtctttgtgtagcttttgtttttaagtggatcttcgctgaggactcatcaaaaacaccttgtgtaatgaaaaacccagatctataacctctccctatatattctgcatgcattgaagtaggctcaaaccctcagggacctggtatagacgcagaatctgtttcacacaacaactgctatttgaaggaaaaaaaaaaaaagaagcaaatgataccaagacaagctcataacagagatccaatcagcagatgtgtacggatgaaaatacagtgagatgagtcagaaaccggccaaggagggtcccagactctccaaaaaccagaagtactccgaacacttcagcatacactgctgcccgccgttcaccttcctcaattccaagaaggagatagtggatcggaaatacagcatctgtaagagcggctgcttctaccagaagaaagaggagg

SEQ ID NO: 156466 - DNA, 911 bp, Homo sapiens
  Payload ID: 10675
  Gene Symbol: MOBP
  Gene Name: myelin-associated oligodendrocyte basic protein
  Uniprot ID: Q13875
  ENST ID: ENST00000442631
  CDS Start-End: 5-553
tgagatgagtcagaaaccggccaaggagggtcccagactctccaaaaaccagaagtactccgaacacttcagcatacactgctgcccgccgttcaccttcctcaattccaagaaggagatagtggatcggaaatacagcatctgtaagagcggctgcttctaccagaagaaagaggaggactggatctgctgcgcctgccagaagaccagaaccagccgccgtgccaagtcccctcagaggcccaagcaacagccagctgcgccccccgcggtggtcagagcgccagccaagccacggtcccctccgaggtctgagcgtcagccacggtcccctccgaggtctgagcgtcagccacggtcccctccgaggtctgagcgtcagccacggtcccctccgaggtctgagcgtcagccacgtccccgcccagaggtccgaccaccgccagccaagcagcgtccccctcagaagtccaagcaacagccgcgcagcagccccctcagagggccaggcgccagccgtggggggtcccccgtcaaagcttctaggttctgattgaaaaggaagatcaggccaaccccaaagaagaagtgaccaaggaggagtttaaactgaatgaacaacctcggctcctggactcattgcttcacaacccatctacccctggatgaagttatctggcttcaaatattatgcaggggcaaacacctgctgatgtggcaactgctgatgctcatggtccccatggcatgggggcctcagggcagcctgcctggagtactttgaagatgtcatcccattgtcttctgacctctataattgccactgagagatctgctgtcagtctgcttatccttccacggactcaagtttcttcaatctgaagatacatgtctttctccagggacatgtg

SEQ ID NO: 156467 - DNA, 1029 bp, Homo sapiens
  Payload ID: 10676
  Gene Symbol: MDS2
  Gene Name: myelodysplastic syndrome 2 translocation associated
  Uniprot ID: Q8NDY4
  ENST ID: ENST00000374555
  CDS Start-End: 588-1010
gtactagctgtcagctgctggagaccttgctttctgtttcactgggaaacagaagcaatcagaaggaaacttcctcagactccacctctcccttcactcccgcctgtatccgtgcctgttacctggacgccttgtggaacttgaattctacgccctccactgggacactgcccttcatcctctctcacctcctccaggacaacactctctctgtggggctttcacccccatcgctccactgaaactgctcttgtcaaggtcatcgatgacctcccgctgacaaactcaactgtcccatctctacaccccaaactgacccatcaggaatagcatgagctccaccttccaaagcttccgcaatctcaccgtctccaccgttactacctgtgtccgaggcaccactgtttcttgcctggagttgtagacgggatttcaccgtgttagccaggatggtctcgatctcctgacctcgtgatccgcctgtctcgacctcccaaagtgctgggattacagaatgttgtagtcctcatcatcagcagagactttgtgccatcctctgctatattatcctgaagagtgcctggctcatgctccaggctgcggattttattgagagaacggagactgctggtgaactctcaagagggttaattggagttttatcaagccagatttcatggtgtctgcttaatgttaatctctccaagcttcccaccagactgcaaaggctgagctgcagtgttctgaatagcagtccagctatgaggggaggtgcccgtggcaggcctcagctgaccctggagaggccattaagacctggctgtcgcctccacagctgctcggaggcagagaaaggtggctttgtaagaagaaaagagatcattctttttccaccatgtgaggacccagcaagagggtggctgtctgcaaacccagggagagagccctcaccaggaatctgctggcaccttaatcttggacttcccagcctccacaactgtgaggaataaatgtatgttgtttaagcca

SEQ ID NO: 156468 - DNA, 420 bp, Homo sapiens
  Payload ID: 10676
  Gene Symbol: MDS2
  Gene Name: myelodysplastic syndrome 2 translocation associated
  ENST ID: ENST00000612756
  CDS Start-End: 1-420
ctccaggctgcggattttattgagagaacggagactgctggtgaactctcaagagggttaattggagttttatcaagccagatttcatggtgtctgcttaatgttaatctctccaagcttcccaccagactgcaaaggctgagctgcagtgttctgaatagcagtccagctatgaggggaggtgcccgtggcaggcctcagctgaccctggagaggccattaagacctggctgtcgcctccacagctgctcggaggcagagaaaggtggctttgtaagaagaaaagagatcattctttttccaccatgtgaggacccagcaagagggtggctgtctgcaaacccagggagagagccctcaccaggaatctgctggcaccttaatcttggacttcccagcctccacaactgtgaggaataa

SEQ ID NO: 156469 - DNA, 1110 bp, Homo sapiens
  Payload ID: 10677
  Gene Symbol: MCL1
  Gene Name: myeloid cell leukemia 1
  Uniprot ID: Q07820
  ENST ID: ENST00000307940
  CDS Start-End: 1-816
atgtttggcctcaaaagaaacgcggtaatcggactcaacctctactgtgggggggccggcttgggggccggcagcggcggcgccacccgcccgggagggcgacttttggctacggagaaggaggcctcggcccggcgagagatagggggaggggaggccggcgcggtgattggcggaagcgccggcgcaagccccccgtccaccctcacgccagactcccggagggtcgcgcggccgccgcccattggcgccgaggtccccgacgtcaccgcgacccccgcgaggctgcttttcttcgcgcccacccgccgcgcggcgccgcttgaggagatggaagccccggccgctgacgccatcatgtcgcccgaagaggagctggacgggtacgagccggagcctctcgggaagcggccggctgtcctgccgctgctggagttggtcggggaatctggtaataacaccagtacggacgggtcactaccctcgacgccgccgccagcagaggaggaggaggacgagttgtaccggcagtcgctggagattatctctcggtaccttcgggagcaggccaccggcgccaaggacacaaagccaatgggcaggtctggggccaccagcaggaaggcgctggagaccttacgacgggttggggatggcgtgcagcgcaaccacgagacggccttccaaggatgggtttgtggagttcttccatgtagaggacctagaaggtggcatcaggaatgtgctgctggcttttgcaggtgttgctggagtaggagctggtttggcatatctaataagatagccttactgtaagtgcaatagttgacttttaaccaaccaccaccaccaccaaaaccagtttatgcagttggactccaagctgtaacttcctagagttgcaccctagcaacctagccagaaaagcaagtggcaagaggattatggctaacaagaataaatacatgggaagagtgctccccattgattgaagagtcactgtctgaaagaagcaaagttcagtttcagcaacaaacaaactttgtttgggaagctatggaggaggacttttagatttagtgaagatggtagggtggaaagacttaattt

SEQ ID NO: 156470 - DNA, 3932 bp, Homo sapiens
  Payload ID: 10677
  Gene Symbol: MCL1
  Gene Name: myeloid cell leukemia 1
  Uniprot ID: Q07820
  ENST ID: ENST00000369026
  CDS Start-End: 61-1113
tccagtaaggagtcggggtcttccccagttttctcagccaggcggcggcggcgactggcaatgtttggcctcaaaagaaacgcggtaatcggactcaacctctactgtgggggggccggcttgggggccggcagcggcggcgccacccgcccgggagggcgacttttggctacggagaaggaggcctcggcccggcgagagatagggggaggggaggccggcgcggtgattggcggaagcgccggcgcaagccccccgtccaccctcacgccagactcccggagggtcgcgcggccgccgcccattggcgccgaggtccccgacgtcaccgcgacccccgcgaggctgcttttcttcgcgcccacccgccgcgcggcgccgcttgaggagatggaagccccggccgctgacgccatcatgtcgcccgaagaggagctggacgggtacgagccggagcctctcgggaagcggccggctgtcctgccgctgctggagttggtcggggaatctggtaataacaccagtacggacgggtcactaccctcgacgccgccgccagcagaggaggaggaggacgagttgtaccggcagtcgctggagattatctctcggtaccttcgggagcaggccaccggcgccaaggacacaaagccaatgggcaggtctggggccaccagcaggaaggcgctggagaccttacgacgggttggggatggcgtgcagcgcaaccacgagacggccttccaaggcatgcttcggaaactggacatcaaaaacgaagacgatgtgaaatcgttgtctcgagtgatgatccatgttttcagcgacggcgtaacaaactggggcaggattgtgactctcatttcttttggtgcctttgtggctaaacacttgaagaccataaaccaagaaagctgcatcgaaccattagcagaaagtatcacagacgttctcgtaaggacaaaacgggactggctagttaaacaaagaggctgggatgggtttgtggagttcttccatgtagaggacctagaaggtggcatcaggaatgtgctgctggcttttgcaggtgttgctggagtaggagctggtttggcatatctaataagatagccttactgtaagtgcaatagttgacttttaaccaaccaccaccaccaccaaaaccagtttatgcagttggactccaagctgtaacttcctagagttgcaccctagcaacctagccagaaaagcaagtggcaagaggattatggctaacaagaataaatacatgggaagagtgctccccattgattgaagagtcactgtctgaaagaagcaaagttcagtttcagcaacaaacaaactttgtttgggaagctatggaggaggacttttagatttagtgaagatggtagggtggaaagacttaatttccttgttgagaacaggaaagtggccagtagccaggcaagtcatagaattgattacccgccgaattcattaatttactgtagtgttaagagaagcactaagaatgccagtgacctgtgtaaaagttacaagtaatagaactatgactgtaagcctcagtactgtacaagggaagcttttcctctctctaattagctttcccagtatacttcttagaaagtccaagtgttcaggacttttatacctgttatactttggcttggtttccatgattcttactttattagcctagtttatcaccaataatacttgacggaaggctcagtaattagttatgaatatggatatcctcaattcttaagacagcttgtaaatgtatttgtaaaaattgtatatatttttacagaaagtctatttctttgaaacgaaggaagtatcgaatttacattagtttttttcatacccttttgaactttgcaacttccgtaattaggaacctgtttcttacagcttttctatgctaaactttgttctgttcagttctagagtgtatacagaacgaattgatgtgtaactgtatgcagactggttgtagtggaacaaatctgataactatgcaggtttaaattttcttatctgattttggtaagtattccttaggtttttctttgaaaacctgggattgagaggttgatgaatggaaattctttcacttcattatatgcaagttttcaataattaggtctaagtggagttttaaggttactgatgacttacaaataatgggctctgattgggcaatactcatttgagttccttccatttgacctaatttaactggtgaaatttaaagtgaattcatgggctcatctttaaagcttttactaaaagattttcagctgaatggaactcattagctgtgtgcatataaaaagatcacatcaggtggatggagagacatttgatcccttgtttgcttaataaattataaaatgatggcttggaaaagcaggctagtctaaccatggtgctattattaggcttgcttgttacacacacaggtctaagcctagtatgtcaataaagcaaatacttactgttttgtttctattaatgattcccaaaccttgttgcaagtttttgcattggcatctttggatttcagtcttgatgtttgttctatcagacttaaccttttatttcctgtccttccttgaaattgctgattgttctgctccctctacagatatttatatcaattcctacagctttcccctgccatccctgaactctttctagcccttttagattttggcactgtgaaacccctgctggaaacctgagtgaccctccctccccaccaagagtccacagacctttcatctttcacgaacttgatcctgttagcaggtggtaataccatgggtgctgtgacactaacagtcattgagaggtgggaggaagtcccttttccttggactggtatcttttcaactattgttttatcctgtctttgggggcaatgtgtcaaaagtcccctcaggaattttcagaggaaagaacattttatgaggctttctctaaagtttcctttgtataggagtatgctcacttaaatttacagaaagaggtgagctgtgttaaacctcagagtttaaaagctactgataaactgaagaaagtgtctatattggaactagggtcatttgaaagcttcagtctcggaacatgacctttagtctgtggactccatttaaaaataggtatgaataagatgactaagaatgtaatggggaagaactgccctgcctgcccatctcagagccataaggtcatctttgctagagctatttttacctatgtatttatcgttcttgatcataagccgcttatttatatcatgtatctctaaggacctaaaagcactttatgtagtttttaattaatcttaagatctggttacggtaactaaaaaagcctgtctgccaaatccagtggaaacaagtgcatagatgtgaattggtttttaggggccccacttcccaattcattaggtatgactgtggaaatacagacaaggatcttagttgatattttgggcttggggcagtgagggcttaggacaccccaagtggtttgggaaaggaggaggggagtggtgggtttatagggggaggaggaggcaggtggtctaagtgctgactggctacgtagttcgggcaaatcctccaaaagggaaagggaggatttgcttagaaggatggcgctcccagtgactactttttgacttctgtttgtcttacgcttctctcagggaaaaacatgcagtcctctagtgtttcatgtacattctgtggggggtgaacaccttggttctggttaaacagctgtacttttgatagctgtgccaggaagggttaggaccaactacaaattaatgttggttgtcaaatgtagtgtgtttccctaactttctgtttttcctgagaaaaaaaaataaatcttttattcaaata

SEQ ID NO: 156471 - DNA, 3626 bp, Homo sapiens
  Payload ID: 10677
  Gene Symbol: MCL1
  Gene Name: myeloid cell leukemia 1
  ENST ID: ENST00000620947
  CDS Start-End: 209-802
gcgcaaccctccggaagctgccgcccctttccccttttatgggaatactttttttaaaaaaaaagagttcgctggcgccaccccgtaggactggccgccctaaaaccgtgataaaggagctgctcgccacttctcacttccgcttccttccagtaaggagtcggggtcttccccagttttctcagccaggcggcggcggcgactggcaatgtttggcctcaaaagaaacgcggtaatcggactcaacctctactgtgggggggccggcttgggggccggcagcggcggcgccacccgcccgggagggcgacttttggccaccggcgccaaggacacaaagccaatgggcaggtctggggccaccagcaggaaggcgctggagaccttacgacgggttggggatggcgtgcagcgcaaccacgagacggccttccaaggcatgcttcggaaactggacatcaaaaacgaagacgatgtgaaatcgttgtctcgagtgatgatccatgttttcagcgacggcgtaacaaactggggcaggattgtgactctcatttcttttggtgcctttgtggctaaacacttgaagaccataaaccaagaaagctgcatcgaaccattagcagaaagtatcacagacgttctcgtaaggacaaaacgggactggctagttaaacaaagaggctgggatgggtttgtggagttcttccatgtagaggacctagaaggtggcatcaggaatgtgctgctggcttttgcaggtgttgctggagtaggagctggtttggcatatctaataagatagccttactgtaagtgcaatagttgacttttaaccaaccaccaccaccaccaaaaccagtttatgcagttggactccaagctgtaacttcctagagttgcaccctagcaacctagccagaaaagcaagtggcaagaggattatggctaacaagaataaatacatgggaagagtgctccccattgattgaagagtcactgtctgaaagaagcaaagttcagtttcagcaacaaacaaactttgtttgggaagctatggaggaggacttttagatttagtgaagatggtagggtggaaagacttaatttccttgttgagaacaggaaagtggccagtagccaggcaagtcatagaattgattacccgccgaattcattaatttactgtagtgttaagagaagcactaagaatgccagtgacctgtgtaaaagttacaagtaatagaactatgactgtaagcctcagtactgtacaagggaagcttttcctctctctaattagctttcccagtatacttcttagaaagtccaagtgttcaggacttttatacctgttatactttggcttggtttccatgattcttactttattagcctagtttatcaccaataatacttgacggaaggctcagtaattagttatgaatatggatatcctcaattcttaagacagcttgtaaatgtatttgtaaaaattgtatatatttttacagaaagtctatttctttgaaacgaaggaagtatcgaatttacattagtttttttcatacccttttgaactttgcaacttccgtaattaggaacctgtttcttacagcttttctatgctaaactttgttctgttcagttctagagtgtatacagaacgaattgatgtgtaactgtatgcagactggttgtagtggaacaaatctgataactatgcaggtttaaattttcttatctgattttggtaagtattccttaggtttttctttgaaaacctgggattgagaggttgatgaatggaaattctttcacttcattatatgcaagttttcaataattaggtctaagtggagttttaaggttactgatgacttacaaataatgggctctgattgggcaatactcatttgagttccttccatttgacctaatttaactggtgaaatttaaagtgaattcatgggctcatctttaaagcttttactaaaagattttcagctgaatggaactcattagctgtgtgcatataaaaagatcacatcaggtggatggagagacatttgatcccttgtttgcttaataaattataaaatgatggcttggaaaagcaggctagtctaaccatggtgctattattaggcttgcttgttacacacacaggtctaagcctagtatgtcaataaagcaaatacttactgttttgtttctattaatgattcccaaaccttgttgcaagtttttgcattggcatctttggatttcagtcttgatgtttgttctatcagacttaaccttttatttcctgtccttccttgaaattgctgattgttctgctccctctacagatatttatatcaattcctacagctttcccctgccatccctgaactctttctagcccttttagattttggcactgtgaaacccctgctggaaacctgagtgaccctccctccccaccaagagtccacagacctttcatctttcacgaacttgatcctgttagcaggtggtaataccatgggtgctgtgacactaacagtcattgagaggtgggaggaagtcccttttccttggactggtatcttttcaactattgttttatcctgtctttgggggcaatgtgtcaaaagtcccctcaggaattttcagaggaaagaacattttatgaggctttctctaaagtttcctttgtataggagtatgctcacttaaatttacagaaagaggtgagctgtgttaaacctcagagtttaaaagctactgataaactgaagaaagtgtctatattggaactagggtcatttgaaagcttcagtctcggaacatgacctttagtctgtggactccatttaaaaataggtatgaataagatgactaagaatgtaatggggaagaactgccctgcctgcccatctcagagccataaggtcatctttgctagagctatttttacctatgtatttatcgttcttgatcataagccgcttatttatatcatgtatctctaaggacctaaaagcactttatgtagtttttaattaatcttaagatctggttacggtaactaaaaaagcctgtctgccaaatccagtggaaacaagtgcatagatgtgaattggtttttaggggccccacttcccaattcattaggtatgactgtggaaatacagacaaggatcttagttgatattttgggcttggggcagtgagggcttaggacaccccaagtggtttgggaaaggaggaggggagtggtgggtttatagggggaggaggaggcaggtggtctaagtgctgactggctacgtagttcgggcaaatcctccaaaagggaaagggaggatttgcttagaaggatggcgctcccagtgactactttttgacttctgtttgtcttacgcttctctcagggaaaaacatgcagtcctctagtgtttcatgtacattctgtggggggtgaacaccttggttctggttaaacagctgtacttttgatagctgtgccaggaagggttaggaccaactacaaattaatgttggttgtcaaatgtagtgtgtttccctaactttctgtttttcctgagaaaaaaaaataaatcttttattcaaatacaggg

SEQ ID NO: 156472 - DNA, 1752 bp, Homo sapiens
  Payload ID: 10678
  Gene Symbol: MNDA
  Gene Name: myeloid cell nuclear differentiation antigen
  Uniprot ID: P41218
  ENST ID: ENST00000368141
  CDS Start-End: 262-1485
attacataacttctttctagttaggaattaggacagtgtaagaaggccatctacaatcaagattgagagtggctctaacaagtgccatttttccttgttagctttcatttctcagccctttacaagattaaaatagtctgcagtttaatctctccaaagctttacggacagtgattctgtcctaaacaagacagtgactccaggatttctgaagactattgtggaagaagcatccattaaggccaagctataacatcagaaatggtgaatgaatacaagaaaattcttttgctgaaaggatttgagctcatggatgattatcattttacatcaattaagtccttactggcctatgatttaggactaactacaaaaatgcaagaggaatacaacagaattaagattacagatttgatggaaaaaaagttccaaggcgttgcctgtctagacaaactaatagaacttgccaaagatatgccatcacttaaaaaccttgttaacaatcttcgaaaagagaagtcaaaagttgctaagaaaattaaaacacaagaaaaagctccagtgaaaaaaataaaccaggaagaagtgggtcttgcggcacctgcacccaccgcaagaaacaaactgacatcggaagcaagagggaggattcctgtagctcagaaaagaaaaactccaaacaaagaaaagactgaagccaaaaggaataaggtgtcccaagagcagagtaagcccccaggtccctcaggagccagcacatctgcagctgtggatcatcccccactaccccagacctcatcatcaactccatccaacacttcgtttactccgaatcaggaaacccaggcccaacggcaggtggatgcaagaagaaatgttccccaaaacgacccagtgacagtggtggtactgaaagcaacagcgccatttaaatacgagtccccagaaaatgggaaaagcacaatgtttcatgctacagtggccagtaagactcaatatttccatgtgaaagtcttcgacatcaacttgaaagagaaatttgtaaggaagaaggtcattaccatatctgattactctgaatgtaaaggagtaatggaaataaaggaagcatcatctgtgtctgactttaatcaaaattttgaggtcccaaacagaattatcgaaatagcaaataaaactcccaagatcagtcaactttacaagcaagcatctggaacaatggtgtatgggttgtttatgttacaaaagaaaagcgtacacaagaagaacacaatttatgaaatacaggataatacaggatccatggatgtagtggggagtggaaaatggcacaatatcaagtgtgagaaaggagataaacttcgactcttctgccttcaactgagaacagttgaccgcaagctgaaactggtgtgtggaagtcacagcttcatcaaggtcatcaaggccaagaaaaacaaggaaggaccaatgaatgttaattgaaatatgaaagctgaaatgcaacaaacaacttccgcttaaaacaattaagttgttaataactgtgattttgtaaatttcagtaattcatttaaatgatgtttcagtagatatattctagcatattaagagcttttataactgagttatagattagtttgctttctggaataaaattttcttcttatactcttccttttttttagatattacattttgcttttatgacattcacgaggcaaaaaataaaatatctttttttgaaggaca

SEQ ID NO: 156473 - DNA, 582 bp, Homo sapiens
  Payload ID: 10678
  Gene Symbol: MNDA
  Gene Name: myeloid cell nuclear differentiation antigen
  ENST ID: ENST00000438394
  CDS Start-End: 1-313
cccaaacagaattatcgaaatagcaaataaaactcccaagatcagtcaactttacaagcaagcatctggaacaatggtgtatgggttgtttatgttacaaaagaaaagcgtacacaagaagaacacaatttatgaaatacaggataatacaggatccatggatgtagtggggagtggaaaatggcacaatatcaagtgtgagaaaggagataaacttcgactcttctgccttcaactgagaacagttgaccgcaagctgaaactggtcatcaaggccaagaaaaacaaggaaggaccaatgaatgttaattgaaatatgaaagctgaaatgcaacaaacaacttccgcttaaaacaattaagttgttaataactgtgattttgtaaatttcagtaattcatttaaatgatgtttcagtagatatattctagcatattaagagcttttataactgagttatagattagtttgctttctggaataaaattttcttcttatactcttccttttttttagatattacattttgcttttatgacattcacgaggcaaaaaataaaatatctttttttgaaggacatt

SEQ ID NO: 156474 - DNA, 2850 bp, Homo sapiens
  Payload ID: 10679
  Gene Symbol: MYD88
  Gene Name: myeloid differentiation primary response 88
  ENST ID: ENST00000396334
  CDS Start-End: 185-1114
agattcctacttcttacgccccccacatcacccgcctcgagacctcaagggtagaggtgggcacccccgcctccgcacttttgctcggggctccagattgtagggcagggcggcgcttctcggaaagcgaaagccggcggggcggggcgggtgccgcaggagaaagaggaagcgctggcagacaatgcgacccgaccgcgctgaggctccaggaccgcccgccatggctgcaggaggtcccggcgcggggtctgcggccccggtctcctccacatcctcccttcccctggctgctctcaacatgcgagtgcggcgccgcctgtctctgttcttgaacgtgcggacacaggtggcggccgactggaccgcgctggcggaggagatggactttgagtacttggagatccggcaactggagacacaagcggaccccactggcaggctgctggacgcctggcagggacgccctggcgcctctgtaggccgactgctcgagctgcttaccaagctgggccgcgacgacgtgctgctggagctgggacccagcattgaggaggattgccaaaagtatatcttgaagcagcagcaggaggaggctgagaagcctttacaggtggccgctgtagacagcagtgtcccacggacagcagagctggcgggcatcaccacacttgatgaccccctggggcatatgcctgagcgtttcgatgccttcatctgctattgccccagcgacatccagtttgtgcaggagatgatccggcaactggaacagacaaactatcgactgaagttgtgtgtgtctgaccgcgatgtcctgcctggcacctgtgtctggtctattgctagtgagctcatcgaaaagaggtgccgccggatggtggtggttgtctctgatgattacctgcagagcaaggaatgtgacttccagaccaaatttgcactcagcctctctccaggtgcccatcagaagcgactgatccccatcaagtacaaggcaatgaagaaagagttccccagcatcctgaggttcatcactgtctgcgactacaccaacccctgcaccaaatcttggttctggactcgccttgccaaggccttgtccctgccctgaagactgttctgaggccctgggtgtgtgtgtatctgtctgcctgtccatgtacttctgccctgcctcctcctttcgttgtaggaggaatctgtgctctacttacctctcaattcctggagatgccaacttcacagacacgtctgcagcagctggacatcacatttcatgtcctgcatggaaccagtggctgtgagtggcatgtccacttgctggattatcagccaggacactatagaacaggaccagctgagactaagaaggaccagcagagccagctcagctctgagccattcacacatcttcaccctcagtttcctcacttgaggagtgggatggggagaacagagagtagctgtgtttgaatccctgtaggaaatggtgaagcatagctctgggtctcctgggggagaccaggcttggctgcgggagagctggctgttgctggactacatgctggccactgctgtgaccacgacactgctggggcagcttcttccacagtgatgcctactgatgcttcagtgcctctgcacaccgcccattccacttcctccttccccacagggcaggtggggaagcagtttggcccagcccaaggagaccccaccttgagccttatttcctaatgggtccacctctcatctgcatctttcacacctcccagcttctgcccaaccttcagcagtgacaagtccccaagagactcgcctgagcagcttgggctgcttttcatttccacctgtcaggatgcctgtggtcatgctctcagctccacctggcatgagaagggatcctggcctctggcatattcatcaagtatgagttctggggatgagtcactgtaatgatgtgagcagggagccttcctccctgggccacctgcagagagctttcccaccaactttgtaccttgattgccttacaaagttatttgtttacaaacagcgaccatataaaagcctcctgccccaaagcttgtgggcacatgggcacatacagactcacatacagacacacacatatatgtacagacatgtactctcacacacacaggcaccagcatacacacgtttttctaggtacagctcccaggaacagctaggtgggaaagtcccatcactgagggagcctaaccatgtccctgaacaaaaattgggcactcatctattccttttctcttgtgtccctactcattgaaaccaaactctggaaaggacccaatgtaccagtatttatacctctaatgaagcacagagagaggaagagagctgcttaaactcacacaacaatgaactgcagacacagctgttctctccctctctccttcccagagcaatttatactttaccctcaggctgtcctctggggagaaggtgccatggtcttaggtgtctgtgccccaggacagaccctaggaccctaaatccaatagaaaatgcatatctttgctccactttcagccaggctggagcaaggtaccttttcttaggatcttgggagggaatggatgcccctctctgcatgatcttgttgaggcatttagctgccatgcacctgtccccctttaatactgggcattttaaagccatctcaagaggcatcttctacatgttttgtacgcattaaaataatttcaaagatatctgagaaaagccgatatttgccattcttcctatatcctggaatatatcttgcatcctgagtttataataataaataatattctaccttggaaa

SEQ ID NO: 156475 - DNA, 1279 bp, Homo sapiens
  Payload ID: 10679
  Gene Symbol: MYD88
  Gene Name: myeloid differentiation primary response 88
  ENST ID: ENST00000424893
  CDS Start-End: 111-905
gcacttttgctcggggctccagattgtagggcagggcggcgcttctcggaaagcgaaagccggcggggcggggcgggtgccgcaggagaaagaggaagcgctggcagacaatgcgacccgaccgcgctgaggctccaggaccgcccgccatggctgcaggaggtcccggcgcggggtctgcggccccggtctcctccacatcctcccttcccctggctgctctcaacatgcgagtgcggcgccgcctgtctctgttcttgaacgtgcggacacaggtggcggccgactggaccgcgctggcggaggagatggactttgagtacttggagatccggcaactggagacacaagcggaccccactggcaggctgctggacgcctggcagggacgccctggcgcctctgtaggccgactgctcgagctgcttaccaagctgggccgcgacgacgtgctgctggagctgggacccagcattgggcatatgcctgagcgtttcgatgccttcatctgctattgccccagcgacatccagtttgtgcaggagatgatccggcaactggaacagacaaactatcgactgaagttgtgtgtgtctgaccgcgatgtcctgcctggcacctgtgtctggtctattgctagtgagctcatcgaaaagaggtgccgccggatggtggtggttgtctctgatgattacctgcagagcaaggaatgtgacttccagaccaaatttgcactcagcctctctccaggtgcccatcagaagcgactgatccccatcaagtacaaggcaatgaagaaagagttccccagcatcctgaggttcatcactgtctgcgactacaccaacccctgcaccaaatcttggttctggactcgccttgccaaggccttgtccctgccctgaagactgttctgaggccctgggtgtgtgtgtatctgtctgcctgtccatgtacttctgccctgcctcctcctttcgttgtaggaggaatctgtgctctacttacctctcaattcctggagatgccaacttcacagacacgtctgcagcagctggacatcacatttcatgtcctgcatggaaccagtggctgtgagtggcatgtccacttgctggattatcagccaggacactatagaacaggaccagctgagactaagaaggaccagcagagccagctcagctctgagccattcacacatcttcaccctcagtttcctcacttgaggagtgggatggggagaacagagagtagctgtgtttgaatccctgtagga

SEQ ID NO: 156476 - DNA, 914 bp, Homo sapiens
  Payload ID: 10679
  Gene Symbol: MYD88
  Gene Name: myeloid differentiation primary response 88
  Uniprot ID: Q99836
  ENST ID: ENST00000443433
  CDS Start-End: 2-616
aatgcgacccgaccgcgctgaggctccaggaccgcccgccatggctgcaggaggtcccggcgcggggtctgcggccccggtctcctccacatcctcccttcccctggctgctctcaacatgcgagtgcggcgccgcctgtctctgttcttgaacgtgcggacacaggtggcggccgactggaccgcgctggcggaggagatggactttgagtacttggagatccggcaactggagacacaagcggaccccactggcaggctgctggacgcctggcagggacgccctggcgcctctgtaggccgactgctcgagctgcttaccaagctgggccgcgacgacgtgctgctggagctgggacccagcattgaggaggattgccaaaagtatatcttgaagcagcagcaggaggaggctgagaagcctttacaggtggccgctgtagacagcagtgtcccacggacagcagagctggcgggcatcaccacacttgatgaccccctgggtgccgccggatggtggtggttgtctctgatgattacctgcagagcaaggaatgtgacttccagaccaaatttgcactcagcctctctccaggtgcccatcagaagcgactgatccccatcaagtacaaggcaatgaagaaagagttccccagcatcctgaggttcatcactgtctgcgactacaccaacccctgcaccaaatcttggttctggactcgccttgccaaggccttgtccctgccctgaagactgttctgaggccctgggtgtgtgtgtatctgtctgcctgtccatgtacttctgccctgcctcctcctttcgttgtaggaggaatctgtgctctacttacctctcaattcctggagatgccaacttcacagacacgtctgcagcagctggacatcacattt

SEQ ID NO: 156477 - DNA, 2687 bp, Homo sapiens
  Payload ID: 10679
  Gene Symbol: MYD88
  Gene Name: myeloid differentiation primary response 88
  ENST ID: ENST00000421516
  CDS Start-End: 1-951
cgacccgaccgcgctgaggctccaggaccgcccgccatggctgcaggaggtcccggcgcggggtctgcggccccggtctcctccacatcctcccttcccctggctgctctcaacatgcgagtgcggcgccgcctgtctctgttcttgaacgtgcggacacaggtggcggccgactggaccgcgctggcggaggagatggactttgagtacttggagatccggcaactggagacacaagcggaccccactggcaggctgctggacgcctggcagggacgccctggcgcctctgtaggccgactgctcgagctgcttaccaagctgggccgcgacgacgtgctgctggagctgggacccagcattgaggaggattgccaaaagtatatcttgaagcagcagcaggaggaggctgagaagcctttacaggtggccgctgtagacagcagtgtcccacggacagcagagctggcgggcatcaccacacttgatgaccccctggggcatatgcctgagcgtttcgatgccttcatctgctattgccccagcgacatccagtttgtgcaggagatgatccggcaactggaacagacaaactatcgactgaagttgtgtgtgtctgaccgcgatgtcctgcctggcacctgtgtctggtctattgctagtgagctcatcgaaaagaggttggctagaaggccacggggtgggtgccgccggatggtggtggttgtctctgatgattacctgcagagcaaggaatgtgacttccagaccaaatttgcactcagcctctctccaggtgcccatcagaagcgactgatccccatcaagtacaaggcaatgaagaaagagttccccagcatcctgaggttcatcactgtctgcgactacaccaacccctgcaccaaatcttggttctggactcgccttgccaaggccttgtccctgccctgaagactgttctgaggccctgggtgtgtgtgtatctgtctgcctgtccatgtacttctgccctgcctcctcctttcgttgtaggaggaatctgtgctctacttacctctcaattcctggagatgccaacttcacagacacgtctgcagcagctggacatcacatttcatgtcctgcatggaaccagtggctgtgagtggcatgtccacttgctggattatcagccaggacactatagaacaggaccagctgagactaagaaggaccagcagagccagctcagctctgagccattcacacatcttcaccctcagtttcctcacttgaggagtgggatggggagaacagagagtagctgtgtttgaatccctgtaggaaatggtgaagcatagctctgggtctcctgggggagaccaggcttggctgcgggagagctggctgttgctggactacatgctggccactgctgtgaccacgacactgctggggcagcttcttccacagtgatgcctactgatgcttcagtgcctctgcacaccgcccattccacttcctccttccccacagggcaggtggggaagcagtttggcccagcccaaggagaccccaccttgagccttatttcctaatgggtccacctctcatctgcatctttcacacctcccagcttctgcccaaccttcagcagtgacaagtccccaagagactcgcctgagcagcttgggctgcttttcatttccacctgtcaggatgcctgtggtcatgctctcagctccacctggcatgagaagggatcctggcctctggcatattcatcaagtatgagttctggggatgagtcactgtaatgatgtgagcagggagccttcctccctgggccacctgcagagagctttcccaccaactttgtaccttgattgccttacaaagttatttgtttacaaacagcgaccatataaaagcctcctgccccaaagcttgtgggcacatgggcacatacagactcacatacagacacacacatatatgtacagacatgtactctcacacacacaggcaccagcatacacacgtttttctaggtacagctcccaggaacagctaggtgggaaagtcccatcactgagggagcctaaccatgtccctgaacaaaaattgggcactcatctattccttttctcttgtgtccctactcattgaaaccaaactctggaaaggacccaatgtaccagtatttatacctctaatgaagcacagagagaggaagagagctgcttaaactcacacaacaatgaactgcagacacagctgttctctccctctctccttcccagagcaatttatactttaccctcaggctgtcctctggggagaaggtgccatggtcttaggtgtctgtgccccaggacagaccctaggaccctaaatccaatagaaaatgcatatctttgctccactttcagccaggctggagcaaggtaccttttcttaggatcttgggagggaatggatgcccctctctgcatgatcttgttgaggcatttagctgccatgcacctgtccccctttaatactgggcattttaaagccatctcaagaggcatcttctacatgttttgtacgcattaaaataatttcaaagatatctgagaaaagccgatatttgccattcttcctatatcctggaatatatcttgcatcctgagtttataataataaataatattctaccttggaaa

SEQ ID NO: 156478 - DNA, 2871 bp, Homo sapiens
  Payload ID: 10679
  Gene Symbol: MYD88
  Gene Name: myeloid differentiation primary response 88
  ENST ID: ENST00000417037
  CDS Start-End: 185-1138
agattcctacttcttacgccccccacatcacccgcctcgagacctcaagggtagaggtgggcacccccgcctccgcacttttgctcggggctccagattgtagggcagggcggcgcttctcggaaagcgaaagccggcggggcggggcgggtgccgcaggagaaagaggaagcgctggcagacaatgcgacccgaccgcgctgaggctccaggaccgcccgccatggctgcaggaggtcccggcgcggggtctgcggccccggtctcctccacatcctcccttcccctggctgctctcaacatgcgagtgcggcgccgcctgtctctgttcttgaacgtgcggacacaggtggcggccgactggaccgcgctggcggaggagatggactttgagtacttggagatccggcaactggagacacaagcggaccccactggcaggctgctggacgcctggcagggacgccctggcgcctctgtaggccgactgctcgagctgcttaccaagctgggccgcgacgacgtgctgctggagctgggacccagcattgaggaggattgccaaaagtatatcttgaagcagcagcaggaggaggctgagaagcctttacaggtggccgctgtagacagcagtgtcccacggacagcagagctggcgggcatcaccacacttgatgaccccctggggcatatgcctgagcgtttcgatgccttcatctgctattgccccagcgacatccagtttgtgcaggagatgatccggcaactggaacagacaaactatcgactgaagttgtgtgtgtctgaccgcgatgtcctgcctggcacctgtgtctggtctattgctagtgagctcatcgaaaagaggttggctagaaggccacggggtgggtgccgccggatggtggtggttgtctctgatgattacctgcagagcaaggaatgtgacttccagaccaaatttgcactcagcctctctccaggtgcccatcagaagcgactgatccccatcaagtacaaggcaatgaagaaagagttccccagcatcctgaggttcatcactgtctgcgactacaccaacccctgcaccaaatcttggttctggactcgccttgccaaggccttgtccctgccctgaagactgttctgaggccctgggtgtgtgtgtatctgtctgcctgtccatgtacttctgccctgcctcctcctttcgttgtaggaggaatctgtgctctacttacctctcaattcctggagatgccaacttcacagacacgtctgcagcagctggacatcacatttcatgtcctgcatggaaccagtggctgtgagtggcatgtccacttgctggattatcagccaggacactatagaacaggaccagctgagactaagaaggaccagcagagccagctcagctctgagccattcacacatcttcaccctcagtttcctcacttgaggagtgggatggggagaacagagagtagctgtgtttgaatccctgtaggaaatggtgaagcatagctctgggtctcctgggggagaccaggcttggctgcgggagagctggctgttgctggactacatgctggccactgctgtgaccacgacactgctggggcagcttcttccacagtgatgcctactgatgcttcagtgcctctgcacaccgcccattccacttcctccttccccacagggcaggtggggaagcagtttggcccagcccaaggagaccccaccttgagccttatttcctaatgggtccacctctcatctgcatctttcacacctcccagcttctgcccaaccttcagcagtgacaagtccccaagagactcgcctgagcagcttgggctgcttttcatttccacctgtcaggatgcctgtggtcatgctctcagctccacctggcatgagaagggatcctggcctctggcatattcatcaagtatgagttctggggatgagtcactgtaatgatgtgagcagggagccttcctccctgggccacctgcagagagctttcccaccaactttgtaccttgattgccttacaaagttatttgtttacaaacagcgaccatataaaagcctcctgccccaaagcttgtgggcacatgggcacatacagactcacatacagacacacacatatatgtacagacatgtactctcacacacacaggcaccagcatacacacgtttttctaggtacagctcccaggaacagctaggtgggaaagtcccatcactgagggagcctaaccatgtccctgaacaaaaattgggcactcatctattccttttctcttgtgtccctactcattgaaaccaaactctggaaaggacccaatgtaccagtatttatacctctaatgaagcacagagagaggaagagagctgcttaaactcacacaacaatgaactgcagacacagctgttctctccctctctccttcccagagcaatttatactttaccctcaggctgtcctctggggagaaggtgccatggtcttaggtgtctgtgccccaggacagaccctaggaccctaaatccaatagaaaatgcatatctttgctccactttcagccaggctggagcaaggtaccttttcttaggatcttgggagggaatggatgcccctctctgcatgatcttgttgaggcatttagctgccatgcacctgtccccctttaatactgggcattttaaagccatctcaagaggcatcttctacatgttttgtacgcattaaaataatttcaaagatatctgagaaaagccgatatttgccattcttcctatatcctggaatatatcttgcatcctgagtttataataataaataatattctaccttgg

SEQ ID NO: 156479 - DNA, 976 bp, Homo sapiens
  Payload ID: 10679
  Gene Symbol: MYD88
  Gene Name: myeloid differentiation primary response 88
  Uniprot ID: Q99836
  ENST ID: ENST00000495303
  CDS Start-End: 6-485
agacaatgcgacccgaccgcgctgaggctccaggaccgcccgccatggctgcaggaggtcccggcgcggggtctgcggccccggtctcctccacatcctcccttcccctggctgctctcaacatgcgagtgcggcgccgcctgtctctgttcttgaacgtgcggacacaggtggcggccgactggaccgcgctggcggaggagatggactttgagtacttggagatccggcaactggagacacaagcggaccccactggcaggctgctggacgcctggcagggacgccctggcgcctctgtaggccgactgctcgagctgcttaccaagctgggccgcgacgacgtgctgctggagctgggacccagcattggtgccgccggatggtggtggttgtctctgatgattacctgcagagcaaggaatgtgacttccagaccaaatttgcactcagcctctctccaggtgcccatcagaagcgactgatccccatcaagtacaaggcaatgaagaaagagttccccagcatcctgaggttcatcactgtctgcgactacaccaacccctgcaccaaatcttggttctggactcgccttgccaaggccttgtccctgccctgaagactgttctgaggccctgggtgtgtgtgtatctgtctgcctgtccatgtacttctgccctgcctcctcctttcgttgtaggaggaatctgtgctctacttacctctcaattcctggagatgccaacttcacagacacgtctgcagcagctggacatcacatttcatgtcctgcatggaaccagtggctgtgagtggcatgtccacttgctggattatcagccaggacactatagaacaggaccagctgagactaagaaggaccagcagagccagctcagctctgagccattcacacatcttcaccctcagtttcctcacttgaggagtgggatggggagaacagagagtagctgtg

SEQ ID NO: 156480 - DNA, 2203 bp, Homo sapiens
  Payload ID: 10680
  Gene Symbol: MLF1
  Gene Name: myeloid leukemia factor 1
  Uniprot ID: P58340
  ENST ID: ENST00000355893
  CDS Start-End: 139-945
ctatcccggcgggcaccgcctgcgccgcggcgagtgaggcgtcgtccgtactggaggctagctcttgtcgcggccgcggcgagttaacatcgtttttccaatctgtccgcggctgccgccacccaagacagagccagaatgttcaggatgctgaacagcagttttgaggatgaccccttcttctctgagtccattcttgcacaccgagaaaatatgcgacagatgataagaagtttttctgaaccctttggaagagacttgctcagtatctctgatggtagagggagagctcataatcgtagaggacataatgatggtgaagattctttgactcatacagatgtcagctctttccagacaatggaccaaatggtgtcaaatatgagaaactatatgcagaaattagaaagaaacttcggtcaactttcagtggatccaaatggacattcattttgttcttcctcagttatgacttattccaaaataggagatgaaccgccaaaggtttttcaggcctcaactcaaactcgtcgagctccaggaggaataaaggaaaccaggaaagcaatgagagattctgacagtggactagaaaaaatggctattggtcatcatatccatgaccgagctcatgtcattaaaaagtcaaagaacaagaagactggagatgaagaggtcaaccaggagttcatcaatatgaatgaaagtgatgctcatgcttttgatgaggagtggcaaagtgaggttttgaagtacaaaccaggacgacacaatctaggaaacactagaatgagaagtgttggccatgagaatcctggctcccgagaacttaaaagaagggagaaacctcaacaaagtccagccattgaacatggaaggagatcaaatgttttgggggacaaactccacatcaaaggctcatctgtgaaaagcaacaaaaaataaatagccatgcatttgatttgtttagttttgattgttttaacagttagtaatggtgctgggtaataagcataagaccaatctcttgctgttaaatcagttctgtccttggcaactttcttctgatatctgaatgttcatgaaggtcctagctttatattgtccctcttttaggaataaaattttgattttcaacaatgtgagtaaattgagtctatttaatgtaaaactctttaaaacatactaattttttaaagcttatatgcttatttcgcttccccagttgtttttgtgttggctaaatattcttttatatttatcaagattgattgcagagcagttctatcacttataattagttataagaaattataatgttaaaaaagtctcagtttttactaacactgtactagggtgatattaataaaggtttaaataatttatctctaattttataatgtgttgtaaagccaactagcttaaaactttaaaaataataaagcaaaactacactagtactcttttatgagaaaatagttactattttgataaagggcaaggataatcaaatagttcattttcagagaaaaatattttaaattgctaatgtacatgattgttttggttataatttatttatagaatgtatcttttctatattacattcttaatattcaccagatattatattgaccattctctttaacttcttaatgtggcatatttctactctcctttcccacaaacagcttcatctgtctccaaggttaacattctgaagctggagagtccttggagaaactctgctcagcttttttgtgacatttagaaaaatgcatttggtattctccaaaccagaatgatacattgtctcaaaatctgttagacagctgatgggtgtttttgagcaacgtcttaataattcagttgtttctgttttaattataccattaaaaatcagctttagctttttaattctagaatttaagcatcagtctgttcttataaaagttaggtttgaagtttataagaatataaaatcttaactcacatttgttgtttaatatttctgtcaaggaaaaaagcccccaaaaattgctatcactctataatcctaagtatttttcttttcaattttgtaagtaaaattatatgactatgttcatacttctctaattttttatataatatttttgttaattttactagtttgtgttttatgcctttagtcattaaaataaaatgcaaatgtgttaattca

SEQ ID NO: 156481 - DNA, 2222 bp, Homo sapiens
  Payload ID: 10680
  Gene Symbol: MLF1
  Gene Name: myeloid leukemia factor 1
  Uniprot ID: P58340
  ENST ID: ENST00000359117
  CDS Start-End: 237-968
gcgccgcggcgagtgaggcgtcgtccgtactggaggctagctcttgtcgcggccgcggcgagttaacatcgtttttccaatctgtccgcggctgccgccacccaagacagagccagaatgttcaggatgctgaacagcagttttgaggatgaccccttcttctcgtgagttacgggagccaggagtccggggtcgcgcgggaattaagtgagtccattcttgcacaccgagaaaatatgcgacagatgataagaagtttttctgaaccctttggaagagacttgctcagtatctctgatggtagagggagagctcataatcgtagaggacataatgatggtgaagattctttgactcatacagatgtcagctctttccagacaatggaccaaatggtgtcaaatatgagaaactatatgcagaaattagaaagaaacttcggtcaactttcagtggatccaaatggacattcattttgttcttcctcagttatgacttattccaaaataggagatgaaccgccaaaggtttttcaggcctcaactcaaactcgtcgagctccaggaggaataaaggaaaccaggaaagcaatgagagattctgacagtggactagaaaaaatggctattggtcatcatatccatgaccgagctcatgtcattaaaaagtcaaagaacaagaagactggagatgaagaggtcaaccaggagttcatcaatatgaatgaaagtgatgctcatgcttttgatgaggagtggcaaagtgaggttttgaagtacaaaccaggacgacacaatctaggaaacactagaatgagaagtgttggccatgagaatcctggctcccgagaacttaaaagaagggagaaacctcaacaaagtccagccattgaacatggaaggagatcaaatgttttgggggacaaactccacatcaaaggctcatctgtgaaaagcaacaaaaaataaatagccatgcatttgatttgtttagttttgattgttttaacagttagtaatggtgctgggtaataagcataagaccaatctcttgctgttaaatcagttctgtccttggcaactttcttctgatatctgaatgttcatgaaggtcctagctttatattgtccctcttttaggaataaaattttgattttcaacaatgtgagtaaattgagtctatttaatgtaaaactctttaaaacatactaattttttaaagcttatatgcttatttcgcttccccagttgtttttgtgttggctaaatattcttttatatttatcaagattgattgcagagcagttctatcacttataattagttataagaaattataatgttaaaaaagtctcagtttttactaacactgtactagggtgatattaataaaggtttaaataatttatctctaattttataatgtgttgtaaagccaactagcttaaaactttaaaaataataaagcaaaactacactagtactcttttatgagaaaatagttactattttgataaagggcaaggataatcaaatagttcattttcagagaaaaatattttaaattgctaatgtacatgattgttttggttataatttatttatagaatgtatcttttctatattacattcttaatattcaccagatattatattgaccattctctttaacttcttaatgtggcatatttctactctcctttcccacaaacagcttcatctgtctccaaggttaacattctgaagctggagagtccttggagaaactctgctcagcttttttgtgacatttagaaaaatgcatttggtattctccaaaccagaatgatacattgtctcaaaatctgttagacagctgatgggtgtttttgagcaacgtcttaataattcagttgtttctgttttaattataccattaaaaatcagctttagctttttaattctagaatttaagcatcagtctgttcttataaaagttaggtttgaagtttataagaatataaaatcttaactcacatttgttgtttaatatttctgtcaaggaaaaaagcccccaaaaattgctatcactctataatcctaagtatttttcttttcaattttgtaagtaaaattatatgactatgttcatacttctctaattttttatataatatttttgttaattttactagtttgtgttttatgcctttagtcattaaaataaaatgcaaatgtgttaa

SEQ ID NO: 156482 - DNA, 2157 bp, Homo sapiens
  Payload ID: 10680
  Gene Symbol: MLF1
  Gene Name: myeloid leukemia factor 1
  Uniprot ID: P58340
  ENST ID: ENST00000392822
  CDS Start-End: 1-900
atgttaaaagaagttcttcagagagaaggaaaatcatacaagtcagaaactctgatgtacattaaaaaagcaagagcatcagagaataagttaagtgagtccattcttgcacaccgagaaaatatgcgacagatgataagaagtttttctgaaccctttggaagagacttgctcagtatctctgatggtagagggagagctcataatcgtagaggacataatgatggtgaagattctttgactgcaacgagttgttctcttgtgccttttggcgattttggtggtatgcatacagatgtcagctctttccagacaatggaccaaatggtgtcaaatatgagaaactatatgcagaaattagaaagaaacttcggtcaactttcagtggatccaaatggacattcattttgttcttcctcagttatgacttattccaaaataggagatgaaccgccaaaggtttttcaggcctcaactcaaactcgtcgagctccaggaggaataaaggaaaccaggaaagcaatgagagattctgacagtggactagaaaaaatggctattggtcatcatatccatgaccgagctcatgtcattaaaaagtcaaagaacaagaagactggagatgaagaggtcaaccaggagttcatcaatatgaatgaaagtgatgctcatgcttttgatgaggagtggcaaagtgaggttttgaagtacaaaccaggacgacacaatctaggaaacactagaatgagaagtgttggccatgagaatcctggctcccgagaacttaaaagaagggagaaacctcaacaaagtccagccattgaacatggaaggagatcaaatgttttgggggacaaactccacatcaaaggctcatctgtgaaaagcaacaaaaaataaatagccatgcatttgatttgtttagttttgattgttttaacagttagtaatggtgctgggtaataagcataagaccaatctcttgctgttaaatcagttctgtccttggcaactttcttctgatatctgaatgttcatgaaggtcctagctttatattgtccctcttttaggaataaaattttgattttcaacaatgtgagtaaattgagtctatttaatgtaaaactctttaaaacatactaattttttaaagcttatatgcttatttcgcttccccagttgtttttgtgttggctaaatattcttttatatttatcaagattgattgcagagcagttctatcacttataattagttataagaaattataatgttaaaaaagtctcagtttttactaacactgtactagggtgatattaataaaggtttaaataatttatctctaattttataatgtgttgtaaagccaactagcttaaaactttaaaaataataaagcaaaactacactagtactcttttatgagaaaatagttactattttgataaagggcaaggataatcaaatagttcattttcagagaaaaatattttaaattgctaatgtacatgattgttttggttataatttatttatagaatgtatcttttctatattacattcttaatattcaccagatattatattgaccattctctttaacttcttaatgtggcatatttctactctcctttcccacaaacagcttcatctgtctccaaggttaacattctgaagctggagagtccttggagaaactctgctcagcttttttgtgacatttagaaaaatgcatttggtattctccaaaccagaatgatacattgtctcaaaatctgttagacagctgatgggtgtttttgagcaacgtcttaataattcagttgtttctgttttaattataccattaaaaatcagctttagctttttaattctagaatttaagcatcagtctgttcttataaaagttaggtttgaagtttataagaatataaaatcttaactcacatttgttgtttaatatttctgtcaaggaaaaaagcccccaaaaattgctatcactctataatcctaagtatttttcttttcaattttgtaagtaaaattatatgactatgttcatacttctctaattttttatataatatttttgttaattttactagtttgtgttttatgcctttagtcattaaaataaaatgcaaatgtgttaattc

SEQ ID NO: 156483 - DNA, 1050 bp, Homo sapiens
  Payload ID: 10680
  Gene Symbol: MLF1
  Gene Name: myeloid leukemia factor 1
  Uniprot ID: P58340
  ENST ID: ENST00000482628
  CDS Start-End: 303-1034
gtactggaggctagctcttgtcgcggccgcggcgagttaacatcgtttttccaatctgtccgcggctgccgccacccaagacagagccagaatgttcaggatgctgaacagcagttttgaggatgaccccttcttctcagctaaccttgtttgtgaagggactccgctttctgtcaaaactagaaataggacagggaagctgatggggcggggcggggggaggggggcgggaggagggcggcgggggggggggggtgtgtatttaacacctcagtgagtccattcttgcacaccgagaaaatatgcgacagatgataagaagtttttctgaaccctttggaagagacttgctcagtatctctgatggtagagggagagctcataatcgtagaggacataatgatggtgaagattctttgactcatacagatgtcagctctttccagacaatggaccaaatggtgtcaaatatgagaaactatatgcagaaattagaaagaaacttcggtcaactttcagtggatccaaatggacattcattttgttcttcctcagttatgacttattccaaaataggagatgaaccgccaaaggtttttcaggcctcaactcaaactcgtcgagctccaggaggaataaaggaaaccaggaaagcaatgagagattctgacagtggactagaaaaaatggctattggtcatcatatccatgaccgagctcatgtcattaaaaagtcaaagaacaagaagactggagatgaagaggtcaaccaggagttcatcaatatgaatgaaagtgatgctcatgcttttgatgaggagtggcaaagtgaggttttgaagtacaaaccaggacgacacaatctaggaaacactagaatgagaagtgttggccatgagaatcctggctcccgagaacttaaaagaagggagaaacctcaacaaagtccagccattgaacatggaaggagatcaaatgttttgggggacaaactccacatcaaaggctcatctgtgaaaagcaacaaaaaataaatagccatgcatttga

SEQ ID NO: 156484 - DNA, 653 bp, Homo sapiens
  Payload ID: 10680
  Gene Symbol: MLF1
  Gene Name: myeloid leukemia factor 1
  ENST ID: ENST00000466246
  CDS Start-End: 41-653
caatctgtccgcggctgccgccacccaagacagagccagaatgttcaggatgctgaacagcagttttgaggatgaccccttcttctctgagtccattcttgcacaccgagaaaatatgcgacagatgataagaagtttttctgaaccctttggaagagacttgctcagtatctctgatggtagagggagagctcataatcgtagaggacataatgatggtgaagattctttgactgcaacgagttgttctcttgtgccttttggcgattttggtggtatgcatacagatgtcagctctttccagacaatggaccaaatggtgtcaaatatgagaaactatatgcagaaattagaaagaaacttcggtcaactttcagtggatccaaatggacattcattttgttcttcctcagttatgacttattccaaaataggagatgaaccgccaaaggtttttcaggcctcaactcaaactcgtcgagctccaggaggaataaaggaaaccaggaaagcaatgagagattctgacagtggactagaaaaaatggctattggtcatcatatccatgaccgagctcatgtcattaaaaagtcaaagaacaagaagactggagatgaagaggtcaaccaggagttcatcaatatgaatgaaa

SEQ ID NO: 156485 - DNA, 1372 bp, Homo sapiens
  Payload ID: 10680
  Gene Symbol: MLF1
  Gene Name: myeloid leukemia factor 1
  Uniprot ID: P58340
  ENST ID: ENST00000478894
  CDS Start-End: 397-1173
gtttttccaatctgtccgcggctgccgccacccaagacagagccagaatgttcaggatgctgaacagcagttttgaggatgaccccttcttctcagaccatgcaagcaagaagagaatggcatgaaatatataaagtgttgagaggaaaaaaacccactgacctagaattctgtatcctgcaaaattatcctttaaaagtcaagaagaaatagactgtctcagacaaacaaaaatttggtgaatttgttgacagtagacctgccttgcaagaaatgttaaaagaagttcttcagagagaaggaaaatcatacaagtcagaaactctgatgtacattaaaaaagcaagagcatcagagaataagttaagtgagtccattcttgcacaccgagaaaatatgcgacagatgataagaagtttttctgaaccctttggaagagacttgctcagtatctctgatggtagagggagagctcataatcgtagaggacataatgatggtgaagattctttgactgcaacgagttgttctcttgtgccttttggcgattttggtggtatgcatacagatgtcagctctttccagacaatggaccaaatggtgtcaaatatgagaaactatatgcagaaattagaaagaaacttcggtcaactttcagtggatccaaatggacattcattttgttcttcctcagttatgacttattccaaaataggagatgaaccgccaaaggtttttcaggcctcaactcaaactcgtcgagctccaggaggaataaaggaaaccaggaaagcaatgagagattctgacagtggactagaaaaaatggctattggtcatcatatccatgaccgagctcatgtcattaaaaagtcaaagaacaagaagactggagatgaagaggtcaaccaggagttcatcaatatgaatgaaagtgatgctcatgcttttgatgaggagtggcaaagtgaggttttgaagtacaaaccaggacgacacaatctaggaaacactagaatgagaagtgttggccatgagaatcctggctcccgagaacttaaaagaagggagaaacctcaacaaagtccagccattgaacatggaaggagatcaaatgttttgggggacaaactccacatcaaaggctcatctgtgaaaagcaacaaaaaataaatagccatgcatttgatttgtttagttttgattgttttaacagttagtaatggtgctgggtaataagcataagaccaatctcttgctgttaaatcagttctgtccttggcaactttcttctgatatctgaatgttcatgaaggtcctagctttatattgtccctcttttaggaataaaattttgattttcaacaatgtg

SEQ ID NO: 156486 - DNA, 1247 bp, Homo sapiens
  Payload ID: 10680
  Gene Symbol: MLF1
  Gene Name: myeloid leukemia factor 1
  Uniprot ID: P58340
  ENST ID: ENST00000484955
  CDS Start-End: 321-1052
gggcaccgcctgcgccgcggcgagtgaggcgtcgtccgtactggaggctagctcttgtcgcggccgcggcgagttaacatcgtttttccaatctgtccgcggctgccgccacccaagacagagccagaatgttcaggatgctgaacagcagttttgaggatgaccccttcttctcgtgagttacgggagccaggagtccggggtcgcgcgggaattaagacatacaggtggtcttactctgcagcagctgaaactgaagcacaagaagcccttggaactatcatcaggacattgagtccattcttgcacaccgagaaaatatgcgacagatgataagaagtttttctgaaccctttggaagagacttgctcagtatctctgatggtagagggagagctcataatcgtagaggacataatgatggtgaagattctttgactcatacagatgtcagctctttccagacaatggaccaaatggtgtcaaatatgagaaactatatgcagaaattagaaagaaacttcggtcaactttcagtggatccaaatggacattcattttgttcttcctcagttatgacttattccaaaataggagatgaaccgccaaaggtttttcaggcctcaactcaaactcgtcgagctccaggaggaataaaggaaaccaggaaagcaatgagagattctgacagtggactagaaaaaatggctattggtcatcatatccatgaccgagctcatgtcattaaaaagtcaaagaacaagaagactggagatgaagaggtcaaccaggagttcatcaatatgaatgaaagtgatgctcatgcttttgatgaggagtggcaaagtgaggttttgaagtacaaaccaggacgacacaatctaggaaacactagaatgagaagtgttggccatgagaatcctggctcccgagaacttaaaagaagggagaaacctcaacaaagtccagccattgaacatggaaggagatcaaatgttttgggggacaaactccacatcaaaggctcatctgtgaaaagcaacaaaaaataaatagccatgcatttgatttgtttagttttgattgttttaacagttagtaatggtgctgggtaataagcataagaccaatctcttgctgttaaatcagttctgtccttggcaactttcttctgatatctgaatgttcatgaaggtcctagctttatattgtccctcttttaggaataaaattttgattttcaacaa

SEQ ID NO: 156487 - DNA, 1098 bp, Homo sapiens
  Payload ID: 10680
  Gene Symbol: MLF1
  Gene Name: myeloid leukemia factor 1
  Uniprot ID: P58340
  ENST ID: ENST00000469452
  CDS Start-End: 299-901
agtgaggcgtcgtccgtactggaggctagctcttgtcgcggccgcggcgagttaacatcgtttttccaatctgtccgcggctgccgccacccaagacagagccagaatgttcaggatgctgaacagcagttttgaggatgaccccttcttctcgtgagttacgggagccaggagtccggggtcgcgcgggaattaagacatacaggtggtcttactctgcagcagctgaaactgaagcacaagaagcccttggaactatcatcaggacattgagtccattcttgcacaccgagaaaatatgcgacagatgataagaagtttttctgaaccctttggaagagacttgctcagtatctctgatggtagagggagagctcataatcgtagaggacataatgatggtgaagattctttgactcatacagatgtcagctctttccagacaatggaccaaatggtgtcaaatatgagaaactatatgcagaaattagaaagaaacttcataaaggaaaccaggaaagcaatgagagattctgacagtggactagaaaaaatggctattggtcatcatatccatgaccgagctcatgtcattaaaaagtcaaagaacaagaagactggagatgaagaggtcaaccaggagttcatcaatatgaatgaaagtgatgctcatgcttttgatgaggagtggcaaagtgaggttttgaagtacaaaccaggacgacacaatctaggaaacactagaatgagaagtgttggccatgagaatcctggctcccgagaacttaaaagaagggagaaacctcaacaaagtccagccattgaacatggaaggagatcaaatgttttgggggacaaactccacatcaaaggctcatctgtgaaaagcaacaaaaaataaatagccatgcatttgatttgtttagttttgattgttttaacagttagtaatggtgctgggtaataagcataagaccaatctcttgctgttaaatcagttctgtccttggcaactttcttctgatatctgaatgttcatgaaggtcctagctttatattgtccctcttttaggaataaaattttgattttcaacaatg

SEQ ID NO: 156488 - DNA, 473 bp, Homo sapiens
  Payload ID: 10680
  Gene Symbol: MLF1
  Gene Name: myeloid leukemia factor 1
  ENST ID: ENST00000487838
  CDS Start-End: 41-163
caatctgtccgcggctgccgccacccaagacagagccagaatgttcaggatgctgaacagcagttttgaggatgaccccttcttctcacatacaggtggtcttactctgcagcagctgaaactgaagcacaagaagcccttggaactatcatcaggacattgagtccattcttgcacaccgagaaaatatgcgacagatgataagaagtttttctgaaccctttggaagagacttgctcagtatctctgatggtagagggagagctcataatcgtagaggacataatgatggtgaagattctttgactcatacagatgtcagctctttccagacaatggaccaaatggtgtcaaatatgagaaactatatgcagaaattagaaagaaacttcggtcaactttcagtggatccaaatggacattcattttgttcttcctcagttatgacttattccaaaataggagatgaaccg

SEQ ID NO: 156489 - DNA, 707 bp, Homo sapiens
  Payload ID: 10680
  Gene Symbol: MLF1
  Gene Name: myeloid leukemia factor 1
  ENST ID: ENST00000498592
  CDS Start-End: 142-707
ggcgagtgaggcgtcgtccgtactggaggctagctcttgtcgcggccgcggcgagttaacatcgtttttccaatctgtccgcggctgccgccacccaagacagagccagaatgttcaggatgctgaacagcagttttgaggatgaccccttcttctcgtgagttacgggagccaggagtccggggtcgcgcgggaattaagcatacagatgtcagctctttccagacaatggaccaaatggtgtcaaatatgagaaactatatgcagaaattagaaagaaacttcggtcaactttcagtggatccaaatggacattcattttgttcttcctcagttatgacttattccaaaataggagatgaaccgccaaaggtttttcaggcctcaactcaaactcgtcgagctccaggaggaataaaggaaaccaggaaagcaatgagagattctgacagtggactagaaaaaatggctattggtcatcatatccatgaccgagctcatgtcattaaaaagtcaaagaacaagaagactggagatgaagaggtcaaccaggagttcatcaatatgaatgaaagtgatgctcatgcttttgatgaggagtggcaaagtgaggttttgaagtacaaaccaggacgacacaatctaggaaacactagaatgagaagtgttggccatgagaatcctggctcccgagaacttaaaagaag

SEQ ID NO: 156490 - DNA, 750 bp, Homo sapiens
  Payload ID: 10680
  Gene Symbol: MLF1
  Gene Name: myeloid leukemia factor 1
  ENST ID: ENST00000477042
  CDS Start-End: 227-750
gagtgaggcgtcgtccgtactggaggctagctcttgtcgcggccgcggcgagttaacatcgtttttccaatctgtccgcggctgccgccacccaagacagagccagaatgttcaggatgctgaacagcagttttgaggatgaccccttcttctcgtgagttacgggagccaggagtccggggtcgcgcgggaattaagtgagtccattcttgcacaccgagaaaatatgcgacagatgataagaagtttttctgaaccctttggaagagacttgctcagtatctctgatggtagagggagagctcataatcgtagaggacataatgatggtgaagattctttgactgcaacgagttgttctcttgtgccttttggcgattttggtggtatgcatacagatgtcagctctttccagacaatggaccaaatggtgtcaaatatgagaaactatatgcagaaattagaaagaaacttcggtcaactttcagtggatccaaatggacattcattttgttcttcctcagttatgacttattccaaaataggagatgaaccgccaaaggtttttcaggcctcaactcaaactcgtcgagctccaggaggaataaaggaaaccaggaaagcaatgagagattctgacagtggactagaaaaaatggctattggtcatcatatccatgaccgagctcatgtcattaaaaagtcaaagaacaagaagactggagatgaagaggtcaaccaggagttcat

SEQ ID NO: 156491 - DNA, 742 bp, Homo sapiens
  Payload ID: 10680
  Gene Symbol: MLF1
  Gene Name: myeloid leukemia factor 1
  ENST ID: ENST00000495452
  CDS Start-End: 108-260
gagtgaggcgtcgtccgtactggaggctagctcttgtcgcggccgcggcgagttaacatcgtttttccaatctgtccgcggctgccgccacccaagacagagccagaatgttcaggatgctgaacagcagttttgaggatgaccccttcttctcgtggtcttactctgcagcagctgaaactgaagcacaagaagcccttggaactatcatcaggacattgagtccattcttgcacaccgagaaaatatgcgacagatgataagaagtttttctgaaccctttggaagagacttgctcagtatctctgatggtagagggagagctcataatcgtagaggacataatgatggtgaagattctttgactcatacagatgtcagctctttccagacaatggaccaaatggtgtcaaatatgagaaactatatgcagaaattagaaagaaacttcggtcaactttcagtggatccaaatggacattcattttgttcttcctcagttatgacttattccaaaataggagatgaaccgccaaaggtttttcaggcctcaactcaaactcgtcgagctccaggaggaataaaggaaaccaggaaagcaatgagagattctgacagtggactagaaaaaatggctattggtcatcatatccatgaccgagctcatgtcattaaaaagtcaaagaacaagaagactggagatgaagaggtcaaccaggagttcatcaatatgaatgaaagt

SEQ ID NO: 156492 - DNA, 1266 bp, Homo sapiens
  Payload ID: 10680
  Gene Symbol: MLF1
  Gene Name: myeloid leukemia factor 1
  Uniprot ID: P58340
  ENST ID: ENST00000471745
  CDS Start-End: 300-1076
gagtgaggcgtcgtccgtactggaggctagctcttgtcgcggccgcggcgagttaacatcgtttttccaatctgtccgcggctgccgccacccaagacagagccagaatgttcaggatgctgaacagcagttttgaggatgaccccttcttctcgtgagttacgggagccaggagtccggggtcgcgcgggaattaagacatacaggtggtcttactctgcagcagctgaaactgaagcacaagaagcccttggaactatcatcaggacattgagtccattcttgcacaccgagaaaatatgcgacagatgataagaagtttttctgaaccctttggaagagacttgctcagtatctctgatggtagagggagagctcataatcgtagaggacataatgatggtgaagattctttgactgcaacgagttgttctcttgtgccttttggcgattttggtggtatgcatacagatgtcagctctttccagacaatggaccaaatggtgtcaaatatgagaaactatatgcagaaattagaaagaaacttcggtcaactttcagtggatccaaatggacattcattttgttcttcctcagttatgacttattccaaaataggagatgaaccgccaaaggtttttcaggcctcaactcaaactcgtcgagctccaggaggaataaaggaaaccaggaaagcaatgagagattctgacagtggactagaaaaaatggctattggtcatcatatccatgaccgagctcatgtcattaaaaagtcaaagaacaagaagactggagatgaagaggtcaaccaggagttcatcaatatgaatgaaagtgatgctcatgcttttgatgaggagtggcaaagtgaggttttgaagtacaaaccaggacgacacaatctaggaaacactagaatgagaagtgttggccatgagaatcctggctcccgagaacttaaaagaagggagaaacctcaacaaagtccagccattgaacatggaaggagatcaaatgttttgggggacaaactccacatcaaaggctcatctgtgaaaagcaacaaaaaataaatagccatgcatttgatttgtttagttttgattgttttaacagttagtaatggtgctgggtaataagcataagaccaatctcttgctgttaaatcagttctgtccttggcaactttcttctgatatctgaatgttcatgaaggtcctagctttatattgtccctcttttaggaataaaattttgattttc

SEQ ID NO: 156493 - DNA, 787 bp, Homo sapiens
  Payload ID: 10680
  Gene Symbol: MLF1
  Gene Name: myeloid leukemia factor 1
  ENST ID: ENST00000491767
  CDS Start-End: 213-787
ctatcccggcgggcaccgcctgcgccgcggcgagtgaggcgtcgtccgtactggaggctagctcttgtcgcggccgcggcgagttaacatcgtttttccaatctgtccgcggctgccgccacccaagacagagccagaatgttcaggatgctgaacagcagttttgaggatgaccccttcttctccatacagatgtcagctctttccagacaatggaccaaatggtgtcaaatatgagaaactatatgcagaaattagaaagaaacttcggtcaactttcagtggatccaaatggacattcattttgttcttcctcagttatgacttattccaaaataggagatgaaccgccaaaggtttttcaggcctcaactcaaactcgtcgagctccaggaggaataaaggaaaccaggaaagcaatgagagattctgacagtggactagaaaaaatggctattggtcatcatatccatgaccgagctcatgtcattaaaaagtcaaagaacaagaagactggagatgaagaggtcaaccaggagttcatcaatatgaatgaaagtgatgctcatgcttttgatgaggagtggcaaagtgaggttttgaagtacaaaccaggacgacacaatctaggaaacactagaatgagaagtgttggccatgagaatcctggctcccgagaacttaaaagaagggagaaacctcaacaaagtccagccattgaacatggaaggagatcaaatgttttgggggacaaactccacatcaaaggctcatctgtgaaaagcaa

SEQ ID NO: 156494 - DNA, 2290 bp, Homo sapiens
  Payload ID: 10680
  Gene Symbol: MLF1
  Gene Name: myeloid leukemia factor 1
  Uniprot ID: P58340
  ENST ID: ENST00000619577
  CDS Start-End: 257-1033
tatcccggcgggcaccgcctgcgccgcggcgagtgaggcgtcgtccgtactggaggctagctcttgtcgcggccgcggcgagttaacatcgtttttccaatctgtccgcggctgccgccacccaagacagagccagaatgttcaggatgctgaacagcagttttgaggatgaccccttcttctcgtgagttacgggagccaggagtccggggtcgcgcgggaattaagtgagtccattcttgcacaccgagaaaatatgcgacagatgataagaagtttttctgaaccctttggaagagacttgctcagtatctctgatggtagagggagagctcataatcgtagaggacataatgatggtgaagattctttgactgcaacgagttgttctcttgtgccttttggcgattttggtggtatgcatacagatgtcagctctttccagacaatggaccaaatggtgtcaaatatgagaaactatatgcagaaattagaaagaaacttcggtcaactttcagtggatccaaatggacattcattttgttcttcctcagttatgacttattccaaaataggagatgaaccgccaaaggtttttcaggcctcaactcaaactcgtcgagctccaggaggaataaaggaaaccaggaaagcaatgagagattctgacagtggactagaaaaaatggctattggtcatcatatccatgaccgagctcatgtcattaaaaagtcaaagaacaagaagactggagatgaagaggtcaaccaggagttcatcaatatgaatgaaagtgatgctcatgcttttgatgaggagtggcaaagtgaggttttgaagtacaaaccaggacgacacaatctaggaaacactagaatgagaagtgttggccatgagaatcctggctcccgagaacttaaaagaagggagaaacctcaacaaagtccagccattgaacatggaaggagatcaaatgttttgggggacaaactccacatcaaaggctcatctgtgaaaagcaacaaaaaataaatagccatgcatttgatttgtttagttttgattgttttaacagttagtaatggtgctgggtaataagcataagaccaatctcttgctgttaaatcagttctgtccttggcaactttcttctgatatctgaatgttcatgaaggtcctagctttatattgtccctcttttaggaataaaattttgattttcaacaatgtgagtaaattgagtctatttaatgtaaaactctttaaaacatactaattttttaaagcttatatgcttatttcgcttccccagttgtttttgtgttggctaaatattcttttatatttatcaagattgattgcagagcagttctatcacttataattagttataagaaattataatgttaaaaaagtctcagtttttactaacactgtactagggtgatattaataaaggtttaaataatttatctctaattttataatgtgttgtaaagccaactagcttaaaactttaaaaataataaagcaaaactacactagtactcttttatgagaaaatagttactattttgataaagggcaaggataatcaaatagttcattttcagagaaaaatattttaaattgctaatgtacatgattgttttggttataatttatttatagaatgtatcttttctatattacattcttaatattcaccagatattatattgaccattctctttaacttcttaatgtggcatatttctactctcctttcccacaaacagcttcatctgtctccaaggttaacattctgaagctggagagtccttggagaaactctgctcagcttttttgtgacatttagaaaaatgcatttggtattctccaaaccagaatgatacattgtctcaaaatctgttagacagctgatgggtgtttttgagcaacgtcttaataattcagttgtttctgttttaattataccattaaaaatcagctttagctttttaattctagaatttaagcatcagtctgttcttataaaagttaggtttgaagtttataagaatataaaatcttaactcacatttgttgtttaatatttctgtcaaggaaaaaagcccccaaaaattgctatcactctataatcctaagtatttttcttttcaattttgtaagtaaaattatatgactatgttcatacttctctaattttttatataatatttttgttaattttactagtttgtgttttatgcctttagtcattaaaataaaatgcaaatgtgttaattc

SEQ ID NO: 156495 - DNA, 2116 bp, Homo sapiens
  Payload ID: 10680
  Gene Symbol: MLF1
  Gene Name: myeloid leukemia factor 1
  Uniprot ID: P58340
  ENST ID: ENST00000618075
  CDS Start-End: 257-859
tatcccggcgggcaccgcctgcgccgcggcgagtgaggcgtcgtccgtactggaggctagctcttgtcgcggccgcggcgagttaacatcgtttttccaatctgtccgcggctgccgccacccaagacagagccagaatgttcaggatgctgaacagcagttttgaggatgaccccttcttctcgtgagttacgggagccaggagtccggggtcgcgcgggaattaagtgagtccattcttgcacaccgagaaaatatgcgacagatgataagaagtttttctgaaccctttggaagagacttgctcagtatctctgatggtagagggagagctcataatcgtagaggacataatgatggtgaagattctttgactcatacagatgtcagctctttccagacaatggaccaaatggtgtcaaatatgagaaactatatgcagaaattagaaagaaacttcataaaggaaaccaggaaagcaatgagagattctgacagtggactagaaaaaatggctattggtcatcatatccatgaccgagctcatgtcattaaaaagtcaaagaacaagaagactggagatgaagaggtcaaccaggagttcatcaatatgaatgaaagtgatgctcatgcttttgatgaggagtggcaaagtgaggttttgaagtacaaaccaggacgacacaatctaggaaacactagaatgagaagtgttggccatgagaatcctggctcccgagaacttaaaagaagggagaaacctcaacaaagtccagccattgaacatggaaggagatcaaatgttttgggggacaaactccacatcaaaggctcatctgtgaaaagcaacaaaaaataaatagccatgcatttgatttgtttagttttgattgttttaacagttagtaatggtgctgggtaataagcataagaccaatctcttgctgttaaatcagttctgtccttggcaactttcttctgatatctgaatgttcatgaaggtcctagctttatattgtccctcttttaggaataaaattttgattttcaacaatgtgagtaaattgagtctatttaatgtaaaactctttaaaacatactaattttttaaagcttatatgcttatttcgcttccccagttgtttttgtgttggctaaatattcttttatatttatcaagattgattgcagagcagttctatcacttataattagttataagaaattataatgttaaaaaagtctcagtttttactaacactgtactagggtgatattaataaaggtttaaataatttatctctaattttataatgtgttgtaaagccaactagcttaaaactttaaaaataataaagcaaaactacactagtactcttttatgagaaaatagttactattttgataaagggcaaggataatcaaatagttcattttcagagaaaaatattttaaattgctaatgtacatgattgttttggttataatttatttatagaatgtatcttttctatattacattcttaatattcaccagatattatattgaccattctctttaacttcttaatgtggcatatttctactctcctttcccacaaacagcttcatctgtctccaaggttaacattctgaagctggagagtccttggagaaactctgctcagcttttttgtgacatttagaaaaatgcatttggtattctccaaaccagaatgatacattgtctcaaaatctgttagacagctgatgggtgtttttgagcaacgtcttaataattcagttgtttctgttttaattataccattaaaaatcagctttagctttttaattctagaatttaagcatcagtctgttcttataaaagttaggtttgaagtttataagaatataaaatcttaactcacatttgttgtttaatatttctgtcaaggaaaaaagcccccaaaaattgctatcactctataatcctaagtatttttcttttcaattttgtaagtaaaattatatgactatgttcatacttctctaattttttatataatatttttgttaattttactagtttgtgttttatgcctttagtcattaaaataaaatgcaaatgtgttaattc

SEQ ID NO: 156496 - DNA, 1969 bp, Homo sapiens
  Payload ID: 10681
  Gene Symbol: MLF2
  Gene Name: myeloid leukemia factor 2
  Uniprot ID: Q15773
  ENST ID: ENST00000203630
  CDS Start-End: 646-1392
aaagctccccccagggatccgccccgcctcgtcgcccacagagcgcccgcctctccccaaggggcatctgcccctcgtcctccagtttccccttgaggagggagagagaacgtgctgcactgcgcccccaggttcaacctccaacccggtccctcccgaagaatggattcctcttctccttctcctcccctgccttatgggagcctcttccagtccacagaacccaaatcgaggttactaatgagctccccttcttcgtgcccaggggacccctctcggcctcaggctctgctcccctgagcttggcccatggccccggcgcccctgggactcggccccagccatctcaccacccgcgccagggggcggggctcccacggcccggccccgggtgggcgggtctatcgtgacgtcacttccgcccgggcctggccgaggttcgggctccgttggccgagggggccgtacggaggtggcagctgtgggaggaggcggcgtggaaggccgaggagctcaagcccggaccaatccccacgttccgggccgcgaccctgaccctgcagcgtaccgggaagcgaaaccggccggatgggccgctgagcccgaatcgggcactgtgtggagccccctggagctgagatcaggatgttccgcttcatgagggacgtggagcctgaggatcccatgttcctgatggatccctttgctattcaccgtcagcatatgagccgtatgttgtcaggtggctttggatatagccccttcctcagcatcacagatggcaacatgccagggaccaggcctgccagccgccggatgcagcaggctggagctgtctccccctttgggatgctgggaatgtcgggtggtttcatggacatgtttgggatgatgaatgacatgattggaaacatggaacacatgacagctggaggcaattgccagaccttctcatcttccactgtcatctcctactccaatacgggtgatggtgcccccaaggtctaccaagagacatcagagatgcgctcggcaccaggcgggatccgggagacacggaggactgttcgggattcagacagtggactggagcagatgtccattgggcatcacatccgggacagggctcacatcctccagcgctcccgaaaccatcgcacgggggaccaggaggagcggcaggactatatcaacctggatgagagtgaggccgcagcgtttgatgacgagtggcggcgggagacctcccgattccggcagcagcgtcccctggagtttcggcggcttgagtcctcaggggctgggggacgaagggcggaggggcctccccgcctggccatccagggacctgaggactccccttcccgacagtcccgccgctatgactggtgagggccccgggccctcagcctctcttgtacaggctgagaggctgagaaatcatcccctgaataactttttcctctcgattcccatccccaatttaatattaaattaacaggcaagccggcccccacctctccctgggggtctcagggagaacctttcacggcaccctttccctaccttttccttctttaatctcctggtttaccattgatgacttcgcctctgcatctactgacttgatttttcattctgccactccatcttcaaaccccctcacctttcccatcctactcctgccatgcattgaagggtcaatgcattttggggtgagctctgggtttaggggccccctccatccctcagctaccctggatctttgcccacctcttcctcagagcccccactgaggggccgtagccctatctagggctgtggaaggagcagactggttcctaactctctccctcctcctgcccacacacatcaaaagaatcttccctacacccttctctgcctttattttttgatttgtgcaacttgtaactaggtgtttatggaataaaggagaatggaaaaaaga

SEQ ID NO: 156497 - DNA, 1379 bp, Homo sapiens
  Payload ID: 10681
  Gene Symbol: MLF2
  Gene Name: myeloid leukemia factor 2
  Uniprot ID: Q15773
  ENST ID: ENST00000435120
  CDS Start-End: 64-810
agccccggacgggagcgggcccacggggctgcaggtgtggagccccctggagctgagatcaggatgttccgcttcatgagggacgtggagcctgaggatcccatgttcctgatggatccctttgctattcaccgtcagcatatgagccgtatgttgtcaggtggctttggatatagccccttcctcagcatcacagatggcaacatgccagggaccaggcctgccagccgccggatgcagcaggctggagctgtctccccctttgggatgctgggaatgtcgggtggtttcatggacatgtttgggatgatgaatgacatgattggaaacatggaacacatgacagctggaggcaattgccagaccttctcatcttccactgtcatctcctactccaatacgggtgatggtgcccccaaggtctaccaagagacatcagagatgcgctcggcaccaggcgggatccgggagacacggaggactgttcgggattcagacagtggactggagcagatgtccattgggcatcacatccgggacagggctcacatcctccagcgctcccgaaaccatcgcacgggggaccaggaggagcggcaggactatatcaacctggatgagagtgaggccgcagcgtttgatgacgagtggcggcgggagacctcccgattccggcagcagcgtcccctggagtttcggcggcttgagtcctcaggggctgggggacgaagggcggaggggcctccccgcctggccatccagggacctgaggactccccttcccgacagtcccgccgctatgactggtgagggccccgggccctcagcctctcttgtacaggctgagaggctgagaaatcatcccctgaataactttttcctctcgattcccatccccaatttaatattaaattaacaggcaagccggcccccacctctccctgggggtctcagggagaacctttcacggcaccctttccctaccttttccttctttaatctcctggtttaccattgatgacttcgcctctgcatctactgacttgatttttcattctgccactccatcttcaaaccccctcacctttcccatcctactcctgccatgcattgaagggtcaatgcattttggggtgagctctgggtttaggggccccctccatccctcagctaccctggatctttgcccacctcttcctcagagcccccactgaggggccgtagccctatctagggctgtggaaggagcagactggttcctaactctctccctcctcctgcccacacacatcaaaagaatcttccctacacccttctctgcctttattttttgatttgtgcaacttgtaactaggtgtttatggaataaaggagaatgg

SEQ ID NO: 156498 - DNA, 838 bp, Homo sapiens
  Payload ID: 10681
  Gene Symbol: MLF2
  Gene Name: myeloid leukemia factor 2
  Uniprot ID: Q15773
  ENST ID: ENST00000542154
  CDS Start-End: 64-810
agccccggacgggagcgggcccacggggctgcaggtgtggagccccctggagctgagatcaggatgttccgcttcatgagggacgtggagcctgaggatcccatgttcctgatggatccctttgctattcaccgtcagcatatgagccgtatgttgtcaggtggctttggatatagccccttcctcagcatcacagatggcaacatgccagggaccaggcctgccagccgccggatgcagcaggctggagctgtctccccctttgggatgctgggaatgtcgggtggtttcatggacatgtttgggatgatgaatgacatgattggaaacatggaacacatgacagctggaggcaattgccagaccttctcatcttccactgtcatctcctactccaatacgggtgatggtgcccccaaggtctaccaagagacatcagagatgcgctcggcaccaggcgggatccgggagacacggaggactgttcgggattcagacagtggactggagcagatgtccattgggcatcacatccgggacagggctcacatcctccagcgctcccgaaaccatcgcacgggggaccaggaggagcggcaggactatatcaacctggatgagagtgaggccgcagcgtttgatgacgagtggcggcgggagacctcccgattccggcagcagcgtcccctggagtttcggcggcttgagtcctcaggggctgggggacgaagggcggaggggcctccccgcctggccatccagggacctgaggactccccttcccgacagtcccgccgctatgactggtgagggccccgggccctcagcctctcttgta

SEQ ID NO: 156499 - DNA, 851 bp, Homo sapiens
  Payload ID: 10681
  Gene Symbol: MLF2
  Gene Name: myeloid leukemia factor 2
  ENST ID: ENST00000537126
  CDS Start-End: 160-851
aggaggcggcgtggaaggccgaggagctcaagcccggaccaatccccacgttccgggccgcgaccctgaccctgcagcgtaccgggaagcgaaaccggccggatgggccgctgagcccgaatcgggcactgtgtggagccccctggagctgagatcaggatgttccgcttcatgagggacgtggagcctgaggatcccatgttcctgatggatccctttgctattcaccgtcagcatatgagccgtatgttgtcaggtggctttggatatagccccttcctcagcatcacagatggcaacatgccagggaccaggcctgccagccgccggatgcagcaggctggagctgtctccccctttgggatgctgggaatgtcgggtggtttcatggacatgtttgggatgatgaatgacatgattggaaacatggaacacatgacagctggaggcaattgccagaccttctcatcttccactgtcatctcctactccaatacgggtgatggtgcccccaaggtctaccaagagacatcagagatgcgctcggcaccaggcggggtgagttggggagccctcctgtcccagagaagatccgggagacacggaggactgttcgggattcagacagtggactggagcagatgtccattgggcatcacatccgggacagggctcacatcctccagcgctcccgaaaccatcgcacgggggaccaggaggagcggcaggactatatcaacctggatgagagtgaggccgcagcgtttgatgacgagtggcggcgggagacctcccgattccggcagcagcgtcccctggagtttcggcggcttgagtcctcaggggctggg

SEQ ID NO: 156500 - DNA, 582 bp, Homo sapiens
  Payload ID: 10681
  Gene Symbol: MLF2
  Gene Name: myeloid leukemia factor 2
  ENST ID: ENST00000536207
  CDS Start-End: 345-582
catctagaacggtgtcgtcggcgggaggaggggagagtatgctaccggccagagctttgggaagaggatggctctgagtgggggagggaaaaaccgagagggttggaaaaattttccatggccctaattgagaaagaggtttgaagagcccttccctccctagagggttgtgtggaacacctggagtagggtctccctggagtttagggggtcagttacaggatttggaaaggacagtgctctgagagtccccacactgagtgggtgtgcaaaaccctggccacctccaagtatctgagcttccatatctttccagtgtggagccccctggagctgagatcaggatgttccgcttcatgagggacgtggagcctgaggatcccatgttcctgatggatccctttgctattcaccgtcagcatatgagccgtatgttgtcaggtggctttggatatagccccttcctcagcatcacagatggcaacatgccagggaccaggcctgccagccgccggatgcagcaggctggagctgtctccccctttgggatgctgggaatgtcgggtggtttcatggacatgt

SEQ ID NO: 156501 - DNA, 458 bp, Homo sapiens
  Payload ID: 10681
  Gene Symbol: MLF2
  Gene Name: myeloid leukemia factor 2
  ENST ID: ENST00000540710
  CDS Start-End: 95-458
atggggcggaggacctgcacttggcattctcatctagaacggtgtcgtcggcgggaggaggggagatgtggagccccctggagctgagatcaggatgttccgcttcatgagggacgtggagcctgaggatcccatgttcctgatggatccctttgctattcaccgtcagcatatgagccgtatgttgtcaggtggctttggatatagccccttcctcagcatcacagatggcaacatgccagggaccaggcctgccagccgccggatgcagcaggctggagctgtctccccctttgggatgctgggaatgtcgggtggtttcatggacatgtttgggatgatgaatgacatgattggaaacatggaacacatgacagctggaggcaattgccagaccttctcatcttccactgtcatctcctactccaatacgggtgatggtgcccccaaggtctacc

SEQ ID NO: 156502 - DNA, 1110 bp, Homo sapiens
  Payload ID: 10681
  Gene Symbol: MLF2
  Gene Name: myeloid leukemia factor 2
  Uniprot ID: Q15773
  ENST ID: ENST00000539187
  CDS Start-End: 364-1110
gcgaacggatggggccggggaagggagctgatgagggcgaggacagctcgacgcaatgccatgcaatgcccagcctcggctttttcgaaggctagtcctgccccgcttctaatttttaggaattcgagattctttcagtgtgtatgcgggaaggggacgatgaagagaaaagaaagctgaaagccagctgaggggagggaacgagaaaacagaggcggccgccgtccggggagagaagcgagcgacggtcgggccgcggggaggggcccggaggagcagcctccagggagagtcctgtttacacttgaggatctcaaaccgcttagcgaggaaagtgtggagccccctggagctgagatcaggatgttccgcttcatgagggacgtggagcctgaggatcccatgttcctgatggatccctttgctattcaccgtcagcatatgagccgtatgttgtcaggtggctttggatatagccccttcctcagcatcacagatggcaacatgccagggaccaggcctgccagccgccggatgcagcaggctggagctgtctccccctttgggatgctgggaatgtcgggtggtttcatggacatgtttgggatgatgaatgacatgattggaaacatggaacacatgacagctggaggcaattgccagaccttctcatcttccactgtcatctcctactccaatacgggtgatggtgcccccaaggtctaccaagagacatcagagatgcgctcggcaccaggcgggatccgggagacacggaggactgttcgggattcagacagtggactggagcagatgtccattgggcatcacatccgggacagggctcacatcctccagcgctcccgaaaccatcgcacgggggaccaggaggagcggcaggactatatcaacctggatgagagtgaggccgcagcgtttgatgacgagtggcggcgggagacctcccgattccggcagcagcgtcccctggagtttcggcggcttgagtcctcaggggctgggggacgaagggcggaggggcctccccgcctggccatccagggacctgaggactccccttcccgacagtcccgccgctatgactggtga

SEQ ID NO: 156503 - DNA, 2905 bp, Homo sapiens
  Payload ID: 10682
  Gene Symbol: MZF1
  Gene Name: myeloid zinc finger 1
  Uniprot ID: P28698
  ENST ID: ENST00000215057
  CDS Start-End: 562-2766
gcgcacgtacacacgaagggcctgctgactacatctgccggaaagcatcgggccaagcctttctccattttgcggtctaggaagtagcagaggccccttcctgtagggagttgccatggagacgcggtggggcaccgacggagttctaatgacggccgtgattggtgcaggatcctgctaatctcaggaaggcccgtagagaagtgaggaaaacgtggtggggggcatgcgcgatctggtaggcggtgctgccgtctgttgtacctgagaggcttgcgcatgccgacgcacggattcgaggcggggagcatgggaagaagcggccaggagtatgacctgatcattgcgaccaccgctaggggaagggaggagagggtgtagaaacggggacgagggtgggggaagggcaaggaggcgctcgagctggtgcgcggagcatcctgggagacgtagtccagcgggagggggaagtcgaagactgcgcgtgctcaggagcgcggagcggcccgctgagcgcagaggggcagacactggcctcagatacctgacctggtaccctctatgaggcctgcggtgctgggctccccagaccgagcacccccagaagatgaggggcctgtcatggtgaagctagaggactctgaggaggagggtgaggctgccttatgggacccaggccctgaagctgcacgcctgcgtttccggtgcttccgctatgaggaggccacagggccccaagaggccctggcccagctccgagagctgtgtcgccagtggctgcgtccagaggtacgctccaaggagcagatgctggagctgttggtgctggagcagttcctgggcgcactgccccctgagatccaggcccgtgtgcaggggcagcggccaggcagccccgaggaggctgctgccctagtagatgggctgcgccgggagccgggcggaccccggagatgggtcacagtccaggtgcagggccaggaggtcctatcagagaagatggagccctccagtttccagcccctacctgaaactgagcctccaactccagagcctgggcccaagacacctcctaggactatgcaggaatcaccactgggcctgcaggtgaaagaggagtcagaggttacagaggactcagatttcctggagtctgggcctctagctgccacccaggagtctgtacccaccctcctgcctgaggaggcccagagatgtgggaccgtgctggaccagatctttccccacagcaagactgggcctgagggtccctcatggagggagcaccccagggccctgtggcatgaggaagctgggggcatcttctccccagggttcgcgctgcagctaggcagcatctccgcaggtccaggtagtgtaagccctcacctccacgtcccctgggacctcggcatggctggcctttctggccagatccaatcaccctcccgcgaaggtggctttgcgcatgcgcttctgctccccagcgatctgaggagtgaacaggaccccacggacgaggatccctgccggggtgtgggccctgctctgatcaccacccgctggcgctcccccaggggccggagccggggccgccccagcactgggggcggggtggttaggggcggccgttgcgatgtatgtggcaaggtgttcagccaacgcagcaacctgctgaggcaccagaagatccacacgggtgagcgaccattcgtgtgcagcgagtgcggccgcagcttcagccgcagctcgcacctgctgcgccaccagcttacgcacaccgaggagcggccgttcgtgtgcggcgactgtggccagggcttcgtgcgcagcgcgcgcctggaagagcatcggagagtgcacacgggcgaacagcctttccgttgcgctgagtgcggccagagcttccggcagcgctccaatctgctgcagcaccagcgcatccacggcgatcccccgggccctggcgctaagcccccggcccctcctggtgcgcccgagcctcccggcccctttccgtgcagcgagtgccgcgagagcttcgcgcggcgcgccgtgctgctggagcaccaggcggtacacacgggcgacaagtcctttggctgcgtcgagtgcggcgagcgcttcggccgccgctcagtgctgctgcagcaccggcgcgtgcacagtggcgagcggcccttcgcctgtgccgagtgcggccagagcttccggcagcgctccaacctgacgcagcaccggcgcatccacaccggggagcggcccttcgcctgcgccgagtgtggcaaggccttccgccagcggcctacgctcacgcagcatctccgcgtacacacgggcgagaaaccctttgcctgccccgagtgtggccagcgcttcagccagcgcctcaagctcacgcgtcatcagaggacacacaccggcgaaaagccctaccactgcggtgagtgcggcctgggcttcacgcaggtctcgcggctcaccgagcaccagcgcatccacacgggcgaacggcccttcgcctgccccgagtgcggccagagctttcggcagcacgccaacctcacccagcaccggcgcatccacacgggtgaacggccctacgcatgccctgagtgtggcaaggccttccgccagcggcccacgctcacgcagcatctgcgcacccaccgacgagagaagcccttcgcctgccaggactgtggccgccgcttccaccagagcaccaagctcattcagcaccagcgcgtccacagcgccgagtagctccagccgggacgcactgtgtccgccatggtcagaacacctacctcccctggttattgtgaggctggcgattacataagtataagcaggtccgcccagggcttggctactgtaggtgtccaataaacagtagatggaa

SEQ ID NO: 156504 - DNA, 2385 bp, Homo sapiens
  Payload ID: 10682
  Gene Symbol: MZF1
  Gene Name: myeloid zinc finger 1
  Uniprot ID: P28698
  ENST ID: ENST00000594234
  CDS Start-End: 285-1157
gcatgccgacgcacggattcgaggcggggagcatgggaagaagcggccaggagtatgacctgatcattgcgaccaccgctaggggaagggaggagagggtgtagaaacggggacgagggtgggggaagggcaaggaggcgctcgagctggtgcgcggagcatcctgggagacgtagtccagcgggagggggaagtcgaagactgcgcgtgctcaggagcgcggagcggcccgctgagcgcagaggggcagacactggcctcagatacctgacctggtaccctctatgaggcctgcggtgctgggctccccagaccgagcacccccagaagatgaggggcctgtcatggtgaagctagaggactctgaggaggagggtgaggctgccttatgggacccaggccctgaagctgcacgcctgcgtttccggtgcttccgctatgaggaggccacagggccccaagaggccctggcccagctccgagagctgtgtcgccagtggctgcgtccagaggtacgctccaaggagcagatgctggagctgttggtgctggagcagttcctgggcgcactgccccctgagatccaggcccgtgtgcaggggcagcggccaggcagccccgaggaggctgctgccctagtagatgggctgcgccgggagccgggcggaccccggagatgggtcacagtccaggtgcagggccaggaggtcctatcagagaagatggagccctccagtttccagcccctacctgaaactgagcctccaactccagagcctgggcccaagacacctcctaggactatgcaggaatcaccactgggcctgcaggtgaaagaggagtcagaggttacagaggactcagatttcctggagtctgggcctctagctgccacccaggagtctgtacccaccctcctgcctgaggaggcccagagatgtgggaccgtgctggaccagatctttccccacagcaagactgggcctgagggtccctcatggagggagcaccccagggccctgtggcatgaggaagctgggggcatcttctccccaggggccggagccggggccgccccagcactgggggcggggtggttaggggcggccgttgcgatgtatgtggcaaggtgttcagccaacgcagcaacctgctgaggcaccagaagatccacacgggtgagcgaccattcgtgtgcagcgagtgcggccgcagcttcagccgcagctcgcacctgctgcgccaccagcttacgcacaccgaggagcggccgttcgtgtgcggcgactgtggccagggcttcgtgcgcagcgcgcgcctggaagagcatcggagagtgcacacgggcgaacagcctttccgttgcgctgagtgcggccagagcttccggcagcgctccaatctgctgcagcaccagcgcatccacggcgatcccccgggccctggcgctaagcccccggcccctcctggtgcgcccgagcctcccggcccctttccgtgcagcgagtgccgcgagagcttcgcgcggcgcgccgtgctgctggagcaccaggcggtacacacgggcgacaagtcctttggctgcgtcgagtgcggcgagcgcttcggccgccgctcagtgctgctgcagcaccggcgcgtgcacagtggcgagcggcccttcgcctgtgccgagtgcggccagagcttccggcagcgctccaacctgacgcagcaccggcgcatccacaccggggagcggcccttcgcctgcgccgagtgtggcaaggccttccgccagcggcctacgctcacgcagcatctccgcgtacacacgggcgagaaaccctttgcctgccccgagtgtggccagcgcttcagccagcgcctcaagctcacgcgtcatcagaggacacacaccggcgaaaagccctaccactgcggtgagtgcggcctgggcttcacgcaggtctcgcggctcaccgagcaccagcgcatccacacgggcgaacggcccttcgcctgccccgagtgcggccagagctttcggcagcacgccaacctcacccagcaccggcgcatccacacgggtgaacggccctacgcatgccctgagtgtggcaaggccttccgccagcggcccacgctcacgcagcatctgcgcacccaccgacgagagaagcccttcgcctgccaggactgtggccgccgcttccaccagagcaccaagctcattcagcaccagcgcgtccacagcgccgagtagctccagccgggacgcactgtgtccgccatggtcagaacacctacctcccctggttattgtgaggctggcgattacataagtataagcaggtccgcccagggcttggctactgtaggtgtccaataaacagtagatggaaa

SEQ ID NO: 156505 - DNA, 2587 bp, Homo sapiens
  Payload ID: 10682
  Gene Symbol: MZF1
  Gene Name: myeloid zinc finger 1
  Uniprot ID: P28698
  ENST ID: ENST00000599369
  CDS Start-End: 244-2448
gcgcacgtacacacgaagggcctgctgactacatctgccggaaagcatcgggccaagcctttctccattttgcggtctaggaagtagcagaggccccttcctgtagggagttgccatggagacgcggtggggcaccgacggagttctaatgacggccgtgattggtgcaggatcctgctaatctcaggaaggcccgtagagaagggcagacactggcctcagatacctgacctggtaccctctatgaggcctgcggtgctgggctccccagaccgagcacccccagaagatgaggggcctgtcatggtgaagctagaggactctgaggaggagggtgaggctgccttatgggacccaggccctgaagctgcacgcctgcgtttccggtgcttccgctatgaggaggccacagggccccaagaggccctggcccagctccgagagctgtgtcgccagtggctgcgtccagaggtacgctccaaggagcagatgctggagctgttggtgctggagcagttcctgggcgcactgccccctgagatccaggcccgtgtgcaggggcagcggccaggcagccccgaggaggctgctgccctagtagatgggctgcgccgggagccgggcggaccccggagatgggtcacagtccaggtgcagggccaggaggtcctatcagagaagatggagccctccagtttccagcccctacctgaaactgagcctccaactccagagcctgggcccaagacacctcctaggactatgcaggaatcaccactgggcctgcaggtgaaagaggagtcagaggttacagaggactcagatttcctggagtctgggcctctagctgccacccaggagtctgtacccaccctcctgcctgaggaggcccagagatgtgggaccgtgctggaccagatctttccccacagcaagactgggcctgagggtccctcatggagggagcaccccagggccctgtggcatgaggaagctgggggcatcttctccccagggttcgcgctgcagctaggcagcatctccgcaggtccaggtagtgtaagccctcacctccacgtcccctgggacctcggcatggctggcctttctggccagatccaatcaccctcccgcgaaggtggctttgcgcatgcgcttctgctccccagcgatctgaggagtgaacaggaccccacggacgaggatccctgccggggtgtgggccctgctctgatcaccacccgctggcgctcccccaggggccggagccggggccgccccagcactgggggcggggtggttaggggcggccgttgcgatgtatgtggcaaggtgttcagccaacgcagcaacctgctgaggcaccagaagatccacacgggtgagcgaccattcgtgtgcagcgagtgcggccgcagcttcagccgcagctcgcacctgctgcgccaccagcttacgcacaccgaggagcggccgttcgtgtgcggcgactgtggccagggcttcgtgcgcagcgcgcgcctggaagagcatcggagagtgcacacgggcgaacagcctttccgttgcgctgagtgcggccagagcttccggcagcgctccaatctgctgcagcaccagcgcatccacggcgatcccccgggccctggcgctaagcccccggcccctcctggtgcgcccgagcctcccggcccctttccgtgcagcgagtgccgcgagagcttcgcgcggcgcgccgtgctgctggagcaccaggcggtacacacgggcgacaagtcctttggctgcgtcgagtgcggcgagcgcttcggccgccgctcagtgctgctgcagcaccggcgcgtgcacagtggcgagcggcccttcgcctgtgccgagtgcggccagagcttccggcagcgctccaacctgacgcagcaccggcgcatccacaccggggagcggcccttcgcctgcgccgagtgtggcaaggccttccgccagcggcctacgctcacgcagcatctccgcgtacacacgggcgagaaaccctttgcctgccccgagtgtggccagcgcttcagccagcgcctcaagctcacgcgtcatcagaggacacacaccggcgaaaagccctaccactgcggtgagtgcggcctgggcttcacgcaggtctcgcggctcaccgagcaccagcgcatccacacgggcgaacggcccttcgcctgccccgagtgcggccagagctttcggcagcacgccaacctcacccagcaccggcgcatccacacgggtgaacggccctacgcatgccctgagtgtggcaaggccttccgccagcggcccacgctcacgcagcatctgcgcacccaccgacgagagaagcccttcgcctgccaggactgtggccgccgcttccaccagagcaccaagctcattcagcaccagcgcgtccacagcgccgagtagctccagccgggacgcactgtgtccgccatggtcagaacacctacctcccctggttattgtgaggctggcgattacataagtataagcaggtccgcccagggcttggctactgtaggtgtccaataaacagtagatggaa

SEQ ID NO: 156506 - DNA, 1110 bp, Homo sapiens
  Payload ID: 10682
  Gene Symbol: MZF1
  Gene Name: myeloid zinc finger 1
  ENST ID: ENST00000594108
  CDS Start-End: 267-1046
tttcgggaccctccgtaggtacctgccatcttggctatgacccaagtctctcccagggtttcaggttgacttggcaccttgaagagtggaggcttggcccccaggatgaggcggccctcgaaatcgatgccacccacgggggaatgattctgcggtgccatccccttcataaacgcagattccttcctaaagccgcagctgcagaaggaacagcgcgaggagggaggggcagacactggcctcagatacctgacctggtaccctctatgaggcctgcggtgctgggctccccagaccgagcacccccagaagatgaggggcctgtcatggtgaagctagaggactctgaggaggagggtgaggctgccttatgggacccaggccctgaagctgcacgcctgcgtttccggtgcttccgctatgaggaggccacagggccccaagaggccctggcccagctccgagagctgtgtcgccagtggctgcgtccagaggtacgctccaaggagcagatgctggagctgttggtgctggagcagttcctgggcgcactgccccctgagatccaggcccgtgtgcaggggcagcggccaggcagccccgaggaggctgctgccctagtagatgggctgcgccgggagccgggcggaccccggagatgggtcacagtccaggtgcagggccaggaggtcctatcagagaagatggagccctccagtttccagcccctacctgaaactgagcctccaactccagagcctgggcccaagacacctcctaggactatgcaggaatcaccactgggcctgcaggtgaaagaggagtcagaggttacagaggactcagatttcctggagtctgggcctctagctgccacccaggagtctgtacccaccctcctgcctgaggaggcccagagatgtgggaccgtgctggaccagatctttccccacagcaagactgggcctgagggtccctcatggagggagcaccccagggccctgtggcatgaggaagctgggggcatcttctccccaggtaagtgagatggggtgtggtgggactaggccttccgcatggacagcaccatctctgccgaccccactcctg

SEQ ID NO: 156507 - DNA, 657 bp, Homo sapiens
  Payload ID: 10682
  Gene Symbol: MZF1
  Gene Name: myeloid zinc finger 1
  ENST ID: ENST00000596039
  CDS Start-End: 468-657
ctgagaggcttgcgcatgccgacgcacggattcgaggcggggagcatgggaagaagcggccaggagtatgacctgatcattgcgaccaccgctaggggaagggaggagagggtgtagaaacggggacgagggtgggggaagggcaaggaggcgctcgagctggtgcgcggagcatcctgggagacgtagtccagcgggagggggaagtcgaagactgcgcgtgctcaggagcgcggagcggcccgctgagcgcagagggtttcaggttgacttggcaccttgaagagtggaggcttggcccccaggatgaggcggccctcgaaatcgatgccacccacgggggaatgattctgcggtgccatccccttcataaacgcagattccttcctaaagccgcagctgcagaaggaacagcgcgaggagggaggggcagacactggcctcagatacctgacctggtaccctctatgaggcctgcggtgctgggctccccagaccgagcacccccagaagatgaggggcctgtcatggtgaagctagaggactctgaggaggagggtgaggctgccttatgggacccaggccctgaagctgcacgcctgcgtttccggtgcttccgctatgaggaggccacagggccccaagaggccctggccc

SEQ ID NO: 156508 - DNA, 4507 bp, Homo sapiens
  Payload ID: 10683
  Gene Symbol: MLLT1
  Gene Name: myeloid/lymphoid or mixed-lineage leukemia
  translocated to, 1
  Uniprot ID: Q03111
  ENST ID: ENST00000252674
  CDS Start-End: 165-1844
ggttccgcggggctggcgggcgagcgggcggccgggatcggcggcggcggcggcggcggcggcgcttgacagacaatgagggcggcggggcggcgttgagcggcggcggcggcggcggcggcggcgagcgacgcggggcccgggggcggggcggggcgccagccatggacaatcagtgcaccgtccaggtgaggttagagctggggcatcgcgcccaactgcgcaagaagcccaccacggaggggttcactcacgactggatggtgtttgtccgcggccccgagcaatgtgacatccagcacttcgtggagaaggtggtcttctggctgcacgacagcttccccaagcccagacgcgtgtgcaaggagcccccctacaaagtagaggagtcggggtacgctggcttcatcatgcccatcgaggtgcacttcaaaaacaaggaggagccgaggaaggtctgcttcacctacgacctgttcctgaacctggaaggcaacccgcccgtgaaccacctgcgctgcgagaagctcaccttcaacaaccccaccacggagttccggtacaagctcctgcgggccggcggggtgatggtaatgcccgaaggagcagacacggtgtccaggcccagtcccgactaccccatgttacccacaattccactctctgccttctctgaccccaagaagaccaaaccatcccacggctccaaggacgccaacaaggagagcagcaagacctccaagccacacaaggtgaccaaggagcaccgggagcggccccgcaaagactccgagagcaagagctcctccaaggagctggagcgtgagcaggccaaaagctccaaggacacctcgcggaagctgggcgagggccggctgcccaaggaggagaaggcgccaccgcccaaggctgccttcaaggaacccaagatggccctgaaagagaccaagctggaaagcacgtcccccaagggtgggcccccacccccacccccacccccaccccgggcttccagcaagcggccggccaccgccgactcgccaaagcccagcgccaagaagcagaagaagagcagctcgaaggggtcccggagtgctccaggcacctcgccccgcacctcctcctcctcctccttctcggacaagaagccggccaaggacaagagcagcaccagaggggagaaggtgaaggccgagagtgagccccgggaggccaaaaaggccctggaggtggaggagtccaactcagaggacgaggcctccttcaagtccgagtctgcccagtcaagcccgtccaactccagctccagctcagactccagctcagactcagacttcgagccatcccagaaccacagccaaggacccctgcgctccatggtggaggacctgcagtccgaggagtccgacgaggacgactcttcgtcaggcgaggaggctgccggcaagaccaacccggggagggactccaggttgagcttcagcgacagcgagagtgacaacagcgccgactcctccctgcccagccgtgagcccccacccccccagaagccacccccgcccaacagcaaggtgtcaggccggaggagccccgagtcctgcagcaagcctgagaagatcctcaagaagggcacctacgacaaggcctacacggatgagctggtggagctacaccggaggctgatggcgctgcgggagcgcaacgtgctgcagcagattgtgaatctgatcgaggagactggccacttcaatgtcaccaacaccaccttcgacttcgacctcttctccctggacgagaccaccgtgcgcaaactgcagagctgcctggaggccgtggccacatgaccctgggccgcgtgccgggcccccaccgccggggtcctgggaggctgcagccaggcctcgcctgccctcctctcccgtctcgcctgcccgcagcactgccttagcgacagccctgtcctcgcccgcacagcccgctgcactttcctcggcggctccctgcccactctccccgctccatcgccaggagccctggggccgggctgggccacacgggagccgccccccgggctctctgggctcccctcagagagcggctggtgttgaaggcagctctgggcagagacagggccgggggcccctcgcccagccttgggaccagcccccactgctcggcgggctgtgcggcgtcgctgccccagcctttctgagcagcggatcgacggctggggggcatctccagcctcccgaatggttcagaacacaccctccgcccaccctggacctcagaaggccctgcctgtgtgtctgcgtcgtcctccgtgtagacctagcgccggctcctccccggctcgcgctgcgctggggtctgtgctgtatagttctctctattatatatgtgtgtgcactgtctggtcaagagcagtgtccatgtgcgtttctgtggcagcagtgcacgtggggtgggtggggggtgcgtacggtggggcttgtaggttaagatgtctctgcggtggtgtggggctggaggccgagccaggcacggcagctggccctctccaggcgcatggaggaattctccctttgccgttccaaggatgccgccgcctcctaccggggctcccgggggggtcagccaacactacaaagggcagcgagtcctcagggcgcccgggagccaccagtctgctctcgggctctactcagactagcgccaacagtctccgcggacagactcgcatcagccgccctggggctcggcctcctcccataggctcctcttcctctctttcattcaagtcttcaaactttgaaaaaaatatgagcttttgccaaataagacgggatagtttatggagttttctgaggcgcattgaactctggtcagcccctcgagcgtgggctcggccatcagcaggcccggtgggttggccgggctggccctcccaggctgcctttctctctggtcgcggcctggcccgccccggcctccaccgccgcaattcatgctggtgccgcgcccgcagccccactcctggtatgcctgagattctccaggggccaagccggtcctccttcccggcccactcttccagggccaggacgctcccgcggagccagcccatcgtggctgggggtcccaggggctggaggcctgcctggttagcctctgtttcccagacattgactcgaggcgcctccagtcctctcaaccccctgactttcaagtcctttcaagtccttgtgccctgaccaagttatgaggaaaagagggctgagggcctggaggtgggctcgcaccccctcgaacccacctagatgtctcctcctccccagcctatgagttcagacttggggggctccatctgtccctccctgaggtccctcatcttgtccctgctctgattctgtcagcagatcctgaacactccttggtggggacccatgcctccaaggctgcccccaatgccagctgtcctggggaaactccccagaactctcggggaaaggcccgagaaccttcggaggaagcctccgggactcctcgccacctgctctgtttctctcccggccccactgccttcaggtatcaggaagagggcaggcccctgtgccccctctccccttcccagggcggccaacaatactccaccatggggcgcttcctttcttctctggaaactaagacattggactgaaggaactggcctgaggggggctgaccgggggcccgtgctgctgggagctctacgcacaagaggccgccggggtcacggacaggaacctcagcccagggtgctggcctttctccttcgcaggagtcccccaaaatccacacagcgactcgagcagccttccactcagccagaggagggtcgggctcccccgcctgctctcggtggtggcgtctggcccttcctgccgtttccaaggcctccggaagcaccaacccagttctcagttacctcctctggccggaaggcctcacgttgtcctccagagctgctctgggcccagggctggctccgtgaccacctgatggacgtgctgggcagcatgggctcccaaggcagcatccccagctgctctcccaccccaccccagctgcccggcggctgggcccacgagggctctggggacacttccataggaaaggggcctggcactttgtgattgccacgtgtttcctgttaagccgcctgcccccagtgcaaatctctgtgttttgctctctcctgaacaaaaatgtaaaccgacgccggaaagcaaatggtatcgaatacctttcttgcccataagggtttttacaaagaacgtgtctcactaggaactaggacactcatcggcccgagaccaactcctggataaaaggaataaggagaatcgtgtttgtaacgagttacaggattgtttctttcctggattttaaacttttgttaaattgtgaaattatggaggagttttatagaaaaaaaaagtgaaataaagtcagatgggaaagcaga

SEQ ID NO: 156509 - DNA, 5032 bp, Homo sapiens
  Payload ID: 10684
  Gene Symbol: MLLT10
  Gene Name: myeloid/lymphoid or mixed-lineage leukemia
  translocated to, 10
  Uniprot ID: P55197
  ENST ID: ENST00000307729
  CDS Start-End: 179-3385
cttgattatgtgtgccctctccgggcgcccgcgttagcggccgggtggaggtggggagggaagacgctgaggaggaggaggaggcggaggaggcggtggaggggaggtggggggaatcagcaaggacatggctcctgactcctgtgcggaacgtgagtgactgagcggcaaagcccgaatggtctctagcgaccggcccgtgtcactggaggacgaggtctcccatagtatgaaggagatgattggaggctgttgcgtttgctcagacgagagaggctgggccgagaacccgctggtttattgcgacgggcacggctgcagcgtcgcggtgcatcaagcttgctatggcattgttcaagtacccactggaccgtggttttgcaggaaatgtgaatctcaggagagagcagccagagtgagatgtgaactttgtccccataaggatggagctttaaaaagaacagataatgggggttgggcccatgtggtttgtgccctgtatattccagaggtacaatttgccaatgtttccacaatggaaccaattgttttacagtctgttccgcatgatcgttataataagacttgctacatttgtgatgaacaaggaagagaaagcaaagcagccactggtgcttgcatgacatgtaataaacatggatgtcgacaggctttccatgtaacatgcgctcagtttgccggactgctttgtgaagaagaaggtaatggtgccgataatgtccaatactgtggctactgtaaataccattttagtaagctgaaaaagagcaaacggggatctaataggtcatatgatcaaagtttaagtgattcttcctctcactctcaggataaacatcatgagaaagagaaaaaaaaatataaagagaaggacaaacacaaacagaaacacaagaagcagccagaaccatcacctgcattggttccatccttgactgttactacagaaaaaacttatacaagcactagcaacaactctatatctggatcattgaagcgcttggaagatactactgcacgatttacaaatgcaaatttccaggaagtctctgcacacacctctagtggaaaagatgtttcagagactagagggtcagagggcaaagggaagaaatcttcagctcacagctcaggtcaaaggggaagaaagcctggtggtggaagaaatccaggaacaactgtgtcagcagctagcccttttcctcaaggcagtttttcaggaactccaggcagtgtaaagtcatcttctggaagttcagtgcagtctccccaggatttcctgagctttacagactcagatctgcgtaatgacagttactctcactcccaacagtcatcagcaaccaaagatgtacataaaggagagtctggaagccaggaagggggggtaaatagttttagtaccttaattggcctcccttcaacctcagctgttacttcacagcctaaaagctttgaaaattcacctggagatttgggtaattccagccttcctacagcaggatataagcgggctcaaacttctggcatagaagaagaaactgtaaaggaaaagaaaaggaaaggaaataaacaaagtaagcatgggcctggcagacccaaaggaaacaaaaatcaagagaatgtttctcatctctcagtttcttctgcttcaccaacatcatctgtagcatcagctgcaggaagcataacaagctctagtctgcagaaatctcctacattgctcaggaatggaagtttacagagcctcagtgttggctcatctccagttggttcagaaatttccatgcagtatcggcatgatggagcttgcccaacaactacgttctcagagttgctgaatgcaatacacaacggtatttataacagcaatgatgtagcagtatcgtttccaaatgtagtatctggctcgggatctagtactcctgtctccagctctcacttacctcagcagtcttctgggcatttgcaacaagtaggagcgctctctccctcagctgtgtcatctgcagcccctgctgttgctacaactcaggcaaatactctatctggatcttctctcagtcaggcaccatctcatatgtatggcaatagatcaaattcatcaatggcagctcttatagctcagtctgaaaacaatcaaacagatcaagatcttggagacaatagccgcaacctagttggcagaggaagctcaccccgaggaagtctctcgccacgatcccctgtaagcagcttacagattcgctatgatcaaccaggcaacagcagtttggaaaatctgcctccagtagcagccagcatagaacagcttttggagaggcagtggagtgaaggacagcaatttttactagaacagggtactcctagtgacattttaggaatgctgaagtcattacaccaacttcaagttgaaaaccgaagattagaggaacaaattaaaaacttgactgccaaaaaggaacggcttcagttattgaatgcacagctttcagtgccttttccaacaataacagcaaatcctagtccgtctcatcaaatacacacattttcagcacagactgctcctactactgattccttgaacagcagtaagagccctcatataggaaacagctttttacctgataattctcttcctgtattaaatcaggacttaacctccagtggacaaagtaccagcagctcatcagctctttctaccccacctcctgctgggcagagtccggctcaacaaggctcaggagtgagtggagttcagcaggtcaatggcgtgacagtgggggcactagctagtggaatgcagcctgtaacttccaccattcctgccgtgtctgcagtgggtggaataattggagctttgccaggtaaccaactggcaattaatggcattgtaggagctttaaatggggttatgcagactcctgtcacaatgtcccagaaccctacccctctcacccacacaaccgtaccacctaatgcaacacatccaatgccagctacactgactaacagtgcctcaggactaggattactttctgaccagcaacgacaaatacttattcatcaacagcagtttcagcagttgttaaattctcaacagctcacaccagaacaacatcaagcctttttgtatcagttaatgcaacatcaccaccagcagcaccaccaacctgaacttcagcagctgcagatccctggaccaacacaaatacccataaacaaccttcttgcaggtacacaggcacccccacttcacacagctaccaccaacccatttctcaccatccatggagataatgcaagtcagaaagtagcaagacttagtgataaaactgggcctgtagctcaagagaaaagttgacacctgagaaacatctagaaattgcctatcctgctgttctagcacttcatctggctgcctttgcagtccttttactacagctatgaagaaacgcaacaagaaactcaatgcacaacaaaggattaattgctgcaaggacattcttgtaaggctttgattagttttcttgttgctttgttgcactgaaatggaattcccatgcccctaccccttaccccagttttttgaacatggaaagaaaatttaataactttttaaagtgacataatttacatgcaatatgtttatcaactcaagaatttaatatagttggtacacaactagttttgtttataaattggagatgcaaatagcaaaactaaatacttgctccatttacaaactacttgattttattgtacaagttgaaatatgctcttttgtttgggttacagtatgcttgctctaagtcaaattccaaggaactaatttcttctcctggagttgcattgattcagtattacaaatatatagcacatcacctgggacttggcaatctttgttaaaaaaaaatttcctttctaatgggatttggccaattttggtaatgaagttaggatggtaatgtctgcatctgctaaaggtaattttcttttgagaattgctttctttagtgttaagacctactcatattttgaagaaatcttgagttaagtgagttctgaggctgctgggggaaccagatcaattcaaagctaaatacttctttcagaaaggggccactgtggaaagtgctggtggggtttgcccttgatcaagtgcctccattgtgctgcaagggctgtagacagcagggtgggacagtcagtcctccgagcagcaggaatcatcccgtcacctgcagccttcccatgcttccgcctttattcagaactttctgtgccactgtagatagctcaggcaaaactattacctgggtatttatccactaatgagtcacaagaaaaggagtggatttggtaagaatagagatttgttttatttaaaccacttcccattactgaccattaaaagctcaccactagagttcctgaaacaggtgaaacctgtatgacagcccttccactttggggagccacgcttttgatgtgacagtaccgcagagtgattcccccactgaggatgtcatcatcaaactcttctttggtgtgtgaattattagtggaaaagacccagctgtaattagacctccactgtgtacttagctggaagaacatgttaattctgcaatatgtttcttggttaaacattgcacagttcttacctcatttctgtaaataaagttttgtgaatctgttttgtattgtgacaaattcataagataacattgatattttgatttgtaatatttctaattggtagatttaattgaaaagtaaaattaatttatttttatatgttcaggggaattttaaagtcaaatcttttgtagataatttaaaaaatcagtgtggtttattttacttatttaacccactggttgttattctgtaacagtttgtataaatggtaaattttgaatgtgttgttattttacctagatgtaaaattccacatgtattaaaatgtacaaaatgttttgttaataaaatttaataatgtttataa

SEQ ID NO: 156510 - DNA, 4850 bp, Homo sapiens
  Payload ID: 10684
  Gene Symbol: MLLT10
  Gene Name: myeloid/lymphoid or mixed-lineage leukemia
  translocated to, 10
  Uniprot ID: P55197
  ENST ID: ENST00000377059
  CDS Start-End: 1-3207
atggtctctagcgaccggcccgtgtcactggaggacgaggtctcccatagtatgaaggagatgattggaggctgttgcgtttgctcagacgagagaggctgggccgagaacccgctggtttattgcgacgggcacggctgcagcgtcgcggtgcatcaagcttgctatggcattgttcaagtacccactggaccgtggttttgcaggaaatgtgaatctcaggagagagcagccagagtgagatgtgaactttgtccccataaggatggagctttaaaaagaacagataatgggggttgggcccatgtggtttgtgccctgtatattccagaggtacaatttgccaatgtttccacaatggaaccaattgttttacagtctgttccgcatgatcgttataataagacttgctacatttgtgatgaacaaggaagagaaagcaaagcagccactggtgcttgcatgacatgtaataaacatggatgtcgacaggctttccatgtaacatgcgctcagtttgccggactgctttgtgaagaagaaggtaatggtgccgataatgtccaatactgtggctactgtaaataccattttagtaagctgaaaaagagcaaacggggatctaataggtcatatgatcaaagtttaagtgattcttcctctcactctcaggataaacatcatgagaaagagaaaaaaaaatataaagagaaggacaaacacaaacagaaacacaagaagcagccagaaccatcacctgcattggttccatccttgactgttactacagaaaaaacttatacaagcactagcaacaactctatatctggatcattgaagcgcttggaagatactactgcacgatttacaaatgcaaatttccaggaagtctctgcacacacctctagtggaaaagatgtttcagagactagagggtcagagggcaaagggaagaaatcttcagctcacagctcaggtcaaaggggaagaaagcctggtggtggaagaaatccaggaacaactgtgtcagcagctagcccttttcctcaaggcagtttttcaggaactccaggcagtgtaaagtcatcttctggaagttcagtgcagtctccccaggatttcctgagctttacagactcagatctgcgtaatgacagttactctcactcccaacagtcatcagcaaccaaagatgtacataaaggagagtctggaagccaggaagggggggtaaatagttttagtaccttaattggcctcccttcaacctcagctgttacttcacagcctaaaagctttgaaaattcacctggagatttgggtaattccagccttcctacagcaggatataagcgggctcaaacttctggcatagaagaagaaactgtaaaggaaaagaaaaggaaaggaaataaacaaagtaagcatgggcctggcagacccaaaggaaacaaaaatcaagagaatgtttctcatctctcagtttcttctgcttcaccaacatcatctgtagcatcagctgcaggaagcataacaagctctagtctgcagaaatctcctacattgctcaggaatggaagtttacagagcctcagtgttggctcatctccagttggttcagaaatttccatgcagtatcggcatgatggagcttgcccaacaactacgttctcagagttgctgaatgcaatacacaacggtatttataacagcaatgatgtagcagtatcgtttccaaatgtagtatctggctcgggatctagtactcctgtctccagctctcacttacctcagcagtcttctgggcatttgcaacaagtaggagcgctctctccctcagctgtgtcatctgcagcccctgctgttgctacaactcaggcaaatactctatctggatcttctctcagtcaggcaccatctcatatgtatggcaatagatcaaattcatcaatggcagctcttatagctcagtctgaaaacaatcaaacagatcaagatcttggagacaatagccgcaacctagttggcagaggaagctcaccccgaggaagtctctcgccacgatcccctgtaagcagcttacagattcgctatgatcaaccaggcaacagcagtttggaaaatctgcctccagtagcagccagcatagaacagcttttggagaggcagtggagtgaaggacagcaatttttactagaacagggtactcctagtgacattttaggaatgctgaagtcattacaccaacttcaagttgaaaaccgaagattagaggaacaaattaaaaacttgactgccaaaaaggaacggcttcagttattgaatgcacagctttcagtgccttttccaacaataacagcaaatcctagtccgtctcatcaaatacacacattttcagcacagactgctcctactactgattccttgaacagcagtaagagccctcatataggaaacagctttttacctgataattctcttcctgtattaaatcaggacttaacctccagtggacaaagtaccagcagctcatcagctctttctaccccacctcctgctgggcagagtccggctcaacaaggctcaggagtgagtggagttcagcaggtcaatggcgtgacagtgggggcactagctagtggaatgcagcctgtaacttccaccattcctgccgtgtctgcagtgggtggaataattggagctttgccaggtaaccaactggcaattaatggcattgtaggagctttaaatggggttatgcagactcctgtcacaatgtcccagaaccctacccctctcacccacacaaccgtaccacctaatgcaacacatccaatgccagctacactgactaacagtgcctcaggactaggattactttctgaccagcaacgacaaatacttattcatcaacagcagtttcagcagttgttaaattctcaacagctcacaccagaacaacatcaagcctttttgtatcagttaatgcaacatcaccaccagcagcaccaccaacctgaacttcagcagctgcagatccctggaccaacacaaatacccataaacaaccttcttgcaggtacacaggcacccccacttcacacagctaccaccaacccatttctcaccatccatggagataatgcaagtcagaaagtagcaagacttagtgataaaactgggcctgtagctcaagagaaaagttgacacctgagaaacatctagaaattgcctatcctgctgttctagcacttcatctggctgcctttgcagtccttttactacagctatgaagaaacgcaacaagaaactcaatgcacaacaaaggattaattgctgcaaggacattcttgtaaggctttgattagttttcttgttgctttgttgcactgaaatggaattcccatgcccctaccccttaccccagttttttgaacatggaaagaaaatttaataactttttaaagtgacataatttacatgcaatatgtttatcaactcaagaatttaatatagttggtacacaactagttttgtttataaattggagatgcaaatagcaaaactaaatacttgctccatttacaaactacttgattttattgtacaagttgaaatatgctcttttgtttgggttacagtatgcttgctctaagtcaaattccaaggaactaatttcttctcctggagttgcattgattcagtattacaaatatatagcacatcacctgggacttggcaatctttgttaaaaaaaaatttcctttctaatgggatttggccaattttggtaatgaagttaggatggtaatgtctgcatctgctaaaggtaattttcttttgagaattgctttctttagtgttaagacctactcatattttgaagaaatcttgagttaagtgagttctgaggctgctgggggaaccagatcaattcaaagctaaatacttctttcagaaaggggccactgtggaaagtgctggtggggtttgcccttgatcaagtgcctccattgtgctgcaagggctgtagacagcagggtgggacagtcagtcctccgagcagcaggaatcatcccgtcacctgcagccttcccatgcttccgcctttattcagaactttctgtgccactgtagatagctcaggcaaaactattacctgggtatttatccactaatgagtcacaagaaaaggagtggatttggtaagaatagagatttgttttatttaaaccacttcccattactgaccattaaaagctcaccactagagttcctgaaacaggtgaaacctgtatgacagcccttccactttggggagccacgcttttgatgtgacagtaccgcagagtgattcccccactgaggatgtcatcatcaaactcttctttggtgtgtgaattattagtggaaaagacccagctgtaattagacctccactgtgtacttagctggaagaacatgttaattctgcaatatgtttcttggttaaacattgcacagttcttacctcatttctgtaaataaagttttgtgaatctgttttgtattgtgacaaattcataagataacattgatattttgatttgtaatatttctaattggtagatttaattgaaaagtaaaattaatttatttttatatgttcaggggaattttaaagtcaaatcttttgtagataatttaaaaaatcagtgtggtttattttacttatttaacccactggttgttattctgtaacagtttgtataaatggtaaattttgaatgtgttgttattttacctagatgtaaaattccacatgtattaaaatgtacaaaatgttttgttaataaaatttaataatgttt

SEQ ID NO: 156511 - DNA, 5126 bp, Homo sapiens
  Payload ID: 10684
  Gene Symbol: MLLT10
  Gene Name: myeloid/lymphoid or mixed-lineage leukemia
  translocated to, 10
  Uniprot ID: P55197
  ENST ID: ENST00000377072
  CDS Start-End: 349-3432
cgcgcacgcagggctagcctcgcccaggcctcctccctcacgccggccgcaggacgggcgcgcacgccaagtgacgctccgaggaggaagcgcagcccccttcccctccctcgctgcccctggcccagcgggagccccccctccccccagtgcgcctgtgcggaggccctcttgattatgtgtgccctctccgggcgcccgcgttagcggccgggtggaggtggggagggaagacgctgaggaggaggaggaggcggaggaggcggtggaggggaggtggggggaatcagcaaggacatggctcctgactcctgtgcggaacgtgagtgactgagcggcaaagcccgaatggtctctagcgaccggcccgtgtcactggaggacgaggtctcccatagtatgaaggagatgattggaggctgttgcgtttgctcagacgagagaggctgggccgagaacccgctggtttattgcgacgggcacggctgcagcgtcgcggtgcatcaagcttgctatggcattgttcaagtacccactggaccgtggttttgcaggaaatgtgaatctcaggagagagcagccagagtgagatgtgaactttgtccccataaggatggagctttaaaaagaacagataatgggggttgggcccatgtggtttgtgccctgtatattccagaggtacaatttgccaatgtttccacaatggaaccaattgttttacagtctgttccgcatgatcgttataataagacttgctacatttgtgatgaacaaggaagagaaagcaaagcagccactggtgcttgcatgacatgtaataaacatggatgtcgacaggctttccatgtaacatgcgctcagtttgccggactgctttgtgaagaagaaggtaatggtgccgataatgtccaatactgtggctactgtaaataccattttagtaagctgaaaaagagcaaacggggatctaataggtcatatgatcaaagtttaagtgattcttcctctcactctcaggataaacatcatgagaaagagaaaaaaaaatataaagagaaggacaaacacaaacagaaacacaagaagcagccagaaccatcacctgcattggttccatccttgactgttactacagaaaaaacttatacaagcactagcaacaactctatatctggatcattgaagcgcttggaagatactactgcacgatttacaaatgcaaatttccaggaagtctctgcacacacctctagtggaaaagatgtttcagagactagagggtcagagggcaaagggaagaaatcttcagctcacagctcaggtcaaaggggaagaaagcctggtggtggaagaaatccaggaacaactgtgtcagcagctagcccttttcctcaaggcagtttttcaggaactccaggcagtgtaaagtcatcttctggaagttcagtgcagtctccccaggatttcctgagctttacagactcagatctgcgtaatgacagttactctcactcccaacagtcatcagcaaccaaagatgtacataaaggagagtctggaagccaggaagggggggtaaatagttttagtaccttaattggcctcccttcaacctcagctgttacttcacagcctaaaagctttgaaaattcacctggagatttgggtaattccagccttcctacagcaggatataagcgggctcaaacttctggcatagaagaagaaactgtaaaggaaaagaaaaggaaaggaaataaacaaagtaagcatgggcctggcagacccaaaggaaacaaaaatcaagagaatgtttctcatctctcagtttcttctgcttcaccaacatcatctgtagcatcagctgcaggaagcataacaagctctagtctgcagaaatctcctacattgctcaggaatggaagtttacagagcctcagtgttggctcatctccagttggttcagaaatttccatgcagtatcggcatgatggagcttgcccaacaactacgttctcagagttgctgaatgcaatacacaacgacagaggtgacagttctacactaacaaagcaagaacttaaattcataggtatttataacagcaatgatgtagcagtatcgtttccaaatgtagtatctggctcgggatctagtactcctgtctccagctctcacttacctcagcagtcttctgggcatttgcaacaagtaggagcgctctctccctcagctgtgtcatctgcagcccctgctgttgctacaactcaggcaaatactctatctggatcttctctcagtcaggcaccatctcatatgtatggcaatagatcaaattcatcaatggcagctcttatagctcagtctgaaaacaatcaaacagatcaagatcttggagacaatagccgcaacctagttggcagaggaagctcaccccgaggaagtctctcgccacgatcccctgtaagcagcttacagattcgctatgatcaaccaggcaacagcagtttggaaaatctgcctccagtagcagccagcatagaacagcttttggagaggcagtggagtgaaggacagcaatttttactagaacagggtactcctagtgacattttaggaatgctgaagtcattacaccaacttcaagttgaaaaccgaagattagaggaacaaattaaaaacttgactgccaaaaaggaacggcttcagttattgaatgcacagctttcagtgccttttccaacaataacagcaaatcctagtccgtctcatcaaatacacacattttcagcacagactgctcctactactgattccttgaacagcagtaagagccctcatataggaaacagctttttacctgataattctcttcctgtattaaatcaggacttaacctccagtggacaaagtaccagcagctcatcagctctttctaccccacctcctgctgggcagagtccggctcaacaaggctcaggagtgagtggagttcagcaggtcaatggcgtgacagtgggggcactagctagtggaatgcagcctgtaacttccaccattcctgccgtgtctgcagtgggtggaataattggagctttgccaggtaaccaactggcaattaatggcattgtaggagctttaaatggggttatgcagactcctgtcacaatgtcccagaaccctacccctctcacccacacaaccgtaccacctaatgcaacacatccaatgccagctacactgactaacagtgcctcaggactaggattactttctgaccagcaacgacaaatacttattcatcaacagcagtttcagcagttgttaaattctcaacagctcacaccagtacacaggcacccccacttcacacagctaccaccaacccatttctcaccatccatggagataatgcaagtcagaaagtagcaagacttagtgataaaactgggcctgtagctcaagagaaaagttgacacctgagaaacatctagaaattgcctatcctgctgttctagcacttcatctggctgcctttgcagtccttttactacagctatgaagaaacgcaacaagaaactcaatgcacaacaaaggattaattgctgcaaggacattcttgtaaggctttgattagttttcttgttgctttgttgcactgaaatggaattcccatgcccctaccccttaccccagttttttgaacatggaaagaaaatttaataactttttaaagtgacataatttacatgcaatatgtttatcaactcaagaatttaatatagttggtacacaactagttttgtttataaattggagatgcaaatagcaaaactaaatacttgctccatttacaaactacttgattttattgtacaagttgaaatatgctcttttgtttgggttacagtatgcttgctctaagtcaaattccaaggaactaatttcttctcctggagttgcattgattcagtattacaaatatatagcacatcacctgggacttggcaatctttgttaaaaaaaaatttcctttctaatgggatttggccaattttggtaatgaagttaggatggtaatgtctgcatctgctaaaggtaattttcttttgagaattgctttctttagtgttaagacctactcatattttgaagaaatcttgagttaagtgagttctgaggctgctgggggaaccagatcaattcaaagctaaatacttctttcagaaaggggccactgtggaaagtgctggtggggtttgcccttgatcaagtgcctccattgtgctgcaagggctgtagacagcagggtgggacagtcagtcctccgagcagcaggaatcatcccgtcacctgcagccttcccatgcttccgcctttattcagaactttctgtgccactgtagatagctcaggcaaaactattacctgggtatttatccactaatgagtcacaagaaaaggagtggatttggtaagaatagagatttgttttatttaaaccacttcccattactgaccattaaaagctcaccactagagttcctgaaacaggtgaaacctgtatgacagcccttccactttggggagccacgcttttgatgtgacagtaccgcagagtgattcccccactgaggatgtcatcatcaaactcttctttggtgtgtgaattattagtggaaaagacccagctgtaattagacctccactgtgtacttagctggaagaacatgttaattctgcaatatgtttcttggttaaacattgcacagttcttacctcatttctgtaaataaagttttgtgaatctgttttgtattgtgacaaattcataagataacattgatattttgatttgtaatatttctaattggtagatttaattgaaaagtaaaattaatttatttttatatgttcaggggaattttaaagtcaaatcttttgtagataatttaaaaaatcagtgtggtttattttacttatttaacccactggttgttattctgtaacagtttgtataaatggtaaattttgaatgtgttgttattttacctagatgtaaaattccacatgtattaaaatgtacaaaatgttttgttaataaaatttaataatgtttataa

SEQ ID NO: 156512 - DNA, 905 bp, Homo sapiens
  Payload ID: 10684
  Gene Symbol: MLLT10
  Gene Name: myeloid/lymphoid or mixed-lineage leukemia
  translocated to, 10
  Uniprot ID: P55197
  ENST ID: ENST00000377091
  CDS Start-End: 177-557
tgattatgtgtgccctctccgggcgcccgcgttagcggccgggtggaggtggggagggaagacgctgaggaggaggaggaggcggaggaggcggtggaggggaggtggggggaatcagcaaggacatggctcctgactcctgtgcggaacgtgagtgactgagcggcaaagcccgaatggtctctagcgaccggcccgtgtcactggaggacgaggtctcccatagtatgaaggagatgattggaggctgttgcgtttgctcagacgagagaggctgggccgagaacccgctggtttattgcgacgggcacggctgcagcgtcgcggtgcatcaagcttgctatggcattgttcaagtacccactggaccgtggttttgcaggaaatgtgaatctcaggagagagcagccagagtggcagagtctcgctctgttgcccaggctaaagtgcagtggtgtgatctcagcccactgcaacctctgctccccgggttcaagcgattctcctgcctcagcctcccaaatggtatgcaattcctgttggttagcctcatctgaaaacgtcactcctggatacatagaacatcactgcgcatgtgcatctccccacccccgatgcctggtgtctaacgttcctccagtttctggtgctctgatgcattgcttttgggcttgtcttactacagcagctttcttcggtcctcagtcatttaccacttgtcatatgtcctttctagtttccagggatattcttttttatatttatggctttatgccatttatctcagttgtcatttggcgtttcaagaaggagaggtggtagtgtttaagtggaattaactacttgtgtttctgatgtggtcttttatatttcttacagggttttgttttaccaagtactagtct

SEQ ID NO: 156513 - DNA, 1136 bp, Homo sapiens
  Payload ID: 10684
  Gene Symbol: MLLT10
  Gene Name: myeloid/lymphoid or mixed-lineage leukemia
  translocated to, 10
  Uniprot ID: P55197
  ENST ID: ENST00000377100
  CDS Start-End: 357-896
cgcggcagcgcgcacgcagggctagcctcgcccaggcctcctccctcacgccggccgcaggacgggcgcgcacgccaagtgacgctccgaggaggaagcgcagcccccttcccctccctcgctgcccctggcccagcgggagccccccctccccccagtgcgcctgtgcggaggccctcttgattatgtgtgccctctccgggcgcccgcgttagcggccgggtggaggtggggagggaagacgctgaggaggaggaggaggcggaggaggcggtggaggggaggtggggggaatcagcaaggacatggctcctgactcctgtgcggaacgtgagtgactgagcggcaaagcccgaatggtctctagcgaccggcccgtgtcactggaggacgaggtctcccatagtatgaaggagatgattggaggctgttgcgtttgctcagacgagagaggctgggccgagaacccgctggtttattgcgacgggcacggctgcagcgtcgcggtgcatcaagcttgctatggcattgttcaagtacccactggaccgtggttttgcaggaaatgtgaatctcaggagagagcagccagagtgatggtatgcaattcctgttggttagcctcatctgaaaacgtcactcctggatacatagaacatcactgcgcatgtgcatctccccacccccgatgcctggtgtctaacgttcctccagtttctggtgctctgatgcattgcttttgggcttgtcttactacagcagctttcttcggtcctcagtcatttaccacttgtcatatgtcctttctagtttccagggatattcttttttatatttatggctttatgccatttatctcagttgtcatttggcgtttcaagaaggagaggtggtagtgtttaagtggaattaactacttgtgtttctgatgtggtcttttatatttcttacagggttttgttttaccaagtactagtcttcagtctatcctgtttacttgattttttcccactcaactcacaaacatttttgaatcatctcatgaattctgctttccatttacatttttgcccttttgtcttttcctcttcgctgttaaacttcctgaaaaaataaaactagttgattcacttctt

SEQ ID NO: 156514 - DNA, 184 bp, Homo sapiens
  Payload ID: 10684
  Gene Symbol: MLLT10
  Gene Name: myeloid/lymphoid or mixed-lineage leukemia
  translocated to, 10
  ENST ID: ENST00000430455
  CDS Start-End: 1-184
cgagaacccgctggtttattgcgacgggcacggctgcagcgtcgcggtgcatcaagcttgctatggcattgttcaagtacccactggaccgtggttttgcaggaaatgtgaatctcaggagagagcagccagagtggttgggcccatgtggtttgtgccctgtatattccagaggtacaatttg

SEQ ID NO: 156515 - DNA, 538 bp, Homo sapiens
  Payload ID: 10684
  Gene Symbol: MLLT10
  Gene Name: myeloid/lymphoid or mixed-lineage leukemia
  translocated to, 10
  ENST ID: ENST00000420525
  CDS Start-End: 1-538
cttcacagcctaaaagctttgaaaattcacctggagatttgggtaattccagccttcctacagcaggatataagcgggctcaaacttctggcatagaagaagaaactgtaaaggaaaagaaaaggaaaggaaataaacaaagtaagcatgggcctggcagacccaaaggaaacaaaaatcaagagaatgtttctcatctctcagtttcttctgcttcaccaacatcatctgtagcatcagctgcaggaagcataacaagctctagtctgcagaaatctcctacattgctcaggaatggaagtttacagagcctcagtgttggctcatctccagttggttcagaaatttccatgcagtatcggcatgatggagcttgcccaacaactagtatttataacagcaatgatgtagcagtatcgtttccaaatgtagtatctggctcgggatctagtactcctgtctccagctctcacttacctcagcagtcttctgggcatttgcaacaagtaggagcgctctctccctcagctgtgtcatc

SEQ ID NO: 156516 - DNA, 1085 bp, Homo sapiens
  Payload ID: 10684
  Gene Symbol: MLLT10
  Gene Name: myeloid/lymphoid or mixed-lineage leukemia
  translocated to, 10
  ENST ID: ENST00000438473
  CDS Start-End: 1-1085
gttactacagaaaaaacttatacaagcactagcaacaactctatatctggatcattgaagcgcttggaagatactactgcacgatttacaaatgcaaatttccaggaagtctctgcacacacctctagtggaaaagatgtttcagagactagagggtcagagggcaaagggaagaaatcttcagctcacagctcaggtcaaaggggaagaaagcctggtggtggaagaaatccaggaacaactgtgtcagcagctagcccttttcctcaagcaggatataagcgggctcaaacttctggcatagaagaagaaactgtaaaggaaaagaaaaggaaaggaaataaacaaagtaagcatgggcctggcagacccaaaggaaacaaaaatcaagagaatgtttctcatctctcagtttcttctgcttcaccaacatcatctgtagcatcagctgcaggaagcataacaagctctagtctgcagaaatctcctacattgctcaggaatggaagtttacagagcctcagtgttggctcatctccagttggttcagaaatttccatgcagtatcggcatgatggagcttgcccaacaactacgttctcagagttgctgaatgcaatacacaacgacagaggtgacagttctacactaacaaagcaagaacttaaattcataggtatttataacagcaatgatgtagcagtatcgtttccaaatgtagtatctggctcgggatctagtactcctgtctccagctctcacttacctcagcagtcttctgggcatttgcaacaagtaggagcgctctctccctcagctgtgtcatctgcagcccctgctgttgctacaactcaggcaaatactctatctggatcttctctcagtcaggcaccatctcatatgtatggcaatagatcaaattcatcaatggcagctcttatagctcagtctgaaaacaatcaaacagatcaagatcttggagacaatagccgcaacctagttggcagaggaagctcaccccgaggaagtctctcgccacgatcccctgtaagcagcttacagattcgctatgatcaaccaggcaa

SEQ ID NO: 156517 - DNA, 381 bp, Homo sapiens
  Payload ID: 10684
  Gene Symbol: MLLT10
  Gene Name: myeloid/lymphoid or mixed-lineage leukemia
  translocated to, 10
  Uniprot ID: P55197
  ENST ID: ENST00000621220
  CDS Start-End: 1-381
atggtctctagcgaccggcccgtgtcactggaggacgaggtctcccatagtatgaaggagatgattggaggctgttgcgtttgctcagacgagagaggctgggccgagaacccgctggtttattgcgacgggcacggctgcagcgtcgcggtgcatcaagcttgctatggcattgttcaagtacccactggaccgtggttttgcaggaaatgtgaatctcaggagagagcagccagagtggcagagtctcgctctgttgcccaggctaaagtgcagtggtgtgatctcagcccactgcaacctctgctccccgggttcaagcgattctcctgcctcagcctcccaaatggtatgcaattcctgttggttagcctcatctga

SEQ ID NO: 156518 - DNA, 4955 bp, Homo sapiens
  Payload ID: 10684
  Gene Symbol: MLLT10
  Gene Name: myeloid/lymphoid or mixed-lineage leukemia
  translocated to, 10
  Uniprot ID: P55197
  ENST ID: ENST00000631589
  CDS Start-End: 102-3308
tggaatacaaactctcccgacatccgtagttactttcaaggtggattgtgtattttaaggctgatgggaacgtctggtttgtggagcaaaaagaagagaagatggtctctagcgaccggcccgtgtcactggaggacgaggtctcccatagtatgaaggagatgattggaggctgttgcgtttgctcagacgagagaggctgggccgagaacccgctggtttattgcgacgggcacggctgcagcgtcgcggtgcatcaagcttgctatggcattgttcaagtacccactggaccgtggttttgcaggaaatgtgaatctcaggagagagcagccagagtgagatgtgaactttgtccccataaggatggagctttaaaaagaacagataatgggggttgggcccatgtggtttgtgccctgtatattccagaggtacaatttgccaatgtttccacaatggaaccaattgttttacagtctgttccgcatgatcgttataataagacttgctacatttgtgatgaacaaggaagagaaagcaaagcagccactggtgcttgcatgacatgtaataaacatggatgtcgacaggctttccatgtaacatgcgctcagtttgccggactgctttgtgaagaagaaggtaatggtgccgataatgtccaatactgtggctactgtaaataccattttagtaagctgaaaaagagcaaacggggatctaataggtcatatgatcaaagtttaagtgattcttcctctcactctcaggataaacatcatgagaaagagaaaaaaaaatataaagagaaggacaaacacaaacagaaacacaagaagcagccagaaccatcacctgcattggttccatccttgactgttactacagaaaaaacttatacaagcactagcaacaactctatatctggatcattgaagcgcttggaagatactactgcacgatttacaaatgcaaatttccaggaagtctctgcacacacctctagtggaaaagatgtttcagagactagagggtcagagggcaaagggaagaaatcttcagctcacagctcaggtcaaaggggaagaaagcctggtggtggaagaaatccaggaacaactgtgtcagcagctagcccttttcctcaaggcagtttttcaggaactccaggcagtgtaaagtcatcttctggaagttcagtgcagtctccccaggatttcctgagctttacagactcagatctgcgtaatgacagttactctcactcccaacagtcatcagcaaccaaagatgtacataaaggagagtctggaagccaggaagggggggtaaatagttttagtaccttaattggcctcccttcaacctcagctgttacttcacagcctaaaagctttgaaaattcacctggagatttgggtaattccagccttcctacagcaggatataagcgggctcaaacttctggcatagaagaagaaactgtaaaggaaaagaaaaggaaaggaaataaacaaagtaagcatgggcctggcagacccaaaggaaacaaaaatcaagagaatgtttctcatctctcagtttcttctgcttcaccaacatcatctgtagcatcagctgcaggaagcataacaagctctagtctgcagaaatctcctacattgctcaggaatggaagtttacagagcctcagtgttggctcatctccagttggttcagaaatttccatgcagtatcggcatgatggagcttgcccaacaactacgttctcagagttgctgaatgcaatacacaacggtatttataacagcaatgatgtagcagtatcgtttccaaatgtagtatctggctcgggatctagtactcctgtctccagctctcacttacctcagcagtcttctgggcatttgcaacaagtaggagcgctctctccctcagctgtgtcatctgcagcccctgctgttgctacaactcaggcaaatactctatctggatcttctctcagtcaggcaccatctcatatgtatggcaatagatcaaattcatcaatggcagctcttatagctcagtctgaaaacaatcaaacagatcaagatcttggagacaatagccgcaacctagttggcagaggaagctcaccccgaggaagtctctcgccacgatcccctgtaagcagcttacagattcgctatgatcaaccaggcaacagcagtttggaaaatctgcctccagtagcagccagcatagaacagcttttggagaggcagtggagtgaaggacagcaatttttactagaacagggtactcctagtgacattttaggaatgctgaagtcattacaccaacttcaagttgaaaaccgaagattagaggaacaaattaaaaacttgactgccaaaaaggaacggcttcagttattgaatgcacagctttcagtgccttttccaacaataacagcaaatcctagtccgtctcatcaaatacacacattttcagcacagactgctcctactactgattccttgaacagcagtaagagccctcatataggaaacagctttttacctgataattctcttcctgtattaaatcaggacttaacctccagtggacaaagtaccagcagctcatcagctctttctaccccacctcctgctgggcagagtccggctcaacaaggctcaggagtgagtggagttcagcaggtcaatggcgtgacagtgggggcactagctagtggaatgcagcctgtaacttccaccattcctgccgtgtctgcagtgggtggaataattggagctttgccaggtaaccaactggcaattaatggcattgtaggagctttaaatggggttatgcagactcctgtcacaatgtcccagaaccctacccctctcacccacacaaccgtaccacctaatgcaacacatccaatgccagctacactgactaacagtgcctcaggactaggattactttctgaccagcaacgacaaatacttattcatcaacagcagtttcagcagttgttaaattctcaacagctcacaccagaacaacatcaagcctttttgtatcagttaatgcaacatcaccaccagcagcaccaccaacctgaacttcagcagctgcagatccctggaccaacacaaatacccataaacaaccttcttgcaggtacacaggcacccccacttcacacagctaccaccaacccatttctcaccatccatggagataatgcaagtcagaaagtagcaagacttagtgataaaactgggcctgtagctcaagagaaaagttgacacctgagaaacatctagaaattgcctatcctgctgttctagcacttcatctggctgcctttgcagtccttttactacagctatgaagaaacgcaacaagaaactcaatgcacaacaaaggattaattgctgcaaggacattcttgtaaggctttgattagttttcttgttgctttgttgcactgaaatggaattcccatgcccctaccccttaccccagttttttgaacatggaaagaaaatttaataactttttaaagtgacataatttacatgcaatatgtttatcaactcaagaatttaatatagttggtacacaactagttttgtttataaattggagatgcaaatagcaaaactaaatacttgctccatttacaaactacttgattttattgtacaagttgaaatatgctcttttgtttgggttacagtatgcttgctctaagtcaaattccaaggaactaatttcttctcctggagttgcattgattcagtattacaaatatatagcacatcacctgggacttggcaatctttgttaaaaaaaaatttcctttctaatgggatttggccaattttggtaatgaagttaggatggtaatgtctgcatctgctaaaggtaattttcttttgagaattgctttctttagtgttaagacctactcatattttgaagaaatcttgagttaagtgagttctgaggctgctgggggaaccagatcaattcaaagctaaatacttctttcagaaaggggccactgtggaaagtgctggtggggtttgcccttgatcaagtgcctccattgtgctgcaagggctgtagacagcagggtgggacagtcagtcctccgagcagcaggaatcatcccgtcacctgcagccttcccatgcttccgcctttattcagaactttctgtgccactgtagatagctcaggcaaaactattacctgggtatttatccactaatgagtcacaagaaaaggagtggatttggtaagaatagagatttgttttatttaaaccacttcccattactgaccattaaaagctcaccactagagttcctgaaacaggtgaaacctgtatgacagcccttccactttggggagccacgcttttgatgtgacagtaccgcagagtgattcccccactgaggatgtcatcatcaaactcttctttggtgtgtgaattattagtggaaaagacccagctgtaattagacctccactgtgtacttagctggaagaacatgttaattctgcaatatgtttcttggttaaacattgcacagttcttacctcatttctgtaaataaagttttgtgaatctgttttgtattgtgacaaattcataagataacattgatattttgatttgtaatatttctaattggtagatttaattgaaaagtaaaattaatttatttttatatgttcaggggaattttaaagtcaaatcttttgtagataatttaaaaaatcagtgtggtttattttacttatttaacccactggttgttattctgtaacagtttgtataaatggtaaattttgaatgtgttgttattttacctagatgtaaaattccacatgtattaaaatgtacaaaatgttttgttaataaaatttaataatgtttataa

SEQ ID NO: 156519 - DNA, 4075 bp, Homo sapiens
  Payload ID: 10685
  Gene Symbol: MLLT11
  Gene Name: myeloid/lymphoid or mixed-lineage leukemia
  translocated to, 11
  Uniprot ID: Q13015
  ENST ID: ENST00000368921
  CDS Start-End: 2803-3075
aacagccttgagatgagatcacacaaacactcaaatgtagcttctaggggaggggagaacccaggaggctgggctttctcttctcttctcaccactggaagggaggagtaaccagaaggagcggaagctaaaacacgctgtccagagaggggagctgtggtcagtgggacgtcagtgagtcagtcatagggtttgtcctgatggtggtggtggcaggtggtaagggttggggaaaaatgaagaattagaggaaacccccaacaccagcaggcaggctgtactgtgactggactctccctcaacatcccccactctgctcaaagctgagggacagaggtggatagtgctgggagggaagagaagagagggggaggagaaggagagagggaaaggggcagtggagagaacaaggccatttctgtttcttttccagggacctgaccagagctgggtggagggaaagcgtgtgtgtgggacttggcatgaaatgaccaatgatgacgagaagtgaccaggaaattccattccctaggacattagggtctctgaaacttgagggtggggtcagagtgtgaagaagacaggtcagggtgaatgtgatggtagcgcagggcagtgggggatgggaacaaagccagaaaaggaagtaagagccactggcggccactcttctttaaagcagccagaagagagtgggttgaggaaaaatgaagtcctgagctggtcagcccaggcggaagagccacccgaatccaaccccacagtgaatagggaaggggctgagaaaacaacaggagggatgaggattagacctcataaggccacgtcctgagagccaagtggtgctcagaactcgacctctctgagttccaaatggcaagagtgaaatatggaaccgggaaagccaccccccgcccccaccaagatcatactaggacttgagggtctcagagctgttgggaggtgagcagaagggatgggaaagaggtgccagggaggaaggatgtacaggctagttctctggtcctgttcgggccccaaaccggttctcccggtcccaccgcctctggccctaaggcctccaacccgcggcctgacaagccctcacatgaagcagctggagagaaagaaagaatcgagagaatggcatgggcaattctggctagaagcccggggcagcagctggtccctgtgtggagaccccgagacatggagggctgctgagggactctggagaagcggtgtggactccatatttcagccaagtgacaggcccaacaccaaccttcccttccccaggaaaggtcttctgggggcttaagaggaaagagggctaggccctaagcctcccctccccaaatatattcaatcacacagattccgtatctgtctccccccactacacaactctacctagaagttctctgctgttctcaacccttaaccggactgggacctctctgggaatctttcggaccctctccctcccacctcccccaacattccagttccttcttttccttctactcttcagcggcctcagcctgcgcaccccaggagcgtggatgactacggccaccccgggcgcgcacccctttcccaccaccccagcatctctgcagcccaggacacccgcctcccccacaccccgcatccggtgtgtctccgcctggcccggccggcgcggcaggcgggccaggggaccaactgcacggcctcacctgctcttctccaccatccagacgttcagctacagctggtgggggtgagggactctgctccgtggccgccagtgtgggcttcccgggctagctctgcggcgaggtgggggagccgagtacgagccggcagaggtggggccggctgagggcggaagcggcggcgacgcgattacgaaacccgtccggctcggagcccggcgcactgctcccctctggactgcggaggcactgcactgcgcgggacgtgggagggtgcctctgcagcccctcaaggccgccgcccctgcggggagaactggagaatgcggacacctagatgaggccctggcacccaagctggggcccccggaatctcacgttccctttactcgccaggcatttcggggcaaaacgaagcggagccccccaaacccccagacctaaccaagttcagagattcgcagaagcacgccccccaccccaaatttattgtgctctacccaaaatggaataggactaggtttatttacccattgtgagggtagagaggcgagtctggaggagcagggattgggagaaggggtggaaaaatactctgattcttaaaaatactttgtaacctaaagtccttaaattgtggaagaaaggaatactcctcctttccattgtagtctagagttaagatttcaaatccataaattagaggacctaaaattagagggcaattaactgctcattcattgggcccccagtcagcacgggggtgctggaagagatcgggaataatagcgcagaccaatgagcctagggagatgctttcatcgtctctccttccctcaagtgttctggaacctatcatttgaattagccgagtcaggcaggagggggcggggaatccttccgcccttcttaggaggggctgcattgcagggggagagtgaactgacagactcagtcactgaagagggaaaaggagtgagaagacaaagccgtcaaagccccaacagctttgtatttctccagcccggcgcagaccccggagctcccgaggcactccctccatctttggaacacgccagtaattgattgataacaggaagctatgagggaccctgtgagtagccagtacagttcctttcttttctggaggatgcccatcccagaactggatctgtcggagctggaaggcctgggtctgtcagatacagccacctacaaggtcaaagacagcagcgttggcaaaatgatcgggcaagcaactgcagcagaccaggagaaaaaccctgaaggtgatggcctccttgagtacagcaccttcaacttctggagagctcccattgccagcatccactccttcgaactggacttgctctaaggccaagacttctctctcccatcaccttgccctcattgtcttccctctcaagccccttcctttccactcctttcccattttaatcttgttctctccctactgtgttggtggtgctgatgaatctgccagagttgagttctatgtatttatttatctatctgtctactccatttctctcaaaagccctcaagtcacaaagtaaatggttcaagcaatggagtactgggtcacagggattcctcctttcccccccaaatattaactccagaaactaggcctgactggggacacctgagagtagtatagtagtgcaaaatggaagactgatttttgactctattataatcagcttcagagattccttaaaccttcctaatttcctgctccagggcagtaaacacaaatatttcttcaaggggtgatgaaaacctcggaagttttaatttgaggttatctgctacgaaacagtatttctaaaaggctaaagtgataagtctcttgcttttttttgatcctgctcttatattcttttttttcctcagagaaatcaggagggtagttagaggtataaaacaggaggaaatattatggaaaatgaaaatagggaaaataattgaatcattttagaagtagctaatttcttttctcaaaagagtgtcccttcttcacacctactcactttacaactttgctcctaactgtgggttgaaaactctagctaaagaaagttatcaaatcttaacatgcattcctactattatgatagtttttaaggtttcaattcaatcttctgaacggcataagtcctattttagccttacctcctgcatttgcaatacgtaatactgatcagtgggcacagttcttcagctacattgagaccctgaaatgaacaattatattctgactcgacatcttgtccccaatccttccaaaaatattgatggtgatttgtgctaccatttactcgtttatttaataaagacattcaatcccagga

SEQ ID NO: 156520 - DNA, 708 bp, Homo sapiens
  Payload ID: 10686
  Gene Symbol: MLLT3
  Gene Name: myeloid/lymphoid or mixed-lineage leukemia
  translocated to, 3
  ENST ID: ENST00000380321
  CDS Start-End: 183-671
tcttaacagctctccattccttgctgacacacatgaacttaggggcacttctgttttcctgagggctacaccgttttcttttgaaagagtctgaacaacccagtcctgccagctccagctccagctccagctccagcttcacaccatcccagaccaggcaacaaggtcctttgaggtctataatgaaagatctgcattctgatgacaatgaggaggaatcagatgaagtggaggataacgacaatgactctgaaatggagaggcctgtaaatagaggaggcagccgaagtcgcagagttagcttaagtgatggcagcgatagtgaaagcagttctgcttcttcacccctacatcacgaacctccaccacccttactaaaaaccaacaacaaccagattcttgaagtgaaaagtccaataaagcaaagcaaatcagataagcaaataaagaatggtgaatgtgacaaggcatacctagatgaactggtagagcttcacagaaggttaatgacattgagagaaagacacattctgcagcagatcgtgaaccttatagaagaaactggacactttcatatcacaaacacaacatttgattttgatctttgctcgctggacaaaaccacagtccgtaaactacagagttacctggaaacatctggaacatcctgaggatataacaactggatgcatcaagaactattgtgtt

SEQ ID NO: 156521 - DNA, 6772 bp, Homo sapiens
  Payload ID: 10686
  Gene Symbol: MLLT3
  Gene Name: myeloid/lymphoid or mixed-lineage leukemia
  translocated to, 3
  Uniprot ID: P42568
  ENST ID: ENST00000380338
  CDS Start-End: 288-1994
gaggctcggagcccgggtgtcaggcgccacggcgcatgctccgcaatcatcttctttaccctggagctgctgctgctgctgctgcttttgcttttggggctgagtttaataagcgagcgagcgagcaagcgagcgcggggggaaaaaggcagagaatgtccgccatctaccctccgctcctgggcgcgctctcattcatagcagcctcttcatgaattacagctgagggggggcggaggaggggggggtaccacacaacaccccagcaaacctccgggcccccaggcatggctagctcgtgtgccgtgcaggtgaagctggagctggggcaccgcgcccaggtgaggaaaaaacccaccgtggagggcttcacccacgactggatggtgttcgtacgcggtccggagcacagtaacatacagcactttgtggagaaagtcgtcttccacttgcacgaaagctttcctaggccaaaaagagtgtgcaaagatccaccttacaaagtagaagaatctgggtatgctggtttcattttgccaattgaagtttattttaaaaacaaggaagaacctaggaaagtccgctttgattatgacttattcctgcatcttgaaggccatccaccagtgaatcacctccgctgtgaaaagctaactttcaacaaccccacagaggactttaggagaaagttgctgaaggcaggaggggaccctaataggagtattcataccagcagcagcagcagcagcagcagtagcagcagcagcagcagcagcagcagcagcagtagcagcagcagcagcagcagcagcagcagcagtagcagcagcagtagcagcagcagcagcagcagtagtaccagtttttcaaagcctcacaaattaatgaaggagcacaaggaaaaaccttctaaagactccagagaacataaaagtgccttcaaagaaccttccagggatcacaacaaatcttccaaagaatcctctaagaaacccaaagaaaataaaccactgaaagaagagaaaatagttcctaagatggccttcaaggaacctaaacccatgtcaaaagagccaaaaccagatagtaacttactcaccatcaccagtggacaagataagaaggctcctagtaaaaggccgcccatttcagattctgaagaactctcagccaaaaaaaggaaaaagagtagctcagaggctttatttaaaagtttttctagcgcaccaccactgatactcacttgttctgctgacaaaaaacagataaaagataaatctcatgtcaagatgggaaaggtcaaaattgaaagtgagacatcagagaagaagaaatcaacgttaccgccatttgatgatattgtggatcccaatgattcagatgtggaggagaatatatcctctaaatctgattctgaacaacccagtcctgccagctccagctccagctccagctccagcttcacaccatcccagaccaggcaacaaggtcctttgaggtctataatgaaagatctgcattctgatgacaatgaggaggaatcagatgaagtggaggataacgacaatgactctgaaatggagaggcctgtaaatagaggaggcagccgaagtcgcagagttagcttaagtgatggcagcgatagtgaaagcagttctgcttcttcacccctacatcacgaacctccaccacccttactaaaaaccaacaacaaccagattcttgaagtgaaaagtccaataaagcaaagcaaatcagataagcaaataaagaatggtgaatgtgacaaggcatacctagatgaactggtagagcttcacagaaggttaatgacattgagagaaagacacattctgcagcagatcgtgaaccttatagaagaaactggacactttcatatcacaaacacaacatttgattttgatctttgctcgctggacaaaaccacagtccgtaaactacagagttacctggaaacatctggaacatcctgaggatataacaactggatgcatcaagaactattgtgttttttttttttggttttttttttttttggttgtgattttttgttcttgttgtttatatgaaaacactcaaaatgatgcaaccaaaagggaaaaaataaaaatcaaacaaccttcagctttatttttctttaaagccagtcatcatctcttgataaaggagaggttaaagcaaaccagcctcagcggaccactcttctctccaaggaaatccccgggaagagttagcctggatagccttgaaaacaaacaaatcaaacacaacacaagaaaactcaaagaatgtgtatggtatcatgtatctctctgtggtggttcattccacaggacgaatgcatattcaacacactgccttattacataactgatctatttattatcgcatacagatattctaagtcgttgagggaatgacaccatcagacattataagtacttggtcccgtggatgctctttcaatgcagcacccttgccatcccaagcccagtgaccttactcgtataccgtgccactttccaccaactttttccaagtcctttaactcgttgcagtctgtattttccaccttttgtttttccagttccaggacacagattatcaactggggggaccaaatagccaccttgattttcttctttgtggtctttttcctgaaagttggggcccagtccttggctgtatccatgtaatgatcttggaccatggtagaaaatgcaccaaataggatcatatgaattgctgtctagccttagtcaataaacttgtaggacttttaaacaaaagtgtacctgtaaatgtcctgaatccagcattgttgagctgtcatcaacattcttgtgtctgttttactgttacaatattaggtgaatatggaagtaaaggcattccacaggatcatcatttaaaaaaaaagaattctggtcctgttttctaaaaaaaaaaactgttgtagaaattcttaatttggatctatttattagtcagagtttcagctttcttcagctgccagtgtgttactcatctttatcctaaaaatctggaatcagagatttttgtttgttcacatatgattctcttagacacttttatatttgaaaaaattaaaatctttctttggggaaaaattcttggttattctgccataacagattatgtattaacttgtagattcagtggttcaatacctgtttagttgcttgctaatatttccagaaggatttcttgtattggtgaaagacggttggggatggggggatttttttgttcttgttgtacccttgttttgaaactagaaatctgtcctgtggcatgcaaaagaaagcaaattatttttaaaagaaaaaaaccaaagtacttttggtgtcattattccatcttctccataagtggagaaatgaaaagtaagaacagctcatcttcaaagtttttactagaaattcagccgaaaagaagagaaatgaagaaatacttctggatccaaaggttcgtcactggatcagccttaagaaagtctctatgtgtgctaatagaccagtatctcccttgtttgttcccatgccagatgctgtcttttcatacagagattaactagtgtctgtacagaaaatggtctttccagacccattcttttgggcagttatataaatgcagattgataatggagttatttctgcattttaaaaaggggattttttacactgtttctttctatccaaagaaactatttttcctttaaaaaattataatacagccatgctccttgtaaattatttctctgaagcgtcctcccagaggacaagtgtactttctcaataatgttatgattcttaatgacgattggcatgaaccgtacttgaagcatttgttgtattgtccacttcttgatgtgcagagaaactttgagtcattttggacattaggtgattgatgaattgtgtggtttcagttgcgttttgtttttaactttatagctggaaggggagggtaatgtttatatggaaatgttgcaaatttttaaaatattttaaaatttctaactgctaacacatattctgatcaagccagaagtttatgtgatttaatatatctgtgtagtttaactagaaacgtatatatgtagtttgggccatttttatttctgtaactaaattgtggggcaaaaaatatgatttgccaatgtaaaaattttttcctttaagttactaaccaagaagctaggtaagataagaaatgaccaaacaaaaataatgataagaaggacagctattatatgataaactttagacttgaaaattaggtaataaagttaatttcttcagaatatcctaaaatgtaagtttgtaaattgataaagttcagaaaaacttatccatcttctactcatcaagatagcaaagtaagtttttcacaaaattaagactgagagttacgttattttttttgaagtggtaatcttgctctcatctaatttttaaatacagaaataaaaagatccctttgaattaatttcaagtagttttaatacctctcttaaagtaaccccttcagttctgtcacatttatatacacccaactttgaagcctattaagaatatctttgacatgtgagtaccctaacagtggctctggtttcttaagcacaaagggaaaatggcagggtttaatttctttggtgtacatatataaatagatgtttcaaataaaattaattgggtaaatgtgaatatggtttgaaccagccagagtatgataaacttttaaaaaatttttcctcagtgatcagccaggggaaaaaatatatgtacagagctcctgcccctctgcccccttataacttagcttttgcctctggttttgcagcaggatgtgtgttggtgggtttggggttccttctgtcttcggatgtaacagtcatgttagcaacaatattttgcagttacttcaccatcctcagcataatctgcctctctctcaatcttaatacagacaaataggtatgtctataaatgcgttcatatagtgtcaaggtagggaagactataaaaacttcagatcaggaaaaaaatatctcttaagagagtgtcttaaacattttaaattgctaggcaatttaaatctctctaatctgaatattcaccttttggtggaaagagccagtaatattggttttcttccactaaaaagtttcttcaaaatttttttttttttttttttttttttttttttgccgatatcttttacaggcccacctaatctttaaaaaaaagagaagaaacaattttaggcctgtataacatcctatttactacttcaagctccacaaatgtagttaatatatttgtttaagagagactttactcttaaatgttttaactttgcctacttaatggagttggatgtccagtgttggaaacagtcagtgtctgtttggtggctcgtgtttatttttgtcactgtagaagtgatctgctctggagtaatttgctgtatgcttattactttccacctttagcgttttgtgtactaatgctatgtactgctcctatatttatatatacatatatatatatatatacacatatatattatcagagtaatcttgctttggactgttgctctaaaactatgaatatgatgtagagactactacagctgcagtgaatgttaaggagtcaattcccatggtttagtttagtctcgggctggaagtctacatcttttgacctcttttgttttatatgatgctttttattatgtaggcactgccatccctgaatattccttgtaaagatgcagtgaagaagtcaatttaaaaggaagacaaagccaccgctgtctgtaaactgtaaatgtgtattttggcacttgtactccagtattctgaaaatagagttatgatggaaatgctgacagatccttaatggtggccagagctaccatgcagtgcaaaaataaattaagtgaaaatgtattattgagattaacagtgcaaggccaatacattttataaatctgtcagtatctttttaatggactgtgtatgtgtagttatgttgaaagatacattgtgtatgtgtacatgcttttgtgtgaattcaaggcacactgtaagatgtatttcccttctctaaaatccatgttgaaatgtaagtacagattgatagaaataggtgttttacttaaactcatataatctgtttcagcaccttttttaaaatgtataattgtactgatttgctgagagtcatttgaccaaagtttggctttattttgcatacaggaaaaattagcccctagccttttctcaagaagtgatgctgtttctaaagaagaatagatggggagatctgagacatccagagagaggacaatgtgtccaaaaccagctgaaggcagagagtccatgcctcattcattttaggagtccctcatgtctaacaccatcttctgtgtcctaaagccagtatatatataatatttttaaaactctgcaaagattggaacaagaagtggtgggatacattttttggcataaactgggctatgtgtgcccggtattttttctttcccccctatttctttggagggttttgttcagaaacaatgtgctatagccagagagagtcgatcttacaaagtccctgcatttactttcacagcaagaactgctaccttgattagacaggaaggagaacaactactacaacaaagagaataaaatacattcagtttggtaaataaccaa

SEQ ID NO: 156522 - DNA, 2040 bp, Homo sapiens
  Payload ID: 10686
  Gene Symbol: MLLT3
  Gene Name: myeloid/lymphoid or mixed-lineage leukemia
  translocated to, 3
  Uniprot ID: P42568
  ENST ID: ENST00000630269
  CDS Start-End: 99-1796
atatttcagccgccgccgccgggagctgcgggcacagtccggggacgcggcgagcagcctcggcggccgcacctccgcaaagcgccgcggccgctacgatgtgtgccgtgcaggtgaagctggagctggggcaccgcgcccaggtgaggaaaaaacccaccgtggagggcttcacccacgactggatggtgttcgtacgcggtccggagcacagtaacatacagcactttgtggagaaagtcgtcttccacttgcacgaaagctttcctaggccaaaaagagtgtgcaaagatccaccttacaaagtagaagaatctgggtatgctggtttcattttgccaattgaagtttattttaaaaacaaggaagaacctaggaaagtccgctttgattatgacttattcctgcatcttgaaggccatccaccagtgaatcacctccgctgtgaaaagctaactttcaacaaccccacagaggactttaggagaaagttgctgaaggcaggaggggaccctaataggagtattcataccagcagcagcagcagcagcagcagtagcagcagcagcagcagcagcagcagcagcagtagcagcagcagcagcagcagcagcagcagcagtagcagcagcagtagcagcagcagcagcagcagtagtaccagtttttcaaagcctcacaaattaatgaaggagcacaaggaaaaaccttctaaagactccagagaacataaaagtgccttcaaagaaccttccagggatcacaacaaatcttccaaagaatcctctaagaaacccaaagaaaataaaccactgaaagaagagaaaatagttcctaagatggccttcaaggaacctaaacccatgtcaaaagagccaaaaccagatagtaacttactcaccatcaccagtggacaagataagaaggctcctagtaaaaggccgcccatttcagattctgaagaactctcagccaaaaaaaggaaaaagagtagctcagaggctttatttaaaagtttttctagcgcaccaccactgatactcacttgttctgctgacaaaaaacagataaaagataaatctcatgtcaagatgggaaaggtcaaaattgaaagtgagacatcagagaagaagaaatcaacgttaccgccatttgatgatattgtggatcccaatgattcagatgtggaggagaatatatcctctaaatctgattctgaacaacccagtcctgccagctccagctccagctccagctccagcttcacaccatcccagaccaggcaacaaggtcctttgaggtctataatgaaagatctgcattctgatgacaatgaggaggaatcagatgaagtggaggataacgacaatgactctgaaatggagaggcctgtaaatagaggaggcagccgaagtcgcagagttagcttaagtgatggcagcgatagtgaaagcagttctgcttcttcacccctacatcacgaacctccaccacccttactaaaaaccaacaacaaccagattcttgaagtgaaaagtccaataaagcaaagcaaatcagataagcaaataaagaatggtgaatgtgacaaggcatacctagatgaactggtagagcttcacagaaggttaatgacattgagagaaagacacattctgcagcagatcgtgaaccttatagaagaaactggacactttcatatcacaaacacaacatttgattttgatctttgctcgctggacaaaaccacagtccgtaaactacagagttacctggaaacatctggaacatcctgaggatataacaactggatgcatcaagaactattgtgttttttttttttggttttttttttttttggttgtgattttttgttcttgttgtttatatgaaaacactcaaaatgatgcaaccaaaagggaaaaaataaaaatcaaacaaccttcagctttatttttctttaaagccagtcatcatctcttgataaaggagaggttaaagcaaaccagcctcagcggaccactcttctctccaaggaaa

SEQ ID NO: 156523 - DNA, 3264 bp, Homo sapiens
  Payload ID: 10686
  Gene Symbol: MLLT3
  Gene Name: myeloid/lymphoid or mixed-lineage leukemia
  translocated to, 3
  ENST ID: ENST00000629733
  CDS Start-End: 1481-1897
gccacggcgcatgctccgcaatcatcttctttaccctggagctgctgctgctgctgctgcttttgcttttggggctgagtttaataagcgagcgagcgagcaagcgagcgcggggggaaaaaggcagagaatgtccgccatctaccctccgctcctgggcgcgctctcattcatagcagcctcttcatgaattacagctgagggggggcggaggaggggggggtaccacacaacaccccagcaaacctccgggcccccaggcatggctagctcgtgtgccgtgcaggtgaagctggagctggggcaccgcgcccaggtgaggaaaaaacccaccgtggagggcttcacccacgactggatggtgttcgtacgcggtccggagcacagtaacatacagcactttgtggagaaagtcgtcttccacttgcacgaaagctttcctaggccaaaaagagtgtgcaaagatccaccttacaaagtagaagaatctgggtatgctggtttcattttgccaattgaagtttattttaaaaacaaggaagaacctaggaaagtccgctttgattatgacttattcctgcatcttgaaggccatccaccagtgaatcacctccgctgtgaaaagctaactttcaacaaccccacagaggactttaggagaaagttgctgaaggcaggaggggaccctaataggagtattcataccagcagcagcagcagcagcagcagtagcagcagcagcagcagcagcagcagcagcagtagcagcagcagcagcagcagcagcagcagcagtagcagcagcagtagcagcagcagcagcagcagtagtaccagtttttcaaagcctcacaaattaatgaaggagcacaaggaaaaaccttctaaagactccagagaacataaaagtgccttcaaagaaccttccagggatcacaacaaatcttccaaagaatcctctaagaaacccaaagaaaataaaccactgaaagaagagaaaatagttcctaagatggccttcaaggaacctaaacccatgtcaaaagagccaaaaccagatagtaacttactcaccatcaccagtggacaagataagaaggctcctagtaaaaggccgcccatttcagattctgaagaactctcagccaaaaaaaggaaaaagagtagctcagaggctttatttaaaagtttttctagcgcaccaccactgatactcacttgttctgctgacaaaaaacagataaaagataaatctcatgtcaagatgggaaaggtcaaaattgaaagtgagacatcagagaagaagaaatcaacgttaccgccatttgatgatattgtggatcccaatgattcagatgtggaggagaatatatcctctaaatctgattctgaacaacccagtcctgccagctccagctccagctccagctccagcttcacaccatcccagaccaggcaacaaggtcctttgaggtctataatgaaagatctgcattctgatgacaatgaggaggaatcagatgaagtggaggataacgacaatgactctgaaatggagaggcctgtaaatagaggaggcagccgaagtcgcagagttagcttaagtgatggcagcgatagtgaaagcagttctgcttcttcacccctacatcacgaacctccaccacccttactaaaaaccaacaacaaccagattcttgaagtgaaaagtccaataaagcaaagcaaatcagataagcaaataaagaatggtgaatgtgacaagatcgtgaaccttatagaagaaactggacactttcatatcacaaacacaacatttgattttgatctttgctcgctggacaaaaccacagtccgtaaactacagagttacctggaaacatctggaacatcctgaggatataacaactggatgcatcaagaactattgtgttttttttttttggttttttttttttttggttgtgattttttgttcttgttgtttatatgaaaacactcaaaatgatgcaaccaaaagggaaaaaataaaaatcaaacaaccttcagctttatttttctttaaagccagtcatcatctcttgataaaggagaggttaaagcaaaccagcctcagcggaccactcttctctccaaggaaatccccgggaagagttagcctggatagccttgaaaacaaacaaatcaaacacaacacaagaaaactcaaagaatgtgtatggtatcatgtatctctctgtggtggttcattccacaggacgaatgcatattcaacacactgccttattacataactgatctatttattatcgcatacagatattctaagtcgttgagggaatgacaccatcagacattataagtacttggtcccgtggatgctctttcaatgcagcacccttgccatcccaagcccagtgaccttactcgtataccgtgccactttccaccaactttttccaagtcctttaactcgttgcagtctgtattttccaccttttgtttttccagttccaggacacagattatcaactggggggaccaaatagccaccttgattttcttctttgtggtctttttcctgaaagttggggcccagtccttggctgtatccatgtaatgatcttggaccatggtagaaaatgcaccaaataggatcatatgaattgctgtctagccttagtcaataaacttgtaggacttttaaacaaaagtgtacctgtaaatgtcctgaatccagcattgttgagctgtcatcaacattcttgtgtctgttttactgttacaatattaggtgaatatggaagtaaaggcattccacaggatcatcatttaaaaaaaaagaattctggtcctgttttctaaaaaaaaaaactgttgtagaaattcttaatttggatctatttattagtcagagtttcagctttcttcagctgccagtgtgttactcatctttatcctaaaaatctggaatcagagatttttgtttgttcacatatgattctcttagacacttttatatttgaaaaaattaaaatctttctttggggaaaaattcttggttattctgccataacagattatgtattaacttgtagattcagtggttcaatacctgtttagttgcttgctaatatttccagaaggatttcttgtattggtgaaagacggttggggatggggggatttttttgttcttgttgtacccttgttttgaaactagaaatctgtcctgtggcatgcaaaagaaagcaaattattttt

SEQ ID NO: 156524 - DNA, 5823 bp, Homo sapiens
  Payload ID: 10687
  Gene Symbol: MLLT4
  Gene Name: myeloid/lymphoid or mixed-lineage leukemia
  translocated to, 4
  ENST ID: ENST00000351017
  CDS Start-End: 173-5668
ccaggcggaggccaagtcggaggacgcggcgcggccgcggaggcggaggcagccgcggaggcggaggcggccggcggggggtggcgaggggcgccgggcccccgcggacctgtcgtcctcggcccgtcctccggccccggccccgcgcggctgaggaggcgcggccaggaccatgtcggcgggcggccgtgacgaggagcggcggaagctggccgacatcatccaccactggaacgccaaccggctggacctgttcgagatcagccagccgaccgaggatttggagttccatggagtgatgagattttattttcaagataaagctgctggaaactttgcaacaaaatgtattcgggtctctagtactgccaccactcaagatgtaatcgaaacgctcgcggagaaatttcgacctgatatgcgaatgctgtcctctcccaagtattcactctatgaagtgcatgtcagcggagaaagaagattggatatagatgagaaacctctagttgtacaactgaattggaacaaagatgatcgggaaggcagatttgttcttaagaatgagaatgacgccattcctcctaagaaggctcaaagtaatggacctgaaaagcaggaaaaagaaggggttatccagaacttcaagagaactctctcaaagaaagaaaagaaggaaaaaaagaagagagaaaaagaggcattgcgacaggcatctgataaagatgatagacctttccaaggggaggatgttgaaaattctcgactggctgctgaggtttacaaagacatgccggaaaccagctttactcgaaccatttctaatcctgaggtggttatgaaacgacggaggcagcaaaaattggaaaagagaatgcaggaatttcggagctcagatgggcggcctgattcaggtggaacattgagaatttatgcagatagtttaaaaccaaatattccctacaagacaatcctgctgtctactacagatcctgcagactttgctgtggctgaagctttagagaagtatggtctggaaaaagaaaaccctaaggattactgcatcgcccgggttatgcttcctcctggagcccagcattctgatgaaaagggtgctaaagaaattattcttgatgatgatgagtgtcctttacaaatcttcagggaatggccaagtgacaaagggattttagtctttcagttgaagaggaggccaccagaccacatcccaaagaaaaccaagaaacacttggaaggcaagacacccaagggaaaggagagagctgacgggtctggctatggctccacccttcctccggagaagctgccctatttagtagagttaagcccagggagaaggaatcactttgcctactacaactatcacacttacgaagatggttctgactctagagataagccaaagctttaccgccttcagttaagtgttactgaagttgggacagaaaagttggatgacaactctatccagttgtttggcccaggaattcagccccatcactgtgaccttaccaacatggatggagtggtcactgtgacgcccagaagtatggacgcagaaacctacgtggaaggccagcgcatctcagaaaccaccatgctgcagagtggcatgaaagtgcagtttggggcgtcccatgtatttaagtttgtggaccccagtcaggatcatgctcttgcaaaaagatctgtggatggaggcctgatggttaagggcccaagacataaacctggaattgttcaggagacaacttttgatttgggaggagatattcatagtgggacagcattaccgacaagcaagagcaccactaggctggacagcgacagagtgtcgtctgcctctagcacagccgagcggggaatggtgaagccgatgatcagagtagaacagcagccagattatcgcaggcaagaaagcagaacacaggatgcttctgggcctgagctgatactacctgcaagcattgaattcagggaaagttctgaagattcatttttgtctgccattataaattatactaatagctctacagtccactttaagttgtcccctacatatgtattatatatggcatgccggtatgtattgtccaaccagtacagacctgacatcagccctacagagcgcacacataaagtcattgcagtcgtcaacaagatggtgagcatgatggagggtgtcatccaggaagtagaccaggttgaccagaaacagaagaatattgcaggggcacttgccttctggatggcaaatgcatctgaacttctcaacttcattaagcaagaccgagaccttagtcggatcacactggatgctcaagatgttttagcacatttggttcaaatggcatttaaatacttggttcactgtcttcaatcagaacttaataattacatgccagcctttctagatgaccctgaagagaacagtctgcaacgaccaaaaatagatgatgtgctgcacacgctcacaggagccatgtccttgctacgacgctgcagagtcaatgccgccctgaccatccagctcttctctcagctcttccacttcatcaatatgtggctgttcaatagattggtgaccgacccagattcggggctgtgctcccattactggggtgcgattatccgtcagcagttgggccatattgaagcctgggctgagaagcaggggctggaactggctgcggactgtcatctgagcaggatcgtgcaggcaacgactttgcttaccatggataagtatgcacctgatgacattccaaatataaacagcacctgctttaagttaaattcattacaacttcaagccttattacagaactatcactgtgcacctgatgagccttttatcccaacggatcttatagaaaatgtagtgactgtggctgaaaacactgccgatgagctggcccgcagtgatggaagggaagtgcagttggaggaggatcctgatctgcagctgccgtttcttttgccagaagatggttattcttgtgatgttgtcagaaacattccaaatggtttacaagaatttttagaccctctgtgccagagaggattttgcaggttaattcctcacacacgttcaccaggtacttggacaatatattttgaaggtgcagattatgaaagtcaccttctgcgtgagaacacagagctggctcagcctctgaggaaagaacctgaaataatcactgtgaccctaaaaaagcagaatggaatgggccttagcattgttgcagcaaagggtgctggtcaagataaactaggaatctatgtgaagtcggttgtgaaaggaggtgctgcagatgtggatggacgtctagctgcaggtgatcagctcctcagtgtggatggacgaagtctggttggactctctcaggaaagggcggcagaactcatgacaagaacaagctctgtggtgacactggaagtagcaaagcagggtgccatctaccacggtctggccacccttctcaatcagccatcccccatgatgcagagaatttcagatcgtcgtggctcaggtaaaccccgaccaaagagtgaaggctttgagctctataataattcaactcaaaatgggtctcctgagagtcctcagctgccttgggcagaatatagtgaaccaaagaaattgcctggtgatgacagactgatgaaaaatagagctgatcaccgttccagccccaacgtagcaaatcagcctcctagtcctggagggaaaagtgcatatgcctctggaacaacagcgaagataacatctgtctctactggaaacctctgcactgaggagcagacgcctccgcctagacctgaagcctaccccatccccactcagacgtacaccagagagtattttaccttcccagcttccaaatcccaggatcggatggctcctcctcagaaccagtggccaaattatgaggaaaagccacatatgcacacagatagtaatcattccagtattgcaattcagcgtgttacacgttcccaagaagaacttcgagaagataaagcttaccaacttgagcggcatcgaatagaggcagctatggaccgaaagtctgatagtgatatgtggataaatcagagctcctcactggactccagtacctctagccaggagcatctgaaccattcctctaagtcggtcacccctgcttccacactgaccaaaagtggccctggccgttggaaaacaccagcagccataccggccacccctgtggccgtctcccagccaatccgaacagacctgcctccgccacccccgccacctccagtccactatgccggtgatttcgatggaatgtccatggatttgcctctcccaccacccccttccgccaaccagatagggctgccgtctgcgcaggtggctgctgctgaacggagaaagagagaagaacatcagcgttggtatgagaaggagaaggcccgcctggaggaggagcgggagaggaagcggagagagcaggagaggaagttgggccagatgcgcactcagtccttaaaccctgctccgttttctcccctgactgcacagcagatgaagcccgaaaagccttccacactccagcggccacaggaaacagtcattcgggagctgcagcctcagcagcagccccgcacgatcgagcgcagagacttgcagtacattacagtcagcaaagaggagctttcctcgggggacagtctgtcccccgacccgtggaagcgggacgccaaggagaagctggagaagcagcagcagatgcacatcgtggacatgctgagcaaggagatccaggagctccagagcaaaccggaccgcagcgccgaggagagcgaccggctgcgcaagctcatgctggagtggcagttccagaagagactccaggagtcgaagcagaaggacgaagatgacgaggaggaggaggacgatgatgtggacaccatgctgatcatgcagcgcctggaggctgaacgaagagcgaggttgcaggacgaggagcggaggcggcagcagcagttagaagagatgcgcaagcgggaagcggaagaccgagcgaggcaagaggaagagcgccggcggcaggaggaggagcgaacaaaacgagacgctgaagaaaagaggcgacaggaagaagggtattacagccgcctggaagccgagaggcgcagacagcacgacgaggcggcgcgcaggttgctggagcccgaggcgcccggtctgtgccgccctccgcttccccgggactacgagcccccgtccccgtcccccgcgcccggcgcccctcctcccccgcctcagcgaaacgcctcctacctcaaaacacaggtcctctcccccgactcgctgttcactgccaagtttgttgcatacaatgaggaggaggaggaggaggactgcagcctagcaggaccaaactcttacccaggatctactggagcagctgttggagcccatgacgcctgtcgggatgcaaaagagaagcgctctaaaagccaagatgcagattcacctggaagttctggggcccctgaaaacttgacattcaaggaacgccagcgtcttttttcacaaggtcaagatgtatccaataaagtgaaagcttctcgtaaattaacagaactggagaatgaactgaacacaaagtgaaagaaaatgaggagaacactttgtatttaccccaaaatcttttcagttgtgggtttgtaggtgcgagtttgaagaggaaaagaggaagggggttatatttctaagtgatttacaatttctgtttctaaaattgttgggatttagaaatgtttcaa

SEQ ID NO: 156525 - DNA, 5249 bp, Homo sapiens
  Payload ID: 10687
  Gene Symbol: MLLT4
  Gene Name: myeloid/lymphoid or mixed-lineage leukemia
  translocated to, 4
  ENST ID: ENST00000344191
  CDS Start-End: 173-5170
ccaggcggaggccaagtcggaggacgcggcgcggccgcggaggcggaggcagccgcggaggcggaggcggccggcggggggtggcgaggggcgccgggcccccgcggacctgtcgtcctcggcccgtcctccggccccggccccgcgcggctgaggaggcgcggccaggaccatgtcggcgggcggccgtgacgaggagcggcggaagctggccgacatcatccaccactggaacgccaaccggctggacctgttcgagatcagccagccgaccgaggatttggagttccatggagtgatgagattttattttcaagataaagctgctggaaactttgcaacaaaatgtattcgggtctctagtactgccaccactcaagatgtaatcgaaacgctcgcggagaaatttcgacctgatatgcgaatgctgtcctctcccaagtattcactctatgaagtgcatgtcagcggagaaagaagattggatatagatgagaaacctctagttgtacaactgaattggaacaaagatgatcgggaaggcagatttgttcttaagaatgagaatgacgccattcctcctaagaaggctcaaagtaatggacctgaaaagcaggaaaaagaaggggttatccagaacttcaagagaactctctcaaagaaagaaaagaaggaaaaaaagaagagagaaaaagaggcattgcgacaggcatctgataaagatgatagacctttccaaggggaggatgttgaaaattctcgactggctgctgaggtttacaaagacatgccggaaaccagctttactcgaaccatttctaatcctgaggtggttatgaaacgacggaggcagcaaaaattggaaaagagaatgcaggaatttcggagctcagatgggcggcctgattcaggtggaacattgagaatttatgcagatagtttaaaaccaaatattccctacaagacaatcctgctgtctactacagatcctgcagactttgctgtggctgaagctttagagaagtatggtctggaaaaagaaaaccctaaggattactgcatcgcccgggttatgcttcctcctggagcccagcattctgatgaaaagggtgctaaagaaattattcttgatgatgatgagtgtcctttacaaatcttcagggaatggccaagtgacaaagggattttagtctttcagttgaagaggaggccaccagaccacatcccaaagaaaaccaagaaacacttggaaggcaagacacccaagggaaaggagagagctgacgggtctggctatggctccacccttcctccggagaagctgccctatttagtagagttaagcccagggagaaggaatcactttgcctactacaactatcacacttacgaagatggttctgactctagagataagccaaagctttaccgccttcagttaagtgttactgaagttgggacagaaaagttggatgacaactctatccagttgtttggcccaggaattcagccccatcactgtgaccttaccaacatggatggagtggtcactgtgacgcccagaagtatggacgcagaaacctacgtggaaggccagcgcatctcagaaaccaccatgctgcagagtggcatgaaagtgcagtttggggcgtcccatgtatttaagtttgtggaccccagtcaggatcatgctcttgcaaaaagatctgtggatggaggcctgatggttaagggcccaagacataaacctggaattgttcaggagacaacttttgatttgggaggagatattcatagtgggacagcattaccgacaagcaagagcaccactaggctggacagcgacagagtgtcgtctgcctctagcacagccgagcggggaatggtgaagccgatgatcagagtagaacagcagccagattatcgcaggcaagaaagcagaacacaggatgcttctgggcctgagctgatactacctgcaagcattgaattcagggaaagttctgaagattcatttttgtctgccattataaattatactaatagctctacagtccactttaagttgtcccctacatatgtattatatatggcatgccggtatgtattgtccaaccagtacagacctgacatcagccctacagagcgcacacataaagtcattgcagtcgtcaacaagatggtgagcatgatggagggtgtcatccagaaacagaagaatattgcaggggcacttgccttctggatggcaaatgcatctgaacttctcaacttcattaagcaagaccgagaccttagtcggatcacactggatgctcaagatgttttagcacatttggttcaaatggcatttaaatacttggttcactgtcttcaatcagaacttaataattacatgccagcctttctagatgaccctgaagagaacagtctgcaacgaccaaaaatagatgatgtgctgcacacgctcacaggagccatgtccttgctacgacgctgcagagtcaatgccgccctgaccatccagctcttctctcagctcttccacttcatcaatatgtggctgttcaatagattggtgaccgacccagattcggggctgtgctcccattactggggtgcgattatccgtcagcagttgggccatattgaagcctgggctgagaagcaggggctggaactggctgcggactgtcatctgagcaggatcgtgcaggcaacgactttgcttaccatggataagtatgcacctgatgacattccaaatataaacagcacctgctttaagttaaattcattacaacttcaagccttattacagaactatcactgtgcacctgatgagccttttatcccaacggatcttatagaaaatgtagtgactgtggctgaaaacactgccgatgagctggcccgcagtgatggaagggaagtgcagttggaggaggatcctgatctgcagctgccgtttcttttgccagaagatggttattcttgtgatgttgtcagaaacattccaaatggtttacaagaatttttagaccctctgtgccagagaggattttgcaggttaattcctcacacacgttcaccaggtacttggacaatatattttgaaggtgcagattatgaaagtcaccttctgcgtgagaacacagagctggctcagcctctgaggaaagaacctgaaataatcactgtgaccctaaaaaagcagaatggaatgggccttagcattgttgcagcaaagggtgctggtcaagataaactaggaatctatgtgaagtcggttgtgaaaggaggtgctgcagatgtggatggacgtctagctgcaggtgatcagctcctcagtgtggatggacgaagtctggttggactctctcaggaaagggcggcagaactcatgacaagaacaagctctgtggtgacactggaagtagcaaagcagggtgccatctaccacggtctggccacccttctcaatcagccatcccccatgatgcagagaatttcagatcgtcgtggctcaggtaaaccccgaccaaagagtgaaggctttgagctctataataattcaactcaaaatgggtctcctgagagtcctcagctgccttgggcagaatatagtgaaccaaagaaattgcctggtgatgacagactgatgaaaaatagagctgatcaccgttccagccccaacgtagcaaatcagcctcctagtcctggagggaaaagtgcatatgcctctggaacaacagcgaagataacatctgtctctactggaaacctctgcactgaggagcagacgcctccgcctagacctgaagcctaccccatccccactcagacgtacaccagagagtattttaccttcccagcttccaaatcccaggatcggatggctcctcctcagaaccagtggccaaattatgaggaaaagccacatatgcacacagatagtaatcattccagtattgcaattcagcgtgttacacgttcccaagaagaacttcgagaagataaagcttaccaacttgagcggcatcgaatagaggcagctatggaccgaaagtctgatagtgatatgtggataaatcagagctcctcactggactccagtacctctagccaggagcatctgaaccattcctctaagtcggtcacccctgcttccacactgaccaaaagtggccctggccgttggaaaacaccagcagccataccggccacccctgtggccgtctcccagccaatccgaacagacctgcctccgccacccccgccacctccagtccactatgccggtgatttcgatggaatgtccatggatttgcctctcccaccacccccttccgccaaccagatagggctgccgtctgcgcaggtggctgctgctgaacggagaaagagagaagaacatcagcgttggtatgagaaggagaaggcccgcctggaggaggagcgggagaggaagcggagagagcaggagaggaagttgggccagatgcgcactcagtccttaaaccctgctccgttttctcccctgactgcacagcagatgaagcccgaaaagccttccacactccagcggccacaggaaacagtcattcgggagctgcagcctcagcagcagccccgcacgatcgagcgcagagacttgcagtacattacagtcagcaaagaggagctttcctcgggggacagtctgtcccccgacccgtggaagcgggacgccaaggagaagctggagaagcagcagcagatgcacatcgtggacatgctgagcaaggagatccaggagctccagagcaaaccggaccgcagcgccgaggagagcgaccggctgcgcaagctcatgctggagtggcagttccagaagagactccaggagtcgaagcagaaggacgaagatgacgaggaggaggaggacgatgatgtggacaccatgctgatcatgcagcgcctggaggctgaacgaagagcgaggcagactgctatgccagcaatctctgttctagatttgttgcaggacgaggagcggaggcggcagcagcagttagaagagatgcgcaagcgggaagcggaagaccgagcgaggcaagaggaagagcgccggcggcaggaggaggagcgaacaaaacgagacgctgaagaaaaggttatggtcctttaagggcagctagaattttaccaagttagcctgaacgtaatcgattggctggggcagagcgggctggaagttctgtgtttct

SEQ ID NO: 156526 - DNA, 5962 bp, Homo sapiens
  Payload ID: 10687
  Gene Symbol: MLLT4
  Gene Name: myeloid/lymphoid or mixed-lineage leukemia
  translocated to, 4
  ENST ID: ENST00000366806
  CDS Start-End: 320-5665
gtggctcgcggcgccccttcgccgtggccgggatggagcctgtgacgcgcgctgtgcttcgggttcataaacttgcaggctgccagctgggaggggaaagtcagtatcacaaagttcgggaggtgcgggctgcctgatggcacaggcccggagtcggacgcctccgaggaaaggcgcgccttctccaccttcggggccgcgaggaagggccctctgcggcggcctctgcccggagggaggcgccggccccaggctggctccctgagaggaggaggaaatcacgctcgctcctggcctggatttggagttccatggagtgatgagattttattttcaagataaagctgctggaaactttgcaacaaaatgtattcgggtctctagtactgccaccactcaagatgtaatcgaaacgctcgcggagaaatttcgacctgatatgcgaatgctgtcctctcccaagtattcactctatgaagtgcatgtcagcggagaagaaagaagattggatatagatgagaaacctctagttgtacaactgaattggaacaaagatgatcgggaaggcagatttgttcttaagaatgagaatgacgccattcctcctaagaaggctcaaagtaatggacctgaaaagcaggaaaaagaaggggttatccagaacttcaagagaactctctcaaagaaagaaaagaaggaaaaaaagaagagagaaaaagaggcattgcgacaggcatctgataaagatgatagacctttccaaggggaggatgttgaaaattctcgactggctgctgaggtttacaaagacatgccggaaaccagctttactcgaaccatttctaatcctgaggtggttatgaaacgacggaggcagcaaaaattggaaaagagaatgcaggaatttcggagctcagatgggcggcctgattcaggtggaacattgagaatttatgcagatagtttaaaaccaaatattccctacaagacaatcctgctgtctactacagatcctgcagactttgctgtggctgaagctttagagaagtatggtctggaaaaagaaaaccctaaggattactgcatcgcccgggttatgcttcctcctggagcccagcattctgatgaaaagggtgctaaagaaattattcttgatgatgatgagtgtcctttacaaatcttcagggaatggccaagtgacaaagggattttagtctttcagttgaagaggaggccaccagaccacatcccaaagaaaaccaagaaacacttggaaggcaagacacccaagggaaaggagagagctgacgggtctggctatggctccacccttcctccggagaagctgccctatttagtagagttaagcccagggagaaggaatcactttgcctactacaactatcacacttacgaagatggttctgactctagagataagccaaagctttaccgccttcagttaagtgttactgaagttgggacagaaaagttggatgacaactctatccagttgtttggcccaggaattcagccccatcactgtgaccttaccaacatggatggagtggtcactgtgacgcccagaagtatggacgcagaaacctacgtggaaggccagcgcatctcagaaaccaccatgctgcagagtggcatgaaagtgcagtttggggcgtcccatgtatttaagtttgtggaccccagtcaggatcatgctcttgcaaaaagatctgtggatggaggcctgatggttaagggcccaagacataaacctggaattgttcaggagacaacttttgatttgggaggagatattcatagtgggacagcattaccgacaagcaagagcaccactaggctggacagcgacagagtgtcgtctgcctctagcacagccgagcggggaatggtgaagccgatgatcagagtagaacagcagccagattatcgcaggcaagaaagcagaacacaggatgcttctgggcctgagctgatactacctgcaagcattgaattcagggaaagttctgaagattcatttttgtctgccattataaattatactaatagctctacagtccactttaagttgtcccctacatatgtattatatatggcatgccggtatgtattgtccaaccagtacagacctgacatcagccctacagagcgcacacataaagtcattgcagtcgtcaacaagatggtgagcatgatggagggtgtcatccagaaacagaagaatattgcaggggcacttgccttctggatggcaaatgcatctgaacttctcaacttcattaagcaagaccgagaccttagtcggatcacactggatgctcaagatgttttagcacatttggttcaaatggcatttaaatacttggttcactgtcttcaatcagaacttaataattacatgccagcctttctagatgaccctgaagagaacagtctgcaacgaccaaaaatagatgatgtgctgcacacgctcacaggagccatgtccttgctacgacgctgcagagtcaatgccgccctgaccatccagctcttctctcagctcttccacttcatcaatatgtggctgttcaatagattggtgaccgacccagattcggggctgtgctcccattactggggtgcgattatccgtcagcagttgggccatattgaagcctgggctgagaagcaggggctggaactggctgcggactgtcatctgagcaggatcgtgcaggcaacgactttgcttaccatggataagtatgcacctgatgacattccaaatataaacagcacctgctttaagttaaattcattacaacttcaagccttattacagaactatcactgtgcacctgatgagccttttatcccaacggatcttatagaaaatgtagtgactgtggctgaaaacactgccgatgagctggcccgcagtgatggaagggaagtgcagttggaggaggatcctgatctgcagctgccgtttcttttgccagaagatggttattcttgtgatgttgtcagaaacattccaaatggtttacaagaatttttagaccctctgtgccagagaggattttgcaggttaattcctcacacacgttcaccaggtacttggacaatatattttgaaggtgcagattatgaaagtcaccttctgcgtgagaacacagagctggctcagcctctgaggaaagaacctgaaataatcactgtgaccctaaaaaagcagaatggaatgggccttagcattgttgcagcaaagggtgctggtcaagataaactaggaatctatgtgaagtcggttgtgaaaggaggtgctgcagatgtggatggacgtctagctgcaggtgatcagctcctcagtgtggatggacgaagtctggttggactctctcaggaaagggcggcagaactcatgacaagaacaagctctgtggtgacactggaagtagcaaagcagggtgccatctaccacggtctggccacccttctcaatcagccatcccccatgatgcagagaatttcagatcgtcgtggctcaggtaaaccccgaccaaagagtgaaggctttgagctctataataattcaactcaaaatgggtctcctgagagtcctcagctgccttgggcagaatatagtgaaccaaagaaattgcctggtgatgacagactgatgaaaaatagagctgatcaccgttccagccccaacgtagcaaatcagcctcctagtcctggagggaaaagtgcatatgcctctggaacaacagcgaagataacatctgtctctactggaaacctctgcactgaggagcagacgcctccgcctagacctgaagcctaccccatccccactcagacgtacaccagagagtattttaccttcccagcttccaaatcccaggatcggatggctcctcctcagaaccagtggccaaattatgaggaaaagccacatatgcacacagatagtaatcattccagtattgcaattcagcgtgttacacgttcccaagaagaacttcgagaagataaagcttaccaacttgagcggcatcgaatagaggcagctatggaccgaaagtctgatagtgatatgtggataaatcagagctcctcactggactccagtacctctagccaggagcatctgaaccattcctctaagtcggtcacccctgcttccacactgaccaaaagtggccctggccgttggaaaacaccagcagccataccggccacccctgtggccgtctcccagccaatccgaacagacctgcctccgccacccccgccacctccagtccactatgccggtgatttcgatggaatgtccatggatttgcctctcccaccacccccttccgccaaccagatagggctgccgtctgcgcaggtggctgctgctgaacggagaaagagagaagaacatcagcgttggtatgagaaggagaaggcccgcctggaggaggagcgggagaggaagcggagagagcaggagaggaagttgggccagatgcgcactcagtccttaaaccctgctccgttttctcccctgactgcacagcagatgaagcccgaaaagccttccacactccagcggccacaggaaacagtcattcgggagctgcagcctcagcagcagccccgcacgatcgagcgcagagacttgcagtacattacagtcagcaaagaggagctttcctcgggggacagtctgtcccccgacccgtggaagcgggacgccaaggagaagctggagaagcagcagcagatgcacatcgtggacatgctgagcaaggagatccaggagctccagagcaaaccggaccgcagcgccgaggagagcgaccggctgcgcaagctcatgctggagtggcagttccagaagagactccaggagtcgaagcagaaggacgaagatgacgaggaggaggaggacgatgatgtggacaccatgctgatcatgcagcgcctggaggctgaacgaagagcgagggacgaggagcggaggcggcagcagcagttagaagagatgcgcaagcgggaagcggaagaccgagcgaggcaagaggaagagcgccggcggcaggaggaggagcgaacaaaacgagacgctgaagaaaagaggcgacaggaagaagggtattacagccgcctggaagccgagaggcgcagacagcacgacgaggcggcgcgcaggttgctggagcccgaggcgcccggtctgtgccgccctccgcttccccgggactacgagcccccgtccccgtcccccgcgcccggcgcccctcctcccccgcctcagcgaaacgcctcctacctcaaaacacaggtcctctcccccgactcgctgttcactgccaagtttgttgcatacaatgaggaggaggaggaggaggactgcagcctagcaggaccaaactcttacccaggatctactggagcagctgttggagcccatgacgcctgtcgggatgcaaaagagaagcgctctaaaagccaagatgcagattcacctggaagttctggggcccctgaaaacttgacattcaaggaacgccagcgtcttttttcacaaggtcaagatgtatccaataaagtgaaagcttctcgtaaattaacagaactggagaatgaactgaacacaaagtgaaagaaaatgaggagaacactttgtatttaccccaaaatcttttcagttgtgggtttgtaggtgcgagtttgaagaggaaaagaggaagggggttatatttctaagtgatttacaatttctgtttctaaaattgttgggatttagaaatgtttcaattccaagaaattttattttactttaccatgagattgccatttatgtaatttaaacactgtctagtttcttaattatctaactcacacgagggtaagttttttgttggtttcttttttggagtcctgagttcaaaggggacag

SEQ ID NO: 156527 - DNA, 6812 bp, Homo sapiens
  Payload ID: 10687
  Gene Symbol: MLLT4
  Gene Name: myeloid/lymphoid or mixed-lineage leukemia
  translocated to, 4
  Uniprot ID: P55196
  ENST ID: ENST00000392108
  CDS Start-End: 143-5098
gcggccgcggaggcggaggcagccgcggaggcggaggcggccggcggggggtggcgaggggcgccgggcccccgcggacctgtcgtcctcggcccgtcctccggccccggccccgcgcggctgaggaggcgcggccaggaccatgtcggcgggcggccgtgacgaggagcggcggaagctggccgacatcatccaccactggaacgccaaccggctggacctgttcgagatcagccagccgaccgaggatttggagttccatggagtgatgagattttattttcaagataaagctgctggaaactttgcaacaaaatgtattcgggtctctagtactgccaccactcaagatgtaatcgaaacgctcgcggagaaatttcgacctgatatgcgaatgctgtcctctcccaagtattcactctatgaagtgcatgtcagcggagaaagaagattggatatagatgagaaacctctagttgtacaactgaattggaacaaagatgatcgggaaggcagatttgttcttaagaatgagaatgacgccattcctcctaagaaggctcaaagtaatggacctgaaaagcaggaaaaagaaggggttatccagaacttcaagagaactctctcaaagaaagaaaagaaggaaaaaaagaagagagaaaaagaggcattgcgacaggcatctgataaagatgatagacctttccaaggggaggatgttgaaaattctcgactggctgctgaggtttacaaagacatgccggaaaccagctttactcgaaccatttctaatcctgaggtggttatgaaacgacggaggcagcaaaaattggaaaagagaatgcaggaatttcggagctcagatgggcggcctgattcaggtggaacattgagaatttatgcagatagtttaaaaccaaatattccctacaagacaatcctgctgtctactacagatcctgcagactttgctgtggctgaagctttagagaagtatggtctggaaaaagaaaaccctaaggattactgcatcgcccgggttatgcttcctcctggagcccagcattctgatgaaaagggtgctaaagaaattattcttgatgatgatgagtgtcctttacaaatcttcagggaatggccaagtgacaaagggattttagtctttcagttgaagaggaggccaccagaccacatcccaaagaaaaccaagaaacacttggaaggcaagacacccaagggaaaggagagagctgacgggtctggctatggctccacccttcctccggagaagctgccctatttagtagagttaagcccagggagaaggaatcactttgcctactacaactatcacacttacgaagatggttctgactctagagataagccaaagctttaccgccttcagttaagtgttactgaagttgggacagaaaagttggatgacaactctatccagttgtttggcccaggaattcagccccatcactgtgaccttaccaacatggatggagtggtcactgtgacgcccagaagtatggacgcagaaacctacgtggaaggccagcgcatctcagaaaccaccatgctgcagagtggcatgaaagtgcagtttggggcgtcccatgtatttaagtttgtggaccccagtcaggatcatgctcttgcaaaaagatctgtggatggaggcctgatggttaagggcccaagacataaacctggaattgttcaggagacaacttttgatttgggaggagatattcatagtgggacagcattaccgacaagcaagagcaccactaggctggacagcgacagagtgtcgtctgcctctagcacagccgagcggggaatggtgaagccgatgatcagagtagaacagcagccagattatcgcaggcaagaaagcagaacacaggatgcttctgggcctgagctgatactacctgcaagcattgaattcagggaaagttctgaagattcatttttgtctgccattataaattatactaatagctctacagtccactttaagttgtcccctacatatgtattatatatggcatgccggtatgtattgtccaaccagtacagacctgacatcagccctacagagcgcacacataaagtcattgcagtcgtcaacaagatggtgagcatgatggagggtgtcatccagaaacagaagaatattgcaggggcacttgccttctggatggcaaatgcatctgaacttctcaacttcattaagcaagaccgagaccttagtcggatcacactggatgctcaagatgttttagcacatttggttcaaatggcatttaaatacttggttcactgtcttcaatcagaacttaataattacatgccagcctttctagatgaccctgaagagaacagtctgcaacgaccaaaaatagatgatgtgctgcacacgctcacaggagccatgtccttgctacgacgctgcagagtcaatgccgccctgaccatccagctcttctctcagctcttccacttcatcaatatgtggctgttcaatagattggtgaccgacccagattcggggctgtgctcccattactggggtgcgattatccgtcagcagttgggccatattgaagcctgggctgagaagcaggggctggaactggctgcggactgtcatctgagcaggatcgtgcaggcaacgactttgcttaccatggataagtatgcacctgatgacattccaaatataaacagcacctgctttaagttaaattcattacaacttcaagccttattacagaactatcactgtgcacctgatgagccttttatcccaacggatcttatagaaaatgtagtgactgtggctgaaaacactgccgatgagctggcccgcagtgatggaagggaagtgcagttggaggaggatcctgatctgcagctgccgtttcttttgccagaagatggttattcttgtgatgttgtcagaaacattccaaatggtttacaagaatttttagaccctctgtgccagagaggattttgcaggttaattcctcacacacgttcaccaggtacttggacaatatattttgaaggtgcagattatgaaagtcaccttctgcgtgagaacacagagctggctcagcctctgaggaaagaacctgaaataatcactgtgaccctaaaaaagcagaatggaatgggccttagcattgttgcagcaaagggtgctggtcaagataaactaggaatctatgtgaagtcggttgtgaaaggaggtgctgcagatgtggatggacgtctagctgcaggtgatcagctcctcagtgtggatggacgaagtctggttggactctctcaggaaagggcggcagaactcatgacaagaacaagctctgtggtgacactggaagtagcaaagcagggtgccatctaccacggtctggccacccttctcaatcagccatcccccatgatgcagagaatttcagatcgtcgtggctcaggtaaaccccgaccaaagagtgaaggctttgagctctataataattcaactcaaaatgggtctcctgagagtcctcagctgccttgggcagaatatagtgaaccaaagaaattgcctggtgatgacagactgatgaaaaatagagctgatcaccgttccagccccaacgtagcaaatcagcctcctagtcctggagggaaaagtgcatatgcctctggaacaacagcgaagataacatctgtctctactggaaacctctgcactgaggagcagacgcctccgcctagacctgaagcctaccccatccccactcagacgtacaccagagagtattttaccttcccagcttccaaatcccaggatcggatggctcctcctcagaaccagtggccaaattatgaggaaaagccacatatgcacacagatagtaatcattccagtattgcaattcagcgtgttacacgttcccaagaagaacttcgagaagataaagcttaccaacttgagcggcatcgaatagaggcagctatggaccgaaagtctgatagtgatatgtggataaatcagagctcctcactggactccagtacctctagccaggagcatctgaaccattcctctaagtcggtcacccctgcttccacactgaccaaaagtggccctggccgttggaaaacaccagcagccataccggccacccctgtggccgtctcccagccaatccgaacagacctgcctccgccacccccgccacctccagtccactatgccggtgatttcgatggaatgtccatggatttgcctctcccaccacccccttccgccaaccagatagggctgccgtctgcgcaggtggctgctgctgaacggagaaagagagaagaacatcagcgttggtatgagaaggagaaggcccgcctggaggaggagcgggagaggaagcggagagagcaggagaggaagttgggccagatgcgcactcagtccttaaaccctgctccgttttctcccctgactgcacagcagatgaagcccgaaaagccttccacactccagcggccacaggaaacagtcattcgggagctgcagcctcagcagcagccccgcacgatcgagcgcagagacttgcagtacattacagtcagcaaagaggagctttcctcgggggacagtctgtcccccgacccgtggaagcgggacgccaaggagaagctggagaagcagcagcagatgcacatcgtggacatgctgagcaaggagatccaggagctccagagcaaaccggaccgcagcgccgaggagagcgaccggctgcgcaagctcatgctggagtggcagttccagaagagactccaggagtcgaagcagaaggacgaagatgacgaggaggaggaggacgatgatgtggacaccatgctgatcatgcagcgcctggaggctgaacgaagagcgagggacgaggagcggaggcggcagcagcagttagaagagatgcgcaagcgggaagcggaagaccgagcgaggcaagaggaagagcgccggcggcaggaggaggagcgaacaaaacgagacgctgaagaaaaggttatggtcctttaagggcagctagaattttaccaagttagcctgaacgtaatcgattggctggggcagagcgggctggaagttctgtgtttcttaagaagcacgaggcagagcagggcctggctcccccagctttgtgattggacctgcaactttaccccatctggcccacctacctctcttctggactgtctccagatccccttatctgccaagttttgtctccttcaaacttctgaactcttgggcgtgtgtagcagtgagcctctttgcaaagggttcgtttcctcgggcactcatctttactgaacatggcccagcttgtcattgtgaaggtgacattggttcagtgattgcttaaatggcatgtggaccgtgggaagcagtaggagcgtagtaagacagttggctgccattcaacatttcaaatagatggtttactcaaatcactcacttctggttgatggtaaagagagcagatggcttagaaaacatgatacaggaaaatttagtatgtaatccagtaaatatcctaagttatttattttcatgtgtgtgtgtgtgtttaaatcaagtaacccttttaattgaattttaaaatgacagcgaattttgacattctgagaaatggggattttgagatgtttctctccatatctccctttgtcctgtgtgtgtggccgacgccctctggatgaagaggctgtagccgttgagctccctgtgggggcctgtttcatcccgaggggactgcgtgttgctctgtgtggtttgagagaagctgctcttctctgttacttcccttctatgaaggtagaagctttcagtgttacaacttctgatggcggaaaatttagtttttattaataattccttcttggatagtctagtgaactatattaatagaacagtgtactgttcacagaaaagaacttgtagggagttttttgtagtgatatgctctattaggatacagaacaatctaagagtaagcttgatagacatgatgtgacttcacttaaatggagtagagtgaataatgtaaggacactcacctctgttgaaattggtgatttctgcattttgtagacctttgccctctaagtttatcatcatattatctgttgaatctgaacagcatttgaagtcctctcaaagagtttgagctttcaggattaggttcccctgtgagtctttcacttgtgtaatggtaagtcaacattgatgatctttctaaggaaatcagatttacaaaatgctgagccgcttgatgtctaagtgttggtggtttttgctgttgctttgctgttccatgaaagcgctccctggctgcttggagggctgtgcttttccaggtcagtgccagcttggctgtcccaggccgtgcacagtgcccattgctatagctgggcccagtcctggccacgccggagcctcggcgggggcagctgggttgtcacggcagcacagtgcacatgcagagaggaccaggccatgtttttcctgtgctgagaaactcttgggttatttaatttttccaatgtgttttcataactcatgattatttgaaatacacttgtgttagtaactgcttctataattaagtggtcactgtaaaaaggcgaataacctatttttatatcagaatgtccaaaactcatgggtttgctttgttatagaaaaatgtgccattcatttgttgggtagaataaagttgtcttgtaattgt

SEQ ID NO: 156528 - DNA, 7459 bp, Homo sapiens
  Payload ID: 10687
  Gene Symbol: MLLT4
  Gene Name: myeloid/lymphoid or mixed-lineage leukemia
  translocated to, 4
  Uniprot ID: P55196
  ENST ID: ENST00000392112
  CDS Start-End: 143-5374
gcggccgcggaggcggaggcagccgcggaggcggaggcggccggcggggggtggcgaggggcgccgggcccccgcggacctgtcgtcctcggcccgtcctccggccccggccccgcgcggctgaggaggcgcggccaggaccatgtcggcgggcggccgtgacgaggagcggcggaagctggccgacatcatccaccactggaacgccaaccggctggacctgttcgagatcagccagccgaccgaggatttggagttccatggagtgatgagattttattttcaagataaagctgctggaaactttgcaacaaaatgtattcgggtctctagtactgccaccactcaagatgtaatcgaaacgctcgcggagaaatttcgacctgatatgcgaatgctgtcctctcccaagtattcactctatgaagtgcatgtcagcggagaaagaagattggatatagatgagaaacctctagttgtacaactgaattggaacaaagatgatcgggaaggcagatttgttcttaagaatgagaatgacgccattcctcctaaggctcaaagtaatggacctgaaaagcaggaaaaagaaggggttatccagaacttcaagagaactctctcaaagaaagaaaagaaggaaaaaaagaagagagaaaaagaggcattgcgacaggcatctgataaagatgatagacctttccaaggggaggatgttgaaaattctcgactggctgctgaggtttacaaagacatgccggaaaccagctttactcgaaccatttctaatcctgaggtggttatgaaacgacggaggcagcaaaaattggaaaagagaatgcaggaatttcggagctcagatgggcggcctgattcaggtggaacattgagaatttatgcagatagtttaaaaccaaatattccctacaagacaatcctgctgtctactacagatcctgcagactttgctgtggctgaagctttagagaagtatggtctggaaaaagaaaaccctaaggattactgcatcgcccgggttatgcttcctcctggagcccagcattctgatgaaaagggtgctaaagaaattattcttgatgatgatgagtgtcctttacaaatcttcagggaatggccaagtgacaaagggattttagtctttcagttgaagaggaggccaccagaccacatcccaaagaaaaccaagaaacacttggaaggcaagacacccaagggaaaggagagagctgacgggtctggctatggctccacccttcctccggagaagctgccctatttagtagagttaagcccagatggttctgactctagagataagccaaagctttaccgccttcagttaagtgttactgaagttgggacagaaaagttggatgacaactctatccagttgtttggcccaggaattcagccccatcactgtgaccttaccaacatggatggagtggtcactgtgacgcccagaagtatggacgcagaaacctacgtggaaggccagcgcatctcagaaaccaccatgctgcagagtggcatgaaagtgcagtttggggcgtcccatgtatttaagtttgtggaccccagtcaggatcatgctcttgcaaaaagatctgtggatggaggcctgatggttaagggcccaagacataaacctggaattgttcaggagacaacttttgatttgggaggagatattcatagtgggacagcattaccgacaagcaagagcaccactaggctggacagcgacagagtgtcgtctgcctctagcacagccgagcggggaatggtgaagccgatgatcagagtagaacagcagccagattatcgcaggcaagaaagcagaacacaggatgcttctgggcctgagctgatactacctgcaagcattgaattcagggaaagttctgaagattcatttttgtctgccattataaattatactaatagctctacagtccactttaagttgtcccctacatatgtattatatatggcatgccggtatgtattgtccaaccagtacagacctgacatcagccctacagagcgcacacataaagtcattgcagtcgtcaacaagatggtgagcatgatggagggtgtcatccagaaacagaagaatattgcaggggcacttgccttctggatggcaaatgcatctgaacttctcaacttcattaagcaagaccgagaccttagtcggatcacactggatgctcaagatgttttagcacatttggttcaaatggcatttaaatacttggttcactgtcttcaatcagaacttaataattacatgccagcctttctagatgaccctgaagagaacagtctgcaacgaccaaaaatagatgatgtgctgcacacgctcacaggagccatgtccttgctacgacgctgcagagtcaatgccgccctgaccatccagctcttctctcagctcttccacttcatcaatatgtggctgttcaatagattggtgaccgacccagattcggggctgtgctcccattactggggtgcgattatccgtcagcagttgggccatattgaagcctgggctgagaagcaggggctggaactggctgcggactgtcatctgagcaggatcgtgcaggcaacgactttgcttaccatggataagtatgcacctgatgacattccaaatataaacagcacctgctttaagttaaattcattacaacttcaagccttattacagaactatcactgtgcacctgatgagccttttatcccaacggatcttatagaaaatgtagtgactgtggctgaaaacactgccgatgagctggcccgcagtgatggaagggaagtgcagttggaggaggatcctgatctgcagctgccgtttcttttgccagaagatggttattcttgtgatgttgtcagaaacattccaaatggtttacaagaatttttagaccctctgtgccagagaggattttgcaggttaattcctcacacacgttcaccaggtacttggacaatatattttgaaggtgcagattatgaaagtcaccttctgcgtgagaacacagagctggctcagcctctgaggaaagaacctgaaataatcactgtgaccctaaaaaagcagaatggaatgggccttagcattgttgcagcaaagggtgctggtcaagataaactaggaatctatgtgaagtcggttgtgaaaggaggtgctgcagatgatggacgtctagctgcaggtgatcagctcctcagtgtggatggacgaagtctggttggactctctcaggaaagggcggcagaactcatgacaagaacaagctctgtggtgacactggaagtagcaaagcagggtgccatctaccacggtctggccacccttctcaatcagccatcccccatgatgcagagaatttcagatcgtcgtggctcaggtaaaccccgaccaaagagtgaaggctttgagctctataataattcaactcaaaatgggtctcctgagagtcctcagctgccttgggcagaatatagtgaaccaaagaaattgcctggtgatgacagactgatgaaaaatagagctgatcaccgttccagccccaacgtagcaaatcagcctcctagtcctggagggaaaagtgcatatgcctctggaacaacagcgaagataacatctgtctctactggaaacctctgcactgaggagcagacgcctccgcctagacctgaagcctaccccatccccactcagacgtacaccagagagtattttaccttcccagcttccaaatcccaggatcggatggctcctcctcagaaccagtggccaaattatgaggaaaagccacatatgcacacagatagtaatcattccagtattgcaattcagcgtgttacacgttcccaagaagaacttcgagaagataaagcttaccaacttgagcggcatcgaatagaggcagctatggaccgaaagtctgatagtgatatgtggataaatcagagctcctcactggactccagtacctctagccaggagcatctgaaccattcctctaagtcggtcacccctgcttccacactgaccaaaagtggccctggccgttggaaaacaccagcagccataccggccacccctgtggccgtctcccagccaatccgaacagacctgcctccgccacccccgccacctccagtccactatgccggtgatttcgatggaatgtccatggatttgcctctcccaccacccccttccgccaaccagatagggctgccgtctgcgcaggtggctgctgctgaacggagaaagagagaagaacatcagcgttggtatgagaaggagaaggcccgcctggaggaggagcgggagaggaagcggagagagcaggagaggaagttgggccagatgcgcactcagtccttaaaccctgctccgttttctcccctgactgcacagcagatgaagcccgaaaagccttccacactccagcggccacaggaaacagtcattcgggagctgcagcctcagcagcagccccgcacgatcgagcgcagagacttgcagtacattacagtcagcaaagaggagctttcctcgggggacagtctgtcccccgacccgtggaagcgggacgccaaggagaagctggagaagcagcagcagatgcacatcgtggacatgctgagcaaggagatccaggagctccagagcaaaccggaccgcagcgccgaggagagcgaccggctgcgcaagctcatgctggagtggcagttccagaagagactccaggagtcgaagcagaaggacgaagatgacgaggaggaggaggacgatgatgtggacaccatgctgatcatgcagcgcctggaggctgaacgaagagcgaggttgcaggacgaggagcggaggcggcagcagcagttagaagagatgcgcaagcgggaagcggaagaccgagcgaggcaagaggaagagcgccggcggcaggaggaggagcgaacaaaacgagacgctgaagaaaagaggcgacaggaagaagggtattacagccgcctggaagccgagaggcgcagacagcacgacgaggcggcgcgcaggttgctggagcccgaggcgcccggaccaaactcttacccaggatctactggagcagctgttggagcccatgacgcctgtcgggatgcaaaagagaagcgctctaaaagccaagatgcagattcacctggaagttctggggcccctgaaaacttgacattcaaggaacgccagcgtcttttttcacaaggtcaagatgtatccaataaagtgaaagcttctcgtaaattaacagaactggagaatgaactgaacacaaagtgaaagaaaatgaggagaacactttgtatttaccccaaaatcttttcagttgtgggtttgtaggtgcgagtttgaagaggaaaagaggaagggggttatatttctaagtgatttacaatttctgtttctaaaattgttgggatttagaaatgtttcaattccaagaaattttattttactttaccatgagattgccatttatgtaatttaaacactgtctagtttcttaattatctaactcacacgagggtaagttttttgttggtttcttttttggagtcctgagttcaaaggggacagaactaagggcaggagaagagaatggatgtgtcttctctcccatcttcccctcatcatcgaccgaggagcacaaagaagttctgtttctgtttttttcagaaactttattttagctgtcaagcagagaatagcttgaactattcagactattgttggcactgtttagtagtgaccacacgctcttctacccgggaaggaacatatgacgacatgctcctcccatgtcccctgatggtgtctgttcccacaatatccttctagtctgcatcgtgaagtggcttaggccaaagcttcctgtgtgatgacgcacgtccgagactgttccatctcattcctcgcaaatttgagctcttctgatcaattctaaatatttgattaattttaattctgaaagaaaattttgaggatttaagcttaggggattttatttttataaataccagattattgttagacttaataaatcactgttaaatttaaagatgacagttaccttggaaagttcactaatacttcgctccaaggcgtctgtaaaagaagatatctttattggagcaatgttcatgtgactgggaatgacagaagaatgggagatgagtagggacccctcaagcacagctgtcactcagaaattttaaatttgaaaaagaaatcgattttcatctgtatgccgtcaaggaaggaattcagttacagggcatctgtaacttaaatattgtaagaataactcatatggaagttcaagctatttttatactataatagagttatttaattttaatttgttgaattattagttaccactgtcatttcttcagctatggatatgtggctgatgttggggagacggacctcagtgtgttttatattgtctggtgttaagatgataaattactttgtgattacaagcaaattttctatttgacaaagcccttggtggagtccaaatgatttttctgtaccatattgttctcttacacatacgtatgttaggaaaataggcacactttcaaagagaatgttctcttacacatacgtatgttaggaaaatagacacattttcaaagagaatgttctcttacatatgttaggaaaataggcacactttcaaagagaggtataggggctttttactgccttcgaaatcacttttaataaaagttgtatgataaatcattaaaaatgcgagtgtaaatatttttttttacctctatcagggtttttatttgaaagtgtgctcttaccatttccttgtttgagtaagagagtgaatggttctgagtgtttaggaaggatttgcttgcttgcagcagaagttctaggaaaagcaggcacctcccaaatatcttgaggacactggcagccttatggtgactaaatccacactttctttaaagagatgcagatgaattacttttctgttaatatatagaaaaatacacaggagaacatgcagatacatgtaaatatctacatacagggatatttgtatgtgtggttgtgaaacccatacacaagtggatttggccatctttgggcagtgaggtcaaatgtgaatatgtgtaaaagtgcttttcagaactgcattactatgagaaaacatcaaaactgctgtagttttccatttctactgtatttcagttgcaacctatttttaataaactttgtatgtatttaagtgtatttgctattgttttgaaagtgctgacaaagtttatatttgtaacatcagccttcctcgcccatctctttccatctgtctcttcttcattaaacacttactgagta

SEQ ID NO: 156529 - DNA, 7593 bp, Homo sapiens
  Payload ID: 10687
  Gene Symbol: MLLT4
  Gene Name: myeloid/lymphoid or mixed-lineage leukemia
  translocated to, 4
  Uniprot ID: P55196
  ENST ID: ENST00000400822
  CDS Start-End: 1-5505
atgtcggcgggcggccgtgacgaggagcggcggaagctggccgacatcatccaccactggaacgccaaccggctggacctgttcgagatcagccagccgaccgaggatttggagttccatggagtgatgagattttattttcaagataaagctgctggaaactttgcaacaaaatgtattcgggtctctagtactgccaccactcaagatgtaatcgaaacgctcgcggagaaatttcgacctgatatgcgaatgctgtcctctcccaagtattcactctatgaagtgcatgtcagcggagaaagaagattggatatagatgagaaacctctagttgtacaactgaattggaacaaagatgatcgggaaggcagatttgttcttaagaatgagaatgacgccattcctcctaaggctcaaagtaatggacctgaaaagcaggaaaaagaaggggttatccagaacttcaagagaactctctcaaagaaagaaaagaaggaaaaaaagaagagagaaaaagaggcattgcgacaggcatctgataaagatgatagacctttccaaggggaggatgttgaaaattctcgactggctgctgaggtttacaaagacatgccggaaaccagctttactcgaaccatttctaatcctgaggtggttatgaaacgacggaggcagcaaaaattggaaaagagaatgcaggaatttcggagctcagatgggcggcctgattcaggtggaacattgagaatttatgcagatagtttaaaaccaaatattccctacaagacaatcctgctgtctactacagatcctgcagactttgctgtggctgaagctttagagaagtatggtctggaaaaagaaaaccctaaggattactgcatcgcccgggttatgcttcctcctggagcccagcattctgatgaaaagggtgctaaagaaattattcttgatgatgatgagtgtcctttacaaatcttcagggaatggccaagtgacaaagggattttagtctttcagttgaagaggaggccaccagaccacatcccaaagaaaaccaagaaacacttggaaggcaagacacccaagggaaaggagagagctgacgggtctggctatggctccacccttcctccggagaagctgccctatttagtagagttaagcccagggagaaggaatcactttgcctactacaactatcacacttacgaagatggttctgactctagagataagccaaagctttaccgccttcagttaagtgttactgaagttgggacagaaaagttggatgacaactctatccagttgtttggcccaggaattcagccccatcactgtgaccttaccaacatggatggagtggtcactgtgacgcccagaagtatggacgcagaaacctacgtggaaggccagcgcatctcagaaaccaccatgctgcagagtggcatgaaagtgcagtttggggcgtcccatgtatttaagtttgtggaccccagtcaggatcatgctcttgcaaaaagatctgtggatggaggcctgatggttaagggcccaagacataaacctggaattgttcaggagacaacttttgatttgggaggagatattcatagtgggacagcattaccgacaagcaagagcaccactaggctggacagcgacagagtgtcgtctgcctctagcacagccgagcggggaatggtgaagccgatgatcagagtagaacagcagccagattatcgcaggcaagaaagcagaacacaggatgcttctgggcctgagctgatactacctgcaagcattgaattcagggaaagttctgaagattcatttttgtctgccattataaattatactaatagctctacagtccactttaagttgtcccctacatatgtattatatatggcatgccggtatgtattgtccaaccagtacagacctgacatcagccctacagagcgcacacataaagtcattgcagtcgtcaacaagatggtgagcatgatggagggtgtcatccagaaacagaagaatattgcaggggcacttgccttctggatggcaaatgcatctgaacttctcaacttcattaagcaagaccgagaccttagtcggatcacactggatgctcaagatgttttagcacatttggttcaaatggcatttaaatacttggttcactgtcttcaatcagaacttaataattacatgccagcctttctagatgaccctgaagagaacagtctgcaacgaccaaaaatagatgatgtgctgcacacgctcacaggagccatgtccttgctacgacgctgcagagtcaatgccgccctgaccatccagctcttctctcagctcttccacttcatcaatatgtggctgttcaatagattggtgaccgacccagattcggggctgtgctcccattactggggtgcgattatccgtcagcagttgggccatattgaagcctgggctgagaagcaggggctggaactggctgcggactgtcatctgagcaggatcgtgcaggcaacgactttgcttaccatggataagtatgcacctgatgacattccaaatataaacagcacctgctttaagttaaattcattacaacttcaagccttattacagaactatcactgtgcacctgatgagccttttatcccaacggatcttatagaaaatgtagtgactgtggctgaaaacactgccgatgagctggcccgcagtgatggaagggaagtgcagttggaggaggatcctgatctgcagctgccgtttcttttgccagaagatggttattcttgtgatgttgtcagaaacattccaaatggtttacaagaatttttagaccctctgtgccagagaggattttgcaggttaattcctcacacacgttcaccaggtacttggacaatatattttgaaggtgcagattatgaaagtcaccttctgcgtgagaacacagagctggctcagcctctgaggaaagaacctgaaataatcactgtgaccctaaaaaagcagaatggaatgggccttagcattgttgcagcaaagggtgctggtcaagataaactaggaatctatgtgaagtcggttgtgaaaggaggtgctgcagatgtggatggacgtctagctgcaggtgatcagctcctcagtgtggatggacgaagtctggttggactctctcaggaaagggcggcagaactcatgacaagaacaagctctgtggtgacactggaagtagcaaagcagggtgccatctaccacggtctggccacccttctcaatcagccatcccccatgatgcagagaatttcagatcgtcgtggctcaggtaaaccccgaccaaagagtgaaggctttgagctctataataattcaactcaaaatgggtctcctgagagtcctcagctgccttgggcagaatatagtgaaccaaagaaattgcctggtgatgacagactgatgaaaaatagagctgatcaccgttccagccccaacgtagcaaatcagcctcctagtcctggagggaaaagtgcatatgcctctggaacaacagcgaagataacatctgtctctactggaaacctctgcactgaggagcagacgcctccgcctagacctgaagcctaccccatccccactcagacgtacaccagagagtattttaccttcccagcttccaaatcccaggatcggatggctcctcctcagaaccagtggccaaattatgaggaaaagccacatatgcacacagatagtaatcattccagtattgcaattcagcgtgttacacgttcccaagaagaacttcgagaagataaagcttaccaacttgagcggcatcgaatagaggcagctatggaccgaaagtctgatagtgatatgtggataaatcagagctcctcactggactccagtacctctagccaggagcatctgaaccattcctctaagtcggtcacccctgcttccacactgaccaaaagtggccctggccgttggaaaacaccagcagccataccggccacccctgtggccgtctcccagccaatccgaacagacctgcctccgccacccccgccacctccagtccactatgccggtgatttcgatggaatgtccatggatttgcctctcccaccacccccttccgccaaccagatagggctgccgtctgcgcaggtggctgctgctgaacggagaaagagagaagaacatcagcgttggtatgagaaggagaaggcccgcctggaggaggagcgggagaggaagcggagagagcaggagaggaagttgggccagatgcgcactcagtccttaaaccctgctccgttttctcccctgactgcacagcagatgaagcccgaaaagccttccacactccagcggccacaggaaacagtcattcgggagctgcagcctcagcagcagccccgcacgatcgagcgcagagacttgcagtacattacagtcagcaaagaggagctttcctcgggggacagtctgtcccccgacccgtggaagcgggacgccaaggagaagctggagaagcagcagcagatgcacatcgtggacatgctgagcaaggagatccaggagctccagagcaaaccggaccgcagcgccgaggagagcgaccggctgcgcaagctcatgctggagtggcagttccagaagagactccaggagtcgaagcagaaggacgaagatgacgaggaggaggaggacgatgatgtggacaccatgctgatcatgcagcgcctggaggctgaacgaagagcgaggactgctatgccagcaatctctgttctagatttgttgcaggacgaggagcggaggcggcagcagcagttagaagagatgcgcaagcgggaagcggaagaccgagcgaggcaagaggaagagcgccggcggcaggaggaggagcgaacaaaacgagacgctgaagaaaagaggcgacaggaagaagggtattacagccgcctggaagccgagaggcgcagacagcacgacgaggcggcgcgcaggttgctggagcccgaggcgcccggtctgtgccgccctccgcttccccgggactacgagcccccgtccccgtcccccgcgcccggcgcccctcctcccccgcctcagcgaaacgcctcctacctcaaaacacaggtcctctcccccgactcgctgttcactgccaagtttgttgcatacaatgaggaggaggaggaggaggactgcagcctagcaggaccaaactcttacccaggatctactggagcagctgttggagcccatgacgcctgtcgggatgcaaaagagaagcgctctaaaagccaagatgcagattcacctggaagttctggggcccctgaaaacttgacattcaaggaacgccagcgtcttttttcacaaggtcaagatgtatccaataaagtgaaagcttctcgtaaattaacagaactggagaatgaactgaacacaaagtgaaagaaaatgaggagaacactttgtatttaccccaaaatcttttcagttgtgggtttgtaggtgcgagtttgaagaggaaaagaggaagggggttatatttctaagtgatttacaatttctgtttctaaaattgttgggatttagaaatgtttcaattccaagaaattttattttactttaccatgagattgccatttatgtaatttaaacactgtctagtttcttaattatctaactcacacgagggtaagttttttgttggtttcttttttggagtcctgagttcaaaggggacagaactaagggcaggagaagagaatggatgtgtcttctctcccatcttcccctcatcatcgaccgaggagcacaaagaagttctgtttctgtttttttcagaaactttattttagctgtcaagcagagaatagcttgaactattcagactattgttggcactgtttagtagtgaccacacgctcttctacccgggaaggaacatatgacgacatgctcctcccatgtcccctgatggtgtctgttcccacaatatccttctagtctgcatcgtgaagtggcttaggccaaagcttcctgtgtgatgacgcacgtccgagactgttccatctcattcctcgcaaatttgagctcttctgatcaattctaaatatttgattaattttaattctgaaagaaaattttgaggatttaagcttaggggattttatttttataaataccagattattgttagacttaataaatcactgttaaatttaaagatgacagttaccttggaaagttcactaatacttcgctccaaggcgtctgtaaaagaagatatctttattggagcaatgttcatgtgactgggaatgacagaagaatgggagatgagtagggacccctcaagcacagctgtcactcagaaattttaaatttgaaaaagaaatcgattttcatctgtatgccgtcaaggaaggaattcagttacagggcatctgtaacttaaatattgtaagaataactcatatggaagttcaagctatttttatactataatagagttatttaattttaatttgttgaattattagttaccactgtcatttcttcagctatggatatgtggctgatgttggggagacggacctcagtgtgttttatattgtctggtgttaagatgataaattactttgtgattacaagcaaattttctatttgacaaagcccttggtggagtccaaatgatttttctgtaccatattgttctcttacacatacgtatgttaggaaaataggcacactttcaaagagaatgttctcttacacatacgtatgttaggaaaatagacacattttcaaagagaatgttctcttacatatgttaggaaaataggcacactttcaaagagaggtataggggctttttactgccttcgaaatcacttttaataaaagttgtatgataaatcattaaaaatgcgagtgtaaatatttttttttacctctatcagggtttttatttgaaagtgtgctcttaccatttccttgtttgagtaagagagtgaatggttctgagtgtttaggaaggatttgcttgcttgcagcagaagttctaggaaaagcaggcacctcccaaatatcttgaggacactggcagccttatggtgactaaatccacactttctttaaagagatgcagatgaattacttttctgttaatatatagaaaaatacacaggagaacatgcagatacatgtaaatatctacatacagggatatttgtatgtgtggttgtgaaacccatacacaagtggatttggccatctttgggcagtgaggtcaaatgtgaatatgtgtaaaagtgcttttcagaactgcattactatgagaaaacatcaaaactgctgtagttttccatttctactgtatttcagttgcaacctatttttaataaactttgtatgtatttaagtgtatttgctattgttttgaaagtgctgacaaagtttatatttgtaacatcagccttcctcgcccatctctttccatctgtctcttcttcattaaacacttactgagtatga

SEQ ID NO: 156530 - DNA, 875 bp, Homo sapiens
  Payload ID: 10687
  Gene Symbol: MLLT4
  Gene Name: myeloid/lymphoid or mixed-lineage leukemia
  translocated to, 4
  ENST ID: ENST00000400824
  CDS Start-End: 134-875
gaggcggaggcagccgcggaggcggaggcggccggcggggggtggcgaggggcgccgggcccccgcggacctgtcgtcctcggcccgtcctccggccccggccccgcgcggctgaggaggcgcggccaggaccatgtcggcgggcggccgtgacgaggagcggcggaagctggccgacatcatccaccactggaacgccaaccggctggacctgttcgagatcagccagccgaccgaggatttggagttccatggagtgatgagattttattttcaagataaagctgctggaaactttgcaacaaaatgtattcgggtctctagtactgccaccactcaagatgtaatcgaaacgctcgcggagaaatttcgacctgatatgcgaatgctgtcctctcccaagtattcactctatgaagtgcatgtcagcggagaagaaagaagattggatatagatgagaaacctctagttgtacaactgaattggaacaaagatgatcgggaaggcagatttgttcttaagaatgagaatgacgccattcctcctaagaaggctcaaagtaatggacctgaaaagcaggaaaaagaaggggttatccagaacttcaagagaactctctcaaagaaagaaaagaaggaaaaaaagaagagagaaaaagaggcattgcgacaggcatctgataaagatgatagacctttccaaggggaggatgttgaaaattctcgactggctgctgaggtttacaaagacatgccggaaaccagctttactcgaaccatttctaatcctgaggtggttatgaaacgacggaggcagcaaaaattggaaaagagaatgcaggaatttcggagctcagatgggcggcctgattcag

SEQ ID NO: 156531 - DNA, 963 bp, Homo sapiens
  Payload ID: 10687
  Gene Symbol: MLLT4
  Gene Name: myeloid/lymphoid or mixed-lineage leukemia
  translocated to, 4
  ENST ID: ENST00000400825
  CDS Start-End: 212-963
ggcggggctgaggcggcgcggcgcggcgcggactgagccccaggcggaggccaagtcggaggacgcggcgcggccgcggaggcggaggcagccgcggaggcggaggcggccggcggggggtggcgaggggcgccgggcccccgcggacctgtcgtcctcggcccgtcctccggccccggccccgcgcggctgaggaggcgcggccaggaccatgtcggcgggcggccgtgacgaggagcggcggaagctggccgacatcatccaccactggaacgccaaccggctggacctgttcgagatcagccagccgaccgaggatttggagttccatggagtgatgagattttattttcaagataaagctgctggaaactttgcaacaaaatgtattcgggtctctagtactgccaccactcaagatgtaatcgaaacgctcgcggagaaatttcgacctgatatgcgaatgctgtcctctcccaagtattcactctatgaagtgcatgtcagcggagaagaaagaagattggatatagatgagaaacctctagttgtacaactgaattggaacaaagatgatcgggaaggcagatttgttcttaagaatgagaatgacgccattcctcctaaggctcaaagtaatggacctgaaaagcaggaaaaagaaggggttatccagaacttcaagagaactctctcaaagaaagaaaagaaggaaaaaaagaagagagaaaaagaggcattgcgacaggcatctgataaagatgatagacctttccaaggggaggatgttgaaaattctcgactggctgctgaggtttacaaagacatgccggaaaccagctttactcgaaccatttctaatcctgaggtggttatgaaacgacggaggcagcaaaaattggaaaagagaatgcaggaatttcggagctcagatgggcggcctgattcaggtggaacattgag

SEQ ID NO: 156532 - DNA, 5475 bp, Homo sapiens
  Payload ID: 10687
  Gene Symbol: MLLT4
  Gene Name: myeloid/lymphoid or mixed-lineage leukemia
  translocated to, 4
  Uniprot ID: P55196
  ENST ID: ENST00000447894
  CDS Start-End: 1-5475
atgtcggcgggcggccgtgacgaggagcggcggaagctggccgacatcatccaccactggaacgccaaccggctggacctgttcgagatcagccagccgaccgaggatttggagttccatggagtgatgagattttattttcaagataaagctgctggaaactttgcaacaaaatgtattcgggtctctagtactgccaccactcaagatgtaatcgaaacgctcgcggagaaatttcgacctgatatgcgaatgctgtcctctcccaagtattcactctatgaagtgcatgtcagcggagaaagaagattggatatagatgagaaacctctagttgtacaactgaattggaacaaagatgatcgggaaggcagatttgttcttaagaatgagaatgacgccattcctcctaagaaggctcaaagtaatggacctgaaaagcaggaaaaagaaggggttatccagaacttcaagagaactctctcaaagaaagaaaagaaggaaaaaaagaagagagaaaaagaggcattgcgacaggcatctgataaagatgatagacctttccaaggggaggatgttgaaaattctcgactggctgctgaggtttacaaagacatgccggaaaccagctttactcgaaccatttctaatcctgaggtggttatgaaacgacggaggcagcaaaaattggaaaagagaatgcaggaatttcggagctcagatgggcggcctgattcaggtggaacattgagaatttatgcagatagtttaaaaccaaatattccctacaagacaatcctgctgtctactacagatcctgcagactttgctgtggctgaagctttagagaagtatggtctggaaaaagaaaaccctaaggattactgcatcgcccgggttatgcttcctcctggagcccagcattctgatgaaaagggtgctaaagaaattattcttgatgatgatgagtgtcctttacaaatcttcagggaatggccaagtgacaaagggattttagtctttcagttgaagaggaggccaccagaccacatcccaaagaaaaccaagaaacacttggaaggcaagacacccaagggaaaggagagagctgacgggtctggctatggctccacccttcctccggagaagctgccctatttagtagagttaagcccagggagaaggaatcactttgcctactacaactatcacacttacgaagatggttctgactctagagataagccaaagctttaccgccttcagttaagtgttactgaagttgggacagaaaagttggatgacaactctatccagttgtttggcccaggaattcagccccatcactgtgaccttaccaacatggatggagtggtcactgtgacgcccagaagtatggacgcagaaacctacgtggaaggccagcgcatctcagaaaccaccatgctgcagagtggcatgaaagtgcagtttggggcgtcccatgtatttaagtttgtggaccccagtcaggatcatgctcttgcaaaaagatctgtggatggaggcctgatggttaagggcccaagacataaacctggaattgttcaggagacaacttttgatttgggaggagatattcatagtgggacagcattaccgacaagcaagagcaccactaggctggacagcgacagagtgtcgtctgcctctagcacagccgagcggggaatggtgaagccgatgatcagagtagaacagcagccagattatcgcaggcaagaaagcagaacacaggatgcttctgggcctgagctgatactacctgcaagcattgaattcagggaaagttctgaagattcatttttgtctgccattataaattatactaatagctctacagtccactttaagttgtcccctacatatgtattatatatggcatgccggtatgtattgtccaaccagtacagacctgacatcagccctacagagcgcacacataaagtcattgcagtcgtcaacaagatggtgagcatgatggagggtgtcatccagaaacagaagaatattgcaggggcacttgccttctggatggcaaatgcatctgaacttctcaacttcattaagcaagaccgagaccttagtcggatcacactggatgctcaagatgttttagcacatttggttcaaatggcatttaaatacttggttcactgtcttcaatcagaacttaataattacatgccagcctttctagatgaccctgaagagaacagtctgcaacgaccaaaaatagatgatgtgctgcacacgctcacaggagccatgtccttgctacgacgctgcagagtcaatgccgccctgaccatccagctcttctctcagctcttccacttcatcaatatgtggctgttcaatagattggtgaccgacccagattcggggctgtgctcccattactggggtgcgattatccgtcagcagttgggccatattgaagcctgggctgagaagcaggggctggaactggctgcggactgtcatctgagcaggatcgtgcaggcaacgactttgcttaccatggataagtatgcacctgatgacattccaaatataaacagcacctgctttaagttaaattcattacaacttcaagccttattacagaactatcactgtgcacctgatgagccttttatcccaacggatcttatagaaaatgtagtgactgtggctgaaaacactgccgatgagctggcccgcagtgatggaagggaagtgcagttggaggaggatcctgatctgcagctgccgtttcttttgccagaagatggttattcttgtgatgttgtcagaaacattccaaatggtttacaagaatttttagaccctctgtgccagagaggattttgcaggttaattcctcacacacgttcaccaggtacttggacaatatattttgaaggtgcagattatgaaagtcaccttctgcgtgagaacacagagctggctcagcctctgaggaaagaacctgaaataatcactgtgaccctaaaaaagcagaatggaatgggccttagcattgttgcagcaaagggtgctggtcaagataaactaggaatctatgtgaagtcggttgtgaaaggaggtgctgcagatgtggatggacgtctagctgcaggtgatcagctcctcagtgtggatggacgaagtctggttggactctctcaggaaagggcggcagaactcatgacaagaacaagctctgtggtgacactggaagtagcaaagcagggtgccatctaccacggtctggccacccttctcaatcagccatcccccatgatgcagagaatttcagatcgtcgtggctcaggtaaaccccgaccaaagagtgaaggctttgagctctataataattcaactcaaaatgggtctcctgagagtcctcagctgccttgggcagaatatagtgaaccaaagaaattgcctggtgatgacagactgatgaaaaatagagctgatcaccgttccagccccaacgtagcaaatcagcctcctagtcctggagggaaaagtgcatatgcctctggaacaacagcgaagataacatctgtctctactggaaacctctgcactgaggagcagacgcctccgcctagacctgaagcctaccccatccccactcagacgtacaccagagagtattttaccttcccagcttccaaatcccaggatcggatggctcctcctcagaaccagtggccaaattatgaggaaaagccacatatgcacacagatagtaatcattccagtattgcaattcagcgtgttacacgttcccaagaagaacttcgagaagataaagcttaccaacttgagcggcatcgaatagaggcagctatggaccgaaagtctgatagtgatatgtggataaatcagagctcctcactggactccagtacctctagccaggagcatctgaaccattcctctaagtcggtcacccctgcttccacactgaccaaaagtggccctggccgttggaaaacaccagcagccataccggccacccctgtggccgtctcccagccaatccgaacagacctgcctccgccacccccgccacctccagtccactatgccggtgatttcgatggaatgtccatggatttgcctctcccaccacccccttccgccaaccagatagggctgccgtctgcgcaggtggctgctgctgaacggagaaagagagaagaacatcagcgttggtatgagaaggagaaggcccgcctggaggaggagcgggagaggaagcggagagagcaggagaggaagttgggccagatgcgcactcagtccttaaaccctgctccgttttctcccctgactgcacagcagatgaagcccgaaaagccttccacactccagcggccacaggaaacagtcattcgggagctgcagcctcagcagcagccccgcacgatcgagcgcagagacttgcagtacattacagtcagcaaagaggagctttcctcgggggacagtctgtcccccgacccgtggaagcgggacgccaaggagaagctggagaagcagcagcagatgcacatcgtggacatgctgagcaaggagatccaggagctccagagcaaaccggaccgcagcgccgaggagagcgaccggctgcgcaagctcatgctggagtggcagttccagaagagactccaggagtcgaagcagaaggacgaagatgacgaggaggaggaggacgatgatgtggacaccatgctgatcatgcagcgcctggaggctgaacgaagagcgaggttgcaggacgaggagcggaggcggcagcagcagttagaagagatgcgcaagcgggaagcggaagaccgagcgaggcaagaggaagagcgccggcggcaggaggaggagcgaacaaaacgagacgctgaagaaaagaggcgacaggaagaagggtattacagccgcctggaagccgagaggcgcagacagcacgacgaggcggcgcgcaggttgctggagcccgaggcgcccggtctgtgccgccctccgcttccccgggactacgagcccccgtccccgtcccccgcgcccggcgcccctcctcccccgcctcagcgaaacgcctcctacctcaaaacacaggtcctctcccccgactcgctgttcactgccaagtttgttgcatacaatgaggaggaggaggaggaggactgcagcctagcaggaccaaactcttacccaggatctactggagcagctgttggagcccatgacgcctgtcgggatgcaaaagagaagcgctctaaaagccaagatgcagattcacctggaagttctggggcccctgaaaacttgacattcaaggaacgccagcgtcttttttcacaaggtcaagatgtatccaataaagtgaaagcttctcgtaaattaacagaactggagaatgaactgaacacaaagtga

SEQ ID NO: 156533 - DNA, 1807 bp, Homo sapiens
  Payload ID: 10687
  Gene Symbol: MLLT4
  Gene Name: myeloid/lymphoid or mixed-lineage leukemia
  translocated to, 4
  ENST ID: ENST00000423229
  CDS Start-End: 1-1168
ggaaaaagaaaaccctaaggattactgcatcgcccgggttatgcttcctcctggagcccagcattctgatgaaaagggtgctaaagaaattattcttgatgatgatgagtgtcctttacaaatcttcagggaatggccaagtgacaaagggattttagtctttcagttgaagaggaggccaccagaccacatcccaaagaaaaccaagaaacacttggaaggcaagacacccaagggaaaggagagagctgacgggtctggctatggctccacccttcctccggagaagctgccctatttagtagagttaagcccagatggttctgactctagagataagccaaagctttaccgccttcagttaagtgttactgaagttgggacagaaaagttggatgacaactctatccagttgtttggcccaggaattcagccccatcactgtgaccttaccaacatggatggagtggtcactgtgacgcccagaagtatggacgcagaaacctacgtggaaggccagcgcatctcagaaaccaccatgctgcagagtggcatgaaagtgcagtttggggcgtcccatgtatttaagtttgtggaccccagtcaggatcatgctcttgcaaaaagatctgtggatggaggcctgatggttaagggcccaagacataaacctggaattgttcaggagacaacttttgatttgggaggagatattcatagtgggacagcattaccgacaagcaagagcaccactaggctggacagcgacagagtgtcgtctgcctctagcacagccgagcggggaatggtgaagccgatgatcagagtagaacagcagccagattatcgcaggcaagaaagcagaacacaggatgcttctgggcctgagctgatactacctgcaagcattgaattcagggaaagttctgaagattcatttttgtctgccattataaattatactaatagctctacagtccactttaagttgtcccctacatatgtattatatatggcatgccggtatgtattgtccaaccagtacagacctgacatcagccctacagagcgcacacataaagtcattgcagtcgtcaacaagatggtgagcatgatggagggtgtcatccaggtacgttccagccggccagccatgctcctccagtgattgtggttgtaattgctaagccagtgaattcagcttctttaaggcttctcatttggttacaagatttttttctaaaataaaagttatgtaaatattgtaggaaaatgtataactttaaagagttgaaaggaaatgcaagcttttttctattttgttttccctgtaaaacttcagcataagtgaagttaacttgtagtaatagttgtgagaaagtgctgagactgttgtgggcttttgtagaattttttctgtaaataatttgttgagatgaagttcatataatattaaccattttgaagtgaacaattcagtcgcatttggtgcattcacagtgttgtgcagccaccacccctgtcggttccaaaacgtctccatcacctcagagcgatacccctcaagtagttcctggggtttttctcttcccccgttccctggtaacgccttcttagactttttaaaaatggttctcaaaagtcacttgctcctgtgtaatgagcctagacgttggtagtaattgggctttttgatagcacatgtgtaggtgtaatggacattgtaacatacttctcacttaaaatgaaattctgtcataaacctgttttcaaaatttcagaagataaaggtattttgttggtagaa

SEQ ID NO: 156534 - DNA, 1031 bp, Homo sapiens
  Payload ID: 10687
  Gene Symbol: MLLT4
  Gene Name: myeloid/lymphoid or mixed-lineage leukemia
  translocated to, 4
  ENST ID: ENST00000507704
  CDS Start-End: 1-941
gtctgtcccccgacccgtggaagcgggacgccaaggagaagctggagaagcagcagcagatgcacatcgtggacatgctgagcaaggagatccaggagctccagagcaaaccggaccgcagcgccgaggagagcgaccggctgcgcaagctcatgctggagtggcagttccagaagagactccaggagtcgaagcagaaggacgaagatgacgaggaggaggaggacgatgatgtggacaccatgctgatcatgcagcgcctggaggctgaacgaagagcgagggacgaggagcggaggcggcagcagcagttagaagagatgcgcaagcgggaagcggaagaccgagcgaggcaagaggaagagcgccggcggcaggaggaggagcgaacaaaacgagacgctgaagaaaagaggcgacaggaagaagggtattacagccgcctggaagccgagaggcgcagacagcacgacgaggcggcgcgcaggttgctggagcccgaggcgcccggtctgtgccgccctccgcttccccgggactacgagcccccgtccccgtcccccgcgcccggcgcccctcctcccccgcctcagcgaaacgcctcctacctcaaaacacaggtcctctcccccgactcgctgttcactgccaagtttgttgcatacaatgaggaggaggaggaggaggactgcagcctagcaggaccaaactcttacccaggatctactggagcagctgttggagcccatgacgcctgtcgggatgcaaaagagaagcgctctaaaagccaagatgcagattcacctggaagttctggggcccctgaaaacttgacattcaaggaacgccagcgtcttttttcacaaggtcaagatgtatccaataaagtgaaagcttctcgtaaattaacagaactggagaatgaactgaacacaaagtgaaagaaaatgaggagaacactttgtatttaccccaaaatcttttcagttgtgggtttgtaggtgcgagtttgaagaggaaaagaggaaggg

SEQ ID NO: 156535 - DNA, 746 bp, Homo sapiens
  Payload ID: 10687
  Gene Symbol: MLLT4
  Gene Name: myeloid/lymphoid or mixed-lineage leukemia
  translocated to, 4
  ENST ID: ENST00000515794
  CDS Start-End: 1-373
cgatggcgtctttctctccaactcattccagccaccctcagccaaagccaacagtactgctcacaaaaaaggccagcccctgccccctccaaaaaaatccagctcctaccatcccagccactgcaaaggtagaggaccaaactcttacccaggatctactggagcagctgttggagcccatgacgcctgtcgggatgcaaaagagaagcgctctaaaagccaagatgcagattcacctggaagttctggggcccctgaaaacttgacattcaaggaacgccagcgtcttttttcacaaggtcaagatgtatccaataaagtgaaagcttctcgtaaattaacagaactggagaatgaactgaacacaaagtgaaagaaaatgaggagaacactttgtatttaccccaaaatcttttcagttgtgggtttgtaggtgcgagtttgaagaggaaaagaggaagggggttatatttctaagtgatttacaatttctgtttctaaaattgttgggatttagaaatgtttcaattccaagaaattttattttactttaccatgagattgccatttatgtaatttaaacactgtctagtttcttaattatctaactcacacgagggtaagttttttgttggtttcttttttggagtcctgagttcaaaggggacagaactaagggcaggagaagagaatggatgtgtcttctctcccatcttcccctcatcatcgaccgaggagcacaaaga

SEQ ID NO: 156536 - DNA, 606 bp, Homo sapiens
  Payload ID: 10687
  Gene Symbol: MLLT4
  Gene Name: myeloid/lymphoid or mixed-lineage leukemia
  translocated to, 4
  ENST ID: ENST00000485634
  CDS Start-End: 1-574
gcgaaacgcctcctacctcaaaacacaggtcctctcccccgactcgctgttcactgccaagtttgttgcatacaatgaggaggaggaggaggaggactgcagcctagcaggtcaggataagtactccagcacaagaaagtctcatggggaccttcttcctgcccctcttaaaccacggccacccccctgccagccacgcccggcctccgatggcgtctttctctccaactcattccagccaccctcagccaaagccaacagtactgctcacaaaaaaggccagcccctgccccctccaaaaaaatccagctcctaccatcccagccactgcaaaggaccaaactcttacccaggatctactggagcagctgttggagcccatgacgcctgtcgggatgcaaaagagaagcgctctaaaagccaagatgcagattcacctggaagttctggggcccctgaaaacttgacattcaaggaacgccagcgtcttttttcacaaggtcaagatgtatccaataaagtgaaagcttctcgtaaattaacagaactggagaatgaactgaacacaaagtgaaagaaaatgaggagaacactttgtatttaccc

SEQ ID NO: 156537 - DNA, 867 bp, Homo sapiens
  Payload ID: 10687
  Gene Symbol: MLLT4
  Gene Name: myeloid/lymphoid or mixed-lineage leukemia
  translocated to, 4
  ENST ID: ENST00000476946
  CDS Start-End: 1-389
agaagcagcagcagatgcacatcgtggacatgctgagcaaggagatccaggagctccagagcaaaccggaccgcagcgccgaggagagcgaccggctgcgcaagctcatgctggagtggcagttccagaagagactccaggagtcgaagcagaaggacgaagatgacgaggaggaggaggacgatgatgtggacaccatgctgatcatgcagcgcctggaggctgaacgaagagcgaggttgcaggacgaggagcggaggcggcagcagcagttagaagagatgcgcaagcgggaagcggaagaccgagcgaggcaagaggaagagcgccggcggcaggaggaggagcgaacaaaacgagacgctgaagaaaaggttatggtcctttaagggcagctagaattttaccaagttagcctgaacgtaatcgattggctggggcagagcgggctggaagttctgtgtttcttaagaagcacgaggcagagcagggcctggctcccccagctttgtgattggacctgcaactttaccccatctggcccacctacctctcttctggactgtctccagatccccttatctgccaagttttgtctccttcaaacttctgaactcttgggcgtgtgtagcagtgagcctctttgcaaagggttcgtttcctcgggcactcatctttactgaacatggcccagcttgtcattgtgaaggtgacattggttcagtgattgcttaaatggcatgtggaccgtgggaagcagtaggagcgtagtaagacagttggctgccattcaacatttcaaatagatggtttactcaaatcactcacttctggttgatggtaaagagagcagatggcttagaaaac

SEQ ID NO: 156538 - DNA, 728 bp, Homo sapiens
  Payload ID: 10687
  Gene Symbol: MLLT4
  Gene Name: myeloid/lymphoid or mixed-lineage leukemia
  translocated to, 4
  ENST ID: ENST00000497596
  CDS Start-End: 1-504
gctgcggactgtcatctgagcaggatcgtgcaggcaacgactttgcttaccatggataagtatgcacctgatgacattccaaatataaacagcacctgctttaagttaaattcattacaacttcaagccttattacagaactatcactgtgcacctgatgagccttttatcccaacggatcttatagaaaatgtagtgactgtggctgaaaacactgccgatgagctggcccgcagtgatggaagggaagtgcagttggaggaggatcctgatctgcagctgccgtttcttttgccagaagatggttattcttgtgatgttgtcagaaacattccaaatggtttacaagaatttttagaccctctgtgccagagaggattttgcaggttaattcctcacacacgttcaccaggtacttggacaatatattttgaaggtgcagattatgaaagtcaccttctgcgtgagaacacagagctggcaagtattttgagggtaccatgaagtgaaatggatccttaggacttgaagatgtgatgcagatttgtttctttcttacactgaagattggtgtgatggcagagttttaaaatcgctgttaaatactgatattcagaaattttcaagccataattcatatatatgtattttttcctcccaagccatgtctattacagttttgtctgtaagcagtggtgctttttaaaataaagaacacttatacccat

SEQ ID NO: 156539 - DNA, 7578 bp, Homo sapiens
  Payload ID: 10688
  Gene Symbol: MLLT6
  Gene Name: myeloid/lymphoid or mixed-lineage leukemia
  translocated to, 6
  ENST ID: ENST00000618876
  CDS Start-End: 92-3373
gcgcgcggccccccgctccctccctcccccctgacccccgacccccgccggccggccccccgccccagccccggagggagctcatgggagtatgaaggagatggtaggaggctgctgcgtatgttcggacgagaggggctgggccgagaacccgctggtctactgcgatgggcacgcgtgcagcgtggccgtccaccaagcttgctatggcatcgttcaggtgccaacgggaccctggttctgccggaaatgtgaatctcaggagcgagcagccagggtgaggtgtgagctgtgcccacacaaagacggggcattgaagaggactgataatggaggctgggcacacgtggtgtgtgccctctacatccccgaggtgcaatttgccaacgtgctcaccatggagcccatcgtgctgcagtacgtgcctcatgatcgcttcaacaagacctgttacatctgcgaggagcagggccgggagagcaaggcggcctcgggagcctgcatgacctgtaaccgccatggatgtcgacaagctttccacgtcacctgtgcccaaatggcaggcttgctgtgtgaggaagaagtgctggaggtggacaacgtcaagtactgcggctactgcaaataccacttcagcaagatgaagacatcccggcacagcagcgggggaggcggaggaggcgctggaggaggaggtggcagcatggggggaggtggcagtggtttcatctctgggaggagaagccggtcagcctcaccatccacgcagcaggagaagcaccccacccaccacgagaggggccagaagaagagtcgaaaggacaaagaacgccttaagcagaagcacaagaagcggcctgagtcgccccccagcatcctcaccccgcccgtggtccccactgctgacaaggtctcctcctcggcttcctcttcctcccaccacgaggccagcacgcaggagacctctgagagcagcagggagtcaaaggggaaaaagtcttccagccatagcctgagtcataaagggaagaaactgagcagtgggaaaggtgtgagcagttttacctccgcctcctcttcttcctcctcctcttcctcctcctctggggggcccttccagcctgcagtctcgtccctgcagagctcccctgacttctctgcattccccaagctggagcagccagaggaggacaagtactccaagcccacagcccccgccccttcagcccctccttctccctcagctcccgagccccccaaggctgacctttttgagcagaaggtggtcttctctggctttgggcccatcatgcgcttctccaccaccacctccagctcaggccgggcccgggcgccctcccctggggactataagtctccccacgtcacggggtctggggcctcggcaggcacccacaaacggatgcccgcactgagtgccacccctgtgcctgctgatgagacccctgagacaggcctgaaggagaagaagcacaaagccagcaagaggagccgccatgggccaggccgtcccaagggcagccggaacaaggagggcactgggggcccagctgccccatccttgcccagtgcccagctggctggctttaccgccactgctgcctcacccttctctggaggttccctggtcagctccggcctgggaggtctgtcctcccgaacctttgggccttctgggagcttgcccagcttgagcctggagtcccccttactaggggcaggcatctacaccagtaataaggaccccatctcccacagtggcgggatgctgcgggctgtctgcagcacccctctctcctccagcctcctggggcccccagggacctcggccctgccccgcctcagccgctccccgttcaccagcaccctcccctcctcttctgcttctatctccaccactcaggtgttttctctggctggctctacctttagcctcccttctacccacatctttggaacccccatgggtgccgttaatcccctcctctcccaagctgagagcagccacacagagccagacctggaggactgcagcttccggtgtcgggggacctcccctcaggagagtctgtcttccatgtcccccatcagcagcctccccgcactcttcgaccagacagcctctgcaccctgtgggggcggccagttagacccggcggccccagggacgactaacatggagcagcttctggagaagcagggcgacggggaggccggcgtcaacatcgtggagatgctgaaggcgctgcacgcgctgcagaaggagaaccagcggctgcaagagcagatcctgagcctgacggccaaaaaggagcggctgcagattctcaacgtgcagctctctgtgcccttccctgccctgcctgctgccctgcctgccgccaacggccctgtccctgggccctatggcctgcctccccaagccggcagcagcgactccttgagcaccagcaagagccctccgggaaagagcagcctcggcctggacaactcgctgtccacttcttctgaggacccacactcaggctgcccgagccgcagcagctcgtcgctgtccttccacagcacgcccccaccgctgcccctcctccagcagagccctgccactctgcccctggccctgcctggggcccctgccccactcccgccccagccgcagaacgggttgggccgggcacccggggcagcggggctgggggccatgcccatggctgaggggctgttgggggggctggcaggcagtgggggcctgcccctcaatgggctccttggggggttgaatggggccgctgcccccaaccccgcaagcttgagccaggctggcggggcccccacgctgcagctgccaggctgtctcaacagccttacagagcagcagagacatctccttcagcagcaagagcagcagctccagcaactccagcagctcctggcctccccgcagctgaccccggaacaccagactgttgtctaccagatgatccagcagatccagcagaaacgggagctgcagcgcctgcagatggctgggggctcccagctgcccatggccagcctgctggcaggaagctccaccccgctgctgtctgcgggtacccctggcctgctgcccacagcgtctgctccacccctgctgcccgctggagccctagtggctccctcgcttggcaacaacacaagtctcatggccgcagcagctgcagctgcagcagtagcagcagcaggcggacctccagtcctcactgcccagaccaaccccttcctcagcctgtcgggagcagagggcagtggcggtggccccaaaggagggaccgctgacaaaggagcctcagccaaccaggaaaaaggctaaatccacccttacccctcctgacccccccaagtggagggaacagatcctggcctgaggggtcctagcctggagcaggcgcctgcgcccagaccctggagagccttgacccagagcctgtgctgaggtccagggagtgtggagagctcctggtgtcgaggactgagactgagaggggagccccctccatctggcccccttccctttccgcactgtccgctttgtgaggctcagaggaaggacagtctgcaagcccgcctaggaggtccatccccagcaaatgttttggaggtccccccagagagcagagtgggccatggcagaagtagggggttggttggacctgtcacatgaaatggatcagcacttgaatggggagaagtggagggagaggccctgggcctgtccctgcggggaaatcttttatggaagaagggctggacccactttacctgcagtttcttcccagctcgggcagatggcagaagggaccccttggactttttctcgccatccctccccccagcgcaggggcacaagctgagcttgtaaaagcccacagatgttgggggctggagaaggggcaggagagcatcacactcagccccagcctcctcaacctcttggggccccgtgatggggaggagagggcaggtgcggggaggctctggccttccttggtgccccgccctttgtttgcactattggacttaggagtgccgagggtggggagatggagctgcccgtctcagtgtgtgagtgtgtgtgtgcgtgcatgtgtgtgtgtgtgtgtgtgtgtgtgtgtgtctgtctgcctgtctctctcctcctggacccagggcagccaagggcagggataggcgcagtggtcagatgaagcagcgccagagaggggacctcccagctcttatttgcaccctccccacctcaccaactttggtccctctctgggggcatgaatggttaacaaacaccagagcagtactccaatattggagagtcgctgggggcacagggctttgaatcagggtagtatcctgccttccctcccctgaccccacatggtctcagggcccccttagggccccctaccccactgatagcttcctccttctctggcacaaggggagccccagggcttgggggagggcgtaaggtggggggaaatgccactgcttttagcaaaagcctccctcccagaattagccagcttgcctcctgcaccccacccccaccaaccaggggagccactaagctgactaacaactgtcccctcacccaccagctatttccccagggtagagtgggcaattctcaccttcaaagagtccccgcctgcccaggcctttggcacagaggctgagtggacagtcaggagagaggcgagaggcaaggcgaagcctgtgtccctgtttcagttgcactggggttggagcccagggtaggggtttccagcttccccaggctccggccttgtcagtctctttgcatgtgtggatttttctgtgtgtgtttctgtttgggtttttgttgttgggttttttttttttttttaataaagaaaagaagatgtgtatatttttggcaacgacagaaacgtagtgcagatatatttttgcctgtgctgctcaactgttttttttttctgatactgaaaataatattaatattcctgttgataagactttgtaagatgttagggagctgataatggaggggggtgggaatccttcaaaggcaatttcttaggcacttgcaagggcttgggggagggggaggcagttgtgatgacctcagaaatactcactttttattaatgctaaatatgttagaaagaaatgatagcattcagcattttattcttcttaatctattaagctgtgtaactccctgccccaaaccactgaaaagaaaagtaaccttcaggccaggcgcggtggctcacgcctgtaatcccaacactttgggaggctgaggcgggcggatcacttaaggtcaggagttcaagaccagcctggccaacatggtgaaaccccgtctctatcaaaaattagccgggcatggtggcacgtgcctgtaatcccagctacttgggaggctgaggcacgagaattgcttgaacccaggaggctgaggctgcagtgagccaagattgtgccactgcactccagcctgtgtgagagagtgagactctgtctcaaaagagaaaaaaaaagaaaagtaaccttcagagattcttagaagagttgctcattcacacccacgcccttgcccaaggctggcccacttagagcgaaacttaacttttgtctggatgggaagagaagtaagtctaccccgaggttgccatgttgaagagtgagaggtccaagtgattctgtgcattgaaaccaagacaccccacccagaacacttcttccctccctcagcccaaaccaaaggctggggttctcatctccaagtggctgttctccaactttcccaagccgcttgcattccccagactggactactgtggcggttaggttagatttgaagacggggcccaggctgggtatgaacgggtgcagccctcttctcctcttcccccccacatctctcatgagagaggtagtggcatttccttctcagggagcttcaatgggaaaggtctcgaaagcttcaggaggagcagaataccaacgcagggggatggctgtaacgatctcaccgtctcctaacctcagtcccttttttgagagtgaatggtggagggtgggaagggacccagatttgtagatctctttgtctgggggaggggaaggatgtggtttgcagagcggaagcagagtttggaaacgcatgagagcagagcttcgtgtgttcccaccctcagtgaggaggtgtgagtgggtgagcatgtggagttgggtgttcccaccctcagtgaggaggtgtgagtgggggtgcatatagaggcagtgcctgctgtggggtcacaactggtgcatgccagcgccaaagggacctgtctttaggggtcatttcagccagctcctcccatcacagatgacagctccaagcctagaaggggctcagtgacagggccaggacaagccctcaggactgtggcctcctggcccttggttcccctgccccacaacatggtctccacatggctggctggctggctgtccctgtgtgtgtgtgacacacggtgtgagtgcagggctgtgcccggggtgggagggtgtctatgtggcactgactgtcttagctcagagctggtggatcctctccatggacaatgacactttaaggattgtcttggtttgtttttcctatttgtggggtattttccccctcaggctcctgggtctgctgctgcctcaaggtgtcctgaccttgaggctgatgaggggacccctgcctgtttcccccatactgagttctagggaggtgctcaccccagactcttaggaagggtctagagaaatgagaggagcccaagccaggggccagctccgagaaagggtaacctccacgcttctctctcccaaattggaaatgaagacaggttttcaaaggcacaggctccccctgccagcttctaggatcttccttggtgtgcaatgggccagttaggggtaggcagcttgcacccagttctcctttatctcaacttattttcctggggagaggtgcctagagggattgaggtaacttcaactgggaattccaaggaaggtgggcaagtagccttggctctctcccaccatgtccatcaggattgagagtgtgtctagctcccgaccactttgtcttgacctactgaaaagttgggaactgaggggtgccttcattcccctttgttcactttctccagctcaacttgggacttgggtggtgggactggagacctcacccctgctcccgtcccgccccctttctatcccaacctgtttccatgtagcagacccttcctagggagcagggaggggaagccacagattgcaaacccaggggctcctttttcattctttctaaaaccttgatatcctcagcccaaaggcgatgcccccctgccacctccaagcctggaattgtgcataacccggatcttgtatctttgtataacggatgttatttgtacgaagggcagttcgtaaacagcacttgttcttttaataaaagaatgttttgcaaaaaaaaaaaaaaaaatccgaaga

SEQ ID NO: 156540 - DNA, 2714 bp, Homo sapiens
  Payload ID: 10688
  Gene Symbol: MLLT6
  Gene Name: myeloid/lymphoid or mixed-lineage leukemia
  translocated to, 6
  ENST ID: ENST00000616632
  CDS Start-End: 92-1069
gcgcgcggccccccgctccctccctcccccctgacccccgacccccgccggccggccccccgccccagccccggagggagctcatgggagtatgaaggagatggtaggaggctgctgcgtatgttcggacgagaggggctgggccgagaacccgctggtctactgcgatgggcacgcgtgcagcgtggccgtccaccaagcttgctatggcatcgttcaggtgccaacgggaccctggttctgccggaaatgtgaatctcaggagcgagcagccagggtgaggtgtgagctgtgcccacacaaagacggggcattgaagaggactgataatggaggctgggcacacgtggtgtgtgccctctacatccccgaggtgcaatttgccaacgtgctcaccatggagcccatcgtgctgcagtacgtgcctcatgatcgcttcaacaagacctgttacatctgcgaggagcagggccgggagagcaaggcggcctcgggagcctgcatgacctgtaaccgccatggatgtcgacaagctttccacgtcacctgtgcccaaatggcaggcttgctgtgtgaggaagaagtgctggaggtggacaacgtcaagtactgcggctactgcaaataccacttcagcaagatgaagacatcccggcacagcagcgggggaggcggaggaggcgctggaggaggaggtggcagcatggggggaggtggcagtggtttcatctctgggaggagaagccggtcagcctcaccatccacgcagcaggagaagcaccccacccaccacgagaggggccagaagaagagtcgaaaggacaaagaacgccttaagcagaagcacaagaagcggcctgagtcgccccccagcatcctcaccccgcccgtggtccccactgctgacaagcctagaaggggccaccaatcaccgaccaaccatgggattgggagtttggggtgctgtctgccagatactcccatctgcctctgtccagagggcctcagccctgggctcttgtctgcagagagtgggggacggcactcaggcctgctctccaagttctagggcccctgtccccagagatcggtagaggacatcccctacgccccatcaggaggacacccaaagcttgtcacccaacccaaatcccactctgtgcaggttggaggggctgaaagttctgaccaaggtggcatggggggcaggcccctggacagtatcccgaaactcccactcatcccaccattcccagcagggcatggtatgtcaggcctgtctccagaaatgggcaacatctggctgagcgataggcaggccctaccctaggccagggaattgctaatccaagctggaacagccctccctgctccctacaacctgccctccccatgggaggagaacctggtagggtggggggagatggagaaactgctccctcctgtcaccattattgcccattcacctccaccccatctcagacggttggcagagttctgggcaccttagcaggaggttcaggtatcaggtttccagggtgatgttgctgtggcaactgccccagtaaacctctcccctgcttcccagggctcacctggagaccttgtcattcatgccctctgacctttccaggggcctgcaggcaggtggcaagaaatggccaggggtctgggagtttttccagtaactggatgtcccttggacatgccagagaactctgcccatcctcctccactcgccccagcacttcggctacccttccccccagcccctctcttcccttgctctcagaaccacatctggctcccttcagaactccagctgttgaaaagaacaaagaggaagacagagaccaggactccgcccgggaggggcagtgcagggtggctctcgtttctggtccagcctgcattcagcatttatctgttcagcacgattaactgaatacctggtcgctactaggaggaaaagggccttccctggcagcagcctgaagcacgaacgaactcacggcatgccaggctgtgttctagaaccaggagatggaggggcatatggagattagtccatttaatactcaaaataatccaattaggttggaaatttataaaccccatttaatatatgaagatgatggggcacagggaggttaagtaatttgcctaaaagcacacagctagtaaagtggtagacctgagattccaatgcagtctggcttgaaggcttgtgctcttcacctgcccacagcactgtctctgcagctgctgccactggacgtctcatcatttattgaccctataccatgtatctggcatcatgctgcttccaactcaccacatatgcatagtgctccctgtaaagacactgacacttatcgacgttgagactttgcacagtataacatggcagtgaggccaggcgtggtggctcacgcctgtagtcccagcactttgggagtccgaggcaggtggatcacctgaggtcaggggttcgagatcagcctggccaacatggtgaaaccctgcctctattaaaaatacacaaaattagccgggtgtggtggctggtgcctgtaatcccagctacttgggaggctgaggcaggagaatcacttgaacctgggaggtgattgaaggttgcagtgagccgagatcgcaccattgcactccagcctgtgcaacaagagtgaaactccatctcaaaaataaattaa

SEQ ID NO: 156541 - DNA, 1208 bp, Homo sapiens
  Payload ID: 10688
  Gene Symbol: MLLT6
  Gene Name: myeloid/lymphoid or mixed-lineage leukemia
  translocated to, 6
  ENST ID: ENST00000615858
  CDS Start-End: 1-907
gcctgcaggcatctacaccagtaataaggaccccatctcccacagtggcgggatgctgcgggctgtctgcagcacccctctctcctccagcctcctggggcccccagggacctcggccctgccccgcctcagccgctccccgttcaccagcaccctcccctcctcttctgcttctatctccaccactcaggtgttttctctggctggctctacctttagcctcccttctacccacatctttggaacccccatgggtgccgttaatcccctcctctcccaagctgagagcagccacacagagccagacctggaggactgcagcttccggtgtcgggggacctcccctcaggagagtctgtcttccatgtcccccatcagcagcctccccgcactcttcgaccagacagcctctgcaccctgtgggggcggccagttagacccggcggccccagggacgactaacatggagcagcttctggagaagcagggcgacggggaggccggcgtcaacatcgtggagatgctgaaggcgctgcacgcgctgcagaaggagaaccagcggctgcaagagcagatcctgagcctgacggccaaaaaggagcggctgcagattctcaacgtgcagctctctgtgcccttccctgccctgcctgctgccctgcctgccgccaacggccctgtccctgggccctatggcctgcctccccaagccggcagcagcgactccttgagcaccagcaagagccctccgggaaagagcagcctcggcctggacaactcgctgtccacttcttctgaggtgggcgctacgaggagtggggcaggaaggagggggagactcaaggctctcctggtcccatctcttccccgcagctattggaggctgggcaatgaagtgactgactgagcaattgattgatccattcagtcctcccttaatcaagtaatatttatgaggtgcccacttagtgccagccattggctaagcaatcagtgagcaaaaccggcacagcgctgcttcttaagataggctaccccaagcaaagaaggagtaatcacaaactgggagatatgttagtgtggagagaaattgagggctgtgagagagagaacgggggagggctgcttctgtggatagaaagtggttagggaaggcctctttgagaagtatttgtgaagggtttattatagcgcctcacacaaaataa

SEQ ID NO: 156542 - DNA, 7578 bp, Homo sapiens; identical to SEQ ID NO: 156539
  Payload ID: 10688
  Gene Symbol: MLLT6
  Gene Name: myeloid/lymphoid or mixed-lineage leukemia
  translocated to, 6
  ENST ID: ENST00000621332
  CDS Start-End: 92-3373

SEQ ID NO: 156543 - DNA, 2714 bp, Homo sapiens; identical to SEQ ID NO: 156540
  Payload ID: 10688
  Gene Symbol: MLLT6
  Gene Name: myeloid/lymphoid or mixed-lineage leukemia
  translocated to, 6
  ENST ID: ENST00000620609
  CDS Start-End: 92-1069

SEQ ID NO: 156544 - DNA, 1208 bp, Homo sapiens; identical to SEQ ID NO: 156541
  Payload ID: 10688
  Gene Symbol: MLLT6
  Gene Name: myeloid/lymphoid or mixed-lineage leukemia
  translocated to, 6
  ENST ID: ENST00000634099
  CDS Start-End: 1-907

SEQ ID NO: 156545 - DNA, 3047 bp, Homo sapiens
  Payload ID: 10689
  Gene Symbol: MYADM
  Gene Name: myeloid-associated differentiation marker
  Uniprot ID: Q96S97
  ENST ID: ENST00000336967
  CDS Start-End: 149-1117
accaggccccgcccagcggccgcagccagccaggccgcgcccgggacgactgcagagcgcggtgctcttacagcctgttccaagtgtggcttaatccgtctccaccaccagatctttctccgtggattcctctgctaagaccgctgccatgccagtgacggtaacccgcaccaccatcacaaccaccacgacgtcatcttcgggcctggggtcccccatgatcgtggggtcccctcgggccctgacacagcccctgggtctccttcgcctgctgcagctggtgtctacctgcgtggccttctcgctggtggctagcgtgggcgcctggacggggtccatgggcaactggtccatgttcacctggtgcttctgcttctccgtgaccctgatcatcctcatcgtggagctgtgcgggctccaggcccgcttccccctgtcttggcgcaacttccccatcaccttcgcctgctatgcggccctcttctgcctctcggcctccatcatctaccccaccacctatgtccagttcctgtcccacggccgttcgcgggaccacgccatcgccgccaccttcttctcctgcatcgcgtgtgtggcttacgccaccgaagtggcctggacccgggcccggcccggcgagatcactggctatatggccaccgtacccgggctgctgaaggtgctggagaccttcgttgcctgcatcatcttcgcgttcatcagcgaccccaacctgtaccagcaccagccggccctggagtggtgcgtggcggtgtacgccatctgcttcatcctagcggccatcgccatcctgctgaacctgggggagtgcaccaacgtgctacccatccccttccccagcttcctgtcggggctggccttgctgtctgtcctcctctatgccaccgcccttgttctctggcccctctaccagttcgatgagaagtatggcggccagcctcggcgctcgagagatgtaagctgcagccgcagccatgcctactacgtgtgtgcctgggaccgccgactggctgtggccatcctgacggccatcaacctactggcgtatgtggctgacctggtgcactctgcccacctggtttttgtcaaggtctaagactctcccaagaggctcccgttccctctccaacctctttgttcttcttgcccgagttttctttatggagtacttctttcctccgcctttcctctgttttcctcttcctgtctcccctccctcccacctttttctttccttcccaattccttgcactctaaccagttcttggatgcatcttcttccttccctttcctcttgctgtttccttcctgtgttgttttgttgcccacatcctgttttcacccctgagctgtttctctttttcttttcttttttttttttttttttttttaagacggattctcactctgtggcccaggctggagtgcagtggtgcgatctcgactcactgcaacccccgcctcctgggttcaagcgattctcctgccccagcctcccaagtagctgggaggacaggtgtgagctgccgcacccagcctgtttctctttttccactcttcttttttctcatctcttttctgggttgcctgtcggctttcttatctgcctgttttgcaagcaccttctcctgtgtccttgggagccctgagacttctttctctccttgcctccacccacctccaaaggtgctgagctcacatccacaccccttgcagccgtccatgccacagccccccaaggggccccattgccaaagcatgcctgcccaccctcgctgtgccttagtcagtgtgtacgtgtgtgtgtgtgtgtgtgtgtgtgtgtgtgtttggggggtggggggtgggtagctggggattgggccctctttctcccagtggaggaaggtgtgcagtgtacttcccctttaaattaaaaaacatatatatatatatatttggaggtcagtaatttccaatgggcgggaggctttaagcaccgaccctgggtccctaggccccgcctggcactcagccttgccagagattggctccagaatttttgccaggcttacagaacacccactgcctagaggccatcttaaaggaagcaggggctggatgcctttcatcccaactattctctgtggtatcaaaaagaaaaaaaaaaaaaaagaaggagtcggggccgggcgtggtggctcacgcctgtaatcccagcactttgggagaccaagtcaggcaatcatctgaagtcaggagttcaagaccagcctggccaacatggtgaaagcatgtctctattaaaaatacaaaaattagccgggcgtggtggcgggcgcctgtaatcccaggtatttggggggactgagacaggagaatcccttcaacccgggaggtggaggttgcagtaagtcaagatggcaccactgtgctccagcctgggggacagagcgagactccatctcaaaaaaaaaaaggaatcggacgaagaaccacaggatgttgaagacaactgtctgaagtatttgtgagggacagcgatgtggccctctgtgttaagaataacgtgtcctgctttggcagagagaagaaaatagccactgcccgctttcaaggcaagatcgaccttttctgttttgttttgtttttctttctttttcctggccatgaggacaaaaattactgagtggcccttaaagagggaagtttgttttcagctgttctcttttgcccgtaggtgggagggtggggattgctgcgtcctagctagaggaatggctttgcttgaatgtgtagtgcacacgcacgggtgtttctgtgtgctagttgcttcttgctgctgcttcctgcttgtctgggactcacatacataacgtgatatatatatatatatatataaatgtataaatatatattttatttttttttaaatccctggagcttctggttcctatcagttcctgttgttaatcgtagaaccgttgtcccttcccccattcccgtatccatcatgttctttttcttttaaatatcaatataaaggt

SEQ ID NO: 156546 - DNA, 1492 bp, Homo sapiens
  Payload ID: 10689
  Gene Symbol: MYADM
  Gene Name: myeloid-associated differentiation marker
  Uniprot ID: Q96S97
  ENST ID: ENST00000391768
  CDS Start-End: 403-1371
ccggctctggctgggccgcccgcctccacagccgccgcccagggttctcccgccactgccgcccgcacccccgcccccgcggggttaagatcacacacgcgcccacgccggcccgcggggcgtgcactttcgctgggttccgtccgccgcagcccaaacagttaactgaacggggaggggagggggcggggcttacccggggtcaccgccagggccctgctgggttccacgccacgttcctgtctccgcagggcgttcgatccctagagggaggagcctgtccaaacggacgctaacggcctacctccccctcaggtgctcttacagcctgttccaagtgtggcttaatccgtctccaccaccagatctttctccgtggattcctctgctaagaccgctgccatgccagtgacggtaacccgcaccaccatcacaaccaccacgacgtcatcttcgggcctggggtcccccatgatcgtggggtcccctcgggccctgacacagcccctgggtctccttcgcctgctgcagctggtgtctacctgcgtggccttctcgctggtggctagcgtgggcgcctggacggggtccatgggcaactggtccatgttcacctggtgcttctgcttctccgtgaccctgatcatcctcatcgtggagctgtgcgggctccaggcccgcttccccctgtcttggcgcaacttccccatcaccttcgcctgctatgcggccctcttctgcctctcggcctccatcatctaccccaccacctatgtccagttcctgtcccacggccgttcgcgggaccacgccatcgccgccaccttcttctcctgcatcgcgtgtgtggcttacgccaccgaagtggcctggacccgggcccggcccggcgagatcactggctatatggccaccgtacccgggctgctgaaggtgctggagaccttcgttgcctgcatcatcttcgcgttcatcagcgaccccaacctgtaccagcaccagccggccctggagtggtgcgtggcggtgtacgccatctgcttcatcctagcggccatcgccatcctgctgaacctgggggagtgcaccaacgtgctacccatccccttccccagcttcctgtcggggctggccttgctgtctgtcctcctctatgccaccgcccttgttctctggcccctctaccagttcgatgagaagtatggcggccagcctcggcgctcgagagatgtaagctgcagccgcagccatgcctactacgtgtgtgcctgggaccgccgactggctgtggccatcctgacggccatcaacctactggcgtatgtggctgacctggtgcactctgcccacctggtttttgtcaaggtctaagactctcccaagaggctcccgttccctctccaacctctttgttcttcttgcccgagttttctttatggagtacttctttcctccgcctttcctctgttttcctcttcctgtctcccctccc

SEQ ID NO: 156547 - DNA, 3186 bp, Homo sapiens
  Payload ID: 10689
  Gene Symbol: MYADM
  Gene Name: myeloid-associated differentiation marker
  Uniprot ID: Q96S97
  ENST ID: ENST00000391769
  CDS Start-End: 281-1249
gccgactcgaagcccttataaggcgcggagacaccggctctggctgggccgcccgcctccacagccgccgcccagggttctcccgccactgccgcccgcacccccgcccccgcggggttaagatcacacacgcgcccacgccggcccgcggggcgtgcactttcgctgggttccgtccgccgcagcccaaacagtgctcttacagcctgttccaagtgtggcttaatccgtctccaccaccagatctttctccgtggattcctctgctaagaccgctgccatgccagtgacggtaacccgcaccaccatcacaaccaccacgacgtcatcttcgggcctggggtcccccatgatcgtggggtcccctcgggccctgacacagcccctgggtctccttcgcctgctgcagctggtgtctacctgcgtggccttctcgctggtggctagcgtgggcgcctggacggggtccatgggcaactggtccatgttcacctggtgcttctgcttctccgtgaccctgatcatcctcatcgtggagctgtgcgggctccaggcccgcttccccctgtcttggcgcaacttccccatcaccttcgcctgctatgcggccctcttctgcctctcggcctccatcatctaccccaccacctatgtccagttcctgtcccacggccgttcgcgggaccacgccatcgccgccaccttcttctcctgcatcgcgtgtgtggcttacgccaccgaagtggcctggacccgggcccggcccggcgagatcactggctatatggccaccgtacccgggctgctgaaggtgctggagaccttcgttgcctgcatcatcttcgcgttcatcagcgaccccaacctgtaccagcaccagccggccctggagtggtgcgtggcggtgtacgccatctgcttcatcctagcggccatcgccatcctgctgaacctgggggagtgcaccaacgtgctacccatccccttccccagcttcctgtcggggctggccttgctgtctgtcctcctctatgccaccgcccttgttctctggcccctctaccagttcgatgagaagtatggcggccagcctcggcgctcgagagatgtaagctgcagccgcagccatgcctactacgtgtgtgcctgggaccgccgactggctgtggccatcctgacggccatcaacctactggcgtatgtggctgacctggtgcactctgcccacctggtttttgtcaaggtctaagactctcccaagaggctcccgttccctctccaacctctttgttcttcttgcccgagttttctttatggagtacttctttcctccgcctttcctctgttttcctcttcctgtctcccctccctcccacctttttctttccttcccaattccttgcactctaaccagttcttggatgcatcttcttccttccctttcctcttgctgtttccttcctgtgttgttttgttgcccacatcctgttttcacccctgagctgtttctctttttcttttcttttttttttttttttttttttaagacggattctcactctgtggcccaggctggagtgcagtggtgcgatctcgactcactgcaacccccgcctcctgggttcaagcgattctcctgccccagcctcccaagtagctgggaggacaggtgtgagctgccgcacccagcctgtttctctttttccactcttcttttttctcatctcttttctgggttgcctgtcggctttcttatctgcctgttttgcaagcaccttctcctgtgtccttgggagccctgagacttctttctctccttgcctccacccacctccaaaggtgctgagctcacatccacaccccttgcagccgtccatgccacagccccccaaggggccccattgccaaagcatgcctgcccaccctcgctgtgccttagtcagtgtgtacgtgtgtgtgtgtgtgtgtgtgtgtgtgtgtgtttggggggtggggggtgggtagctggggattgggccctctttctcccagtggaggaaggtgtgcagtgtacttcccctttaaattaaaaaacatatatatatatatatttggaggtcagtaatttccaatgggcgggaggctttaagcaccgaccctgggtccctaggccccgcctggcactcagccttgccagagattggctccagaatttttgccaggcttacagaacacccactgcctagaggccatcttaaaggaagcaggggctggatgcctttcatcccaactattctctgtggtatcaaaaagaaaaaaaaaaaaaaagaaggagtcggggccgggcgtggtggctcacgcctgtaatcccagcactttgggagaccaagtcaggcaatcatctgaagtcaggagttcaagaccagcctggccaacatggtgaaagcatgtctctattaaaaatacaaaaattagccgggcgtggtggcgggcgcctgtaatcccaggtatttggggggactgagacaggagaatcccttcaacccgggaggtggaggttgcagtaagtcaagatggcaccactgtgctccagcctgggggacagagcgagactccatctcaaaaaaaaaaaggaatcggacgaagaaccacaggatgttgaagacaactgtctgaagtatttgtgagggacagcgatgtggccctctgtgttaagaataacgtgtcctgctttggcagagagaagaaaatagccactgcccgctttcaaggcaagatcgaccttttctgttttgttttgtttttctttctttttcctggccatgaggacaaaaattactgagtggcccttaaagagggaagtttgttttcagctgttctcttttgcccgtaggtgggagggtggggattgctgcgtcctagctagaggaatggctttgcttgaatgtgtagtgcacacgcacgggtgtttctgtgtgctagttgcttcttgctgctgcttcctgcttgtctgggactcacatacataacgtgatatatatatatatatatataaatgtataaatatatattttatttttttttaaatccctggagcttctggttcctatcagttcctgttgttaatcgtagaaccgttgtcccttcccccattcccgtatccatcatgttctttttcttttaaatatcaatataaaggtaaaagaa

SEQ ID NO: 156548 - DNA, 3056 bp, Homo sapiens
  Payload ID: 10689
  Gene Symbol: MYADM
  Gene Name: myeloid-associated differentiation marker
  Uniprot ID: Q96S97
  ENST ID: ENST00000391770
  CDS Start-End: 149-1117
agacccttccagctgccgctgtcgtctttgcttcagccgcagtcgccactggctgcctgaggtgctcttacagcctgttccaagtgtggcttaatccgtctccaccaccagatctttctccgtggattcctctgctaagaccgctgccatgccagtgacggtaacccgcaccaccatcacaaccaccacgacgtcatcttcgggcctggggtcccccatgatcgtggggtcccctcgggccctgacacagcccctgggtctccttcgcctgctgcagctggtgtctacctgcgtggccttctcgctggtggctagcgtgggcgcctggacggggtccatgggcaactggtccatgttcacctggtgcttctgcttctccgtgaccctgatcatcctcatcgtggagctgtgcgggctccaggcccgcttccccctgtcttggcgcaacttccccatcaccttcgcctgctatgcggccctcttctgcctctcggcctccatcatctaccccaccacctatgtccagttcctgtcccacggccgttcgcgggaccacgccatcgccgccaccttcttctcctgcatcgcgtgtgtggcttacgccaccgaagtggcctggacccgggcccggcccggcgagatcactggctatatggccaccgtacccgggctgctgaaggtgctggagaccttcgttgcctgcatcatcttcgcgttcatcagcgaccccaacctgtaccagcaccagccggccctggagtggtgcgtggcggtgtacgccatctgcttcatcctagcggccatcgccatcctgctgaacctgggggagtgcaccaacgtgctacccatccccttccccagcttcctgtcggggctggccttgctgtctgtcctcctctatgccaccgcccttgttctctggcccctctaccagttcgatgagaagtatggcggccagcctcggcgctcgagagatgtaagctgcagccgcagccatgcctactacgtgtgtgcctgggaccgccgactggctgtggccatcctgacggccatcaacctactggcgtatgtggctgacctggtgcactctgcccacctggtttttgtcaaggtctaagactctcccaagaggctcccgttccctctccaacctctttgttcttcttgcccgagttttctttatggagtacttctttcctccgcctttcctctgttttcctcttcctgtctcccctccctcccacctttttctttccttcccaattccttgcactctaaccagttcttggatgcatcttcttccttccctttcctcttgctgtttccttcctgtgttgttttgttgcccacatcctgttttcacccctgagctgtttctctttttcttttcttttttttttttttttttttttaagacggattctcactctgtggcccaggctggagtgcagtggtgcgatctcgactcactgcaacccccgcctcctgggttcaagcgattctcctgccccagcctcccaagtagctgggaggacaggtgtgagctgccgcacccagcctgtttctctttttccactcttcttttttctcatctcttttctgggttgcctgtcggctttcttatctgcctgttttgcaagcaccttctcctgtgtccttgggagccctgagacttctttctctccttgcctccacccacctccaaaggtgctgagctcacatccacaccccttgcagccgtccatgccacagccccccaaggggccccattgccaaagcatgcctgcccaccctcgctgtgccttagtcagtgtgtacgtgtgtgtgtgtgtgtgtgtgtgtgtgtgtgtttggggggtggggggtgggtagctggggattgggccctctttctcccagtggaggaaggtgtgcagtgtacttcccctttaaattaaaaaacatatatatatatatatttggaggtcagtaatttccaatgggcgggaggctttaagcaccgaccctgggtccctaggccccgcctggcactcagccttgccagagattggctccagaatttttgccaggcttacagaacacccactgcctagaggccatcttaaaggaagcaggggctggatgcctttcatcccaactattctctgtggtatcaaaaagaaaaaaaaaaaaaaagaaggagtcggggccgggcgtggtggctcacgcctgtaatcccagcactttgggagaccaagtcaggcaatcatctgaagtcaggagttcaagaccagcctggccaacatggtgaaagcatgtctctattaaaaatacaaaaattagccgggcgtggtggcgggcgcctgtaatcccaggtatttggggggactgagacaggagaatcccttcaacccgggaggtggaggttgcagtaagtcaagatggcaccactgtgctccagcctgggggacagagcgagactccatctcaaaaaaaaaaaggaatcggacgaagaaccacaggatgttgaagacaactgtctgaagtatttgtgagggacagcgatgtggccctctgtgttaagaataacgtgtcctgctttggcagagagaagaaaatagccactgcccgctttcaaggcaagatcgaccttttctgttttgttttgtttttctttctttttcctggccatgaggacaaaaattactgagtggcccttaaagagggaagtttgttttcagctgttctcttttgcccgtaggtgggagggtggggattgctgcgtcctagctagaggaatggctttgcttgaatgtgtagtgcacacgcacgggtgtttctgtgtgctagttgcttcttgctgctgcttcctgcttgtctgggactcacatacataacgtgatatatatatatatatatataaatgtataaatatatattttatttttttttaaatccctggagcttctggttcctatcagttcctgttgttaatcgtagaaccgttgtcccttcccccattcccgtatccatcatgttctttttcttttaaatatcaatataaaggtaaaagaagg

SEQ ID NO: 156549 - DNA, 3111 bp, Homo sapiens
  Payload ID: 10689
  Gene Symbol: MYADM
  Gene Name: myeloid-associated differentiation marker
  Uniprot ID: Q96S97
  ENST ID: ENST00000391771
  CDS Start-End: 213-1181
agacccttccagctgccgctgtcgtctttgcttcagccgcagtcgccactggctgcctgagggcgttcgatccctagagggaggagcctgtccaaacggacgctaacggcctacctccccctcaggtgctcttacagcctgttccaagtgtggcttaatccgtctccaccaccagatctttctccgtggattcctctgctaagaccgctgccatgccagtgacggtaacccgcaccaccatcacaaccaccacgacgtcatcttcgggcctggggtcccccatgatcgtggggtcccctcgggccctgacacagcccctgggtctccttcgcctgctgcagctggtgtctacctgcgtggccttctcgctggtggctagcgtgggcgcctggacggggtccatgggcaactggtccatgttcacctggtgcttctgcttctccgtgaccctgatcatcctcatcgtggagctgtgcgggctccaggcccgcttccccctgtcttggcgcaacttccccatcaccttcgcctgctatgcggccctcttctgcctctcggcctccatcatctaccccaccacctatgtccagttcctgtcccacggccgttcgcgggaccacgccatcgccgccaccttcttctcctgcatcgcgtgtgtggcttacgccaccgaagtggcctggacccgggcccggcccggcgagatcactggctatatggccaccgtacccgggctgctgaaggtgctggagaccttcgttgcctgcatcatcttcgcgttcatcagcgaccccaacctgtaccagcaccagccggccctggagtggtgcgtggcggtgtacgccatctgcttcatcctagcggccatcgccatcctgctgaacctgggggagtgcaccaacgtgctacccatccccttccccagcttcctgtcggggctggccttgctgtctgtcctcctctatgccaccgcccttgttctctggcccctctaccagttcgatgagaagtatggcggccagcctcggcgctcgagagatgtaagctgcagccgcagccatgcctactacgtgtgtgcctgggaccgccgactggctgtggccatcctgacggccatcaacctactggcgtatgtggctgacctggtgcactctgcccacctggtttttgtcaaggtctaagactctcccaagaggctcccgttccctctccaacctctttgttcttcttgcccgagttttctttatggagtacttctttcctccgcctttcctctgttttcctcttcctgtctcccctccctcccacctttttctttccttcccaattccttgcactctaaccagttcttggatgcatcttcttccttccctttcctcttgctgtttccttcctgtgttgttttgttgcccacatcctgttttcacccctgagctgtttctctttttcttttcttttttttttttttttttttttaagacggattctcactctgtggcccaggctggagtgcagtggtgcgatctcgactcactgcaacccccgcctcctgggttcaagcgattctcctgccccagcctcccaagtagctgggaggacaggtgtgagctgccgcacccagcctgtttctctttttccactcttcttttttctcatctcttttctgggttgcctgtcggctttcttatctgcctgttttgcaagcaccttctcctgtgtccttgggagccctgagacttctttctctccttgcctccacccacctccaaaggtgctgagctcacatccacaccccttgcagccgtccatgccacagccccccaaggggccccattgccaaagcatgcctgcccaccctcgctgtgccttagtcagtgtgtacgtgtgtgtgtgtgtgtgtgtgtgtgtgtgtgtttggggggtggggggtgggtagctggggattgggccctctttctcccagtggaggaaggtgtgcagtgtacttcccctttaaattaaaaaacatatatatatatatatttggaggtcagtaatttccaatgggcgggaggctttaagcaccgaccctgggtccctaggccccgcctggcactcagccttgccagagattggctccagaatttttgccaggcttacagaacacccactgcctagaggccatcttaaaggaagcaggggctggatgcctttcatcccaactattctctgtggtatcaaaaagaaaaaaaaaaaaaaagaaggagtcggggccgggcgtggtggctcacgcctgtaatcccagcactttgggagaccaagtcaggcaatcatctgaagtcaggagttcaagaccagcctggccaacatggtgaaagcatgtctctattaaaaatacaaaaattagccgggcgtggtggcgggcgcctgtaatcccaggtatttggggggactgagacaggagaatcccttcaacccgggaggtggaggttgcagtaagtcaagatggcaccactgtgctccagcctgggggacagagcgagactccatctcaaaaaaaaaaaggaatcggacgaagaaccacaggatgttgaagacaactgtctgaagtatttgtgagggacagcgatgtggccctctgtgttaagaataacgtgtcctgctttggcagagagaagaaaatagccactgcccgctttcaaggcaagatcgaccttttctgttttgttttgtttttctttctttttcctggccatgaggacaaaaattactgagtggcccttaaagagggaagtttgttttcagctgttctcttttgcccgtaggtgggagggtggggattgctgcgtcctagctagaggaatggctttgcttgaatgtgtagtgcacacgcacgggtgtttctgtgtgctagttgcttcttgctgctgcttcctgcttgtctgggactcacatacataacgtgatatatatatatatatatataaatgtataaatatatattttatttttttttaaatccctggagcttctggttcctatcagttcctgttgttaatcgtagaaccgttgtcccttcccccattcccgtatccatcatgttctttttcttttaaatatcaatataaaggt

SEQ ID NO: 156550 - DNA, 1009 bp, Homo sapiens
  Payload ID: 10689
  Gene Symbol: MYADM
  Gene Name: myeloid-associated differentiation marker
  ENST ID: ENST00000421337
  CDS Start-End: 283-1009
ccactcctggactcggcctccacccctgggcttggcctcaaagcctcctcagttgtcggccctggaaggtgcccagcggcggcagcgccagacgcgccccgttagctcagcgtcgctgagcatccgcagccgccaccaggccccgcccagcggccgcagccagccaggccgcgcccgggacgactgcagagcgcggtgctcttacagcctgttccaagtgtggcttaatccgtctccaccaccagatctttctccgtggattcctctgctaagaccgctgccatgccagtgacggtaacccgcaccaccatcacaaccaccacgacgtcatcttcgggcctggggtcccccatgatcgtggggtcccctcgggccctgacacagcccctgggtctccttcgcctgctgcagctggtgtctacctgcgtggccttctcgctggtggctagcgtgggcgcctggacggggtccatgggcaactggtccatgttcacctggtgcttctgcttctccgtgaccctgatcatcctcatcgtggagctgtgcgggctccaggcccgcttccccctgtcttggcgcaacttccccatcaccttcgcctgctatgcggccctcttctgcctctcggcctccatcatctaccccaccacctatgtccagttcctgtcccacggccgttcgcgggaccacgccatcgccgccaccttcttctcctgcatcgcgtgtgtggcttacgccaccgaagtggcctggacccgggcccggcccggcgagatcactggctatatggccaccgtacccgggctgctgaaggtgctggagaccttcgttgcctgcatcatcttcgcgttcatcagcgaccccaacctgtaccagcaccagccggccctggagtggtgcgtggcggtgtacgccatctgcttcatcctagcggccatcgccatcctgctgaacctgggggagtgcaccaacgtgctacccatccccttccccagcttcctgtcggggc

SEQ ID NO: 156551 - DNA, 777 bp, Homo sapiens
  Payload ID: 10689
  Gene Symbol: MYADM
  Gene Name: myeloid-associated differentiation marker
  ENST ID: ENST00000448420
  CDS Start-End: 213-777
agacccttccagctgccgctgtcgtctttgcttcagccgcagtcgccactggctgcctgagggcgttcgatccctagagggaggagcctgtccaaacggacgctaacggcctacctccccctcaggtgctcttacagcctgttccaagtgtggcttaatccgtctccaccaccagatctttctccgtggattcctctgctaagaccgctgccatgccagtgacggtaacccgcaccaccatcacaaccaccacgacgtcatcttcgggcctggggtcccccatgatcgtggggtcccctcgggccctgacacagcccctgggtctccttcgcctgctgcagctggtgtctacctgcgtggccttctcgctggtggctagcgtgggcgcctggacggggtccatgggcaactggtccatgttcacctggtgcttctgcttctccgtgaccctgatcatcctcatcgtggagctgtgcgggctccaggcccgcttccccctgtcttggcgcaacttccccatcaccttcgcctgctatgcggccctcttctgcctctcggcctccatcatctaccccaccacctatgtccagttcctgtcccacggccgttcgcgggaccacgccatcgccgccaccttcttctcctgcatcgcgtgtgtggcttacgccaccgaagtggcctggacccgggcccggcccggcgagatcactggctatatggccaccgtacccgggctgctgaaggtgctggagaccttcgttgcctgcatcatcttcg

SEQ ID NO: 156552 - DNA, 592 bp, Homo sapiens
  Payload ID: 10689
  Gene Symbol: MYADM
  Gene Name: myeloid-associated differentiation marker
  ENST ID: ENST00000414489
  CDS Start-End: 153-592
gcctgttccaagtgtggcttaatccgtctccaccaccagatctttctccgtggattcctctgctaagaccgctggttgcccaggctggtctccaactcctgggctcaagcaatcctcctgcctcagcctcttggagtgctgggattacagccatgccagtgacggtaacccgcaccaccatcacaaccaccacgacgtcatcttcgggcctggggtcccccatgatcgtggggtcccctcgggccctgacacagcccctgggtctccttcgcctgctgcagctggtgtctacctgcgtggccttctcgctggtggctagcgtgggcgcctggacggggtccatgggcaactggtccatgttcacctggtgcttctgcttctccgtgaccctgatcatcctcatcgtggagctgtgcgggctccaggcccgcttccccctgtcttggcgcaacttccccatcaccttcgcctgctatgcggccctcttctgcctctcggcctccatcatctaccccaccacctatgtccagttcctgtcccacggccgttcgcgggaccacgccatcgccgccaccttcttctcctgcatcgc

SEQ ID NO: 156553 - DNA, 841 bp, Homo sapiens
  Payload ID: 10689
  Gene Symbol: MYADM
  Gene Name: myeloid-associated differentiation marker
  ENST ID: ENST00000439000
  CDS Start-End: 64-841
agacccttccagctgccgctgtcgtctttgcttcagccgcagtcgccactggctgcctgagccatgccagtgacggtaacccgcaccaccatcacaaccaccacgacgtcatcttcgggcctggggtcccccatgatcgtggggtcccctcgggccctgacacagcccctgggtctccttcgcctgctgcagctggtgtctacctgcgtggccttctcgctggtggctagcgtgggcgcctggacggggtccatgggcaactggtccatgttcacctggtgcttctgcttctccgtgaccctgatcatcctcatcgtggagctgtgcgggctccaggcccgcttccccctgtcttggcgcaacttccccatcaccttcgcctgctatgcggccctcttctgcctctcggcctccatcatctaccccaccacctatgtccagttcctgtcccacggccgttcgcgggaccacgccatcgccgccaccttcttctcctgcatcgcgtgtgtggcttacgccaccgaagtggcctggacccgggcccggcccggcgagatcactggctatatggccaccgtacccgggctgctgaaggtgctggagaccttcgttgcctgcatcatcttcgcgttcatcagcgaccccaacctgtaccagcaccagccggccctggagtggtgcgtggcggtgtacgccatctgcttcatcctagcggccatcgccatcctgctgaacctgggggagtgcaccaacgtgctacccatccccttccccagcttcctgtcggggctggccttgctgtctgtcctcctctatgccaccgcccttgttctctggcccc

SEQ ID NO: 156554 - DNA, 2282 bp, Homo sapiens
  Payload ID: 10690
  Gene Symbol: MYADML2
  Gene Name: myeloid-associated differentiation marker-like 2
  Uniprot ID: A6NDP7
  ENST ID: ENST00000330655
  CDS Start-End: 187-1110
cagcagaaccctgtgaaccccaggcaatgacagcaggatcctgaagcccatgcaggctctgaaccacgcggccatccagaaggggctgcaggcacctgccactaccgcagaggactgaggggccttggcccagcagggaccccagggccttgggggactgtgtgagctggaaacgtggctggccagatgggcagcaccatggagccccctgggggtgcgtacctgcacctgggcgccgtgacatcccctgtgggcacagcccgcgtgctgcagctggcctttggctgcactaccttcagcctggtggcccaccggggtggctttgcgggcgtccagggcaccttctgcatggccgcctggggcttctgcttcgccgtctctgcgctggtggtggcctgtgagttcacacggctccacggctgcctgcggctctcctggggcaacttcaccgccgccttcgccatgctggccaccctgctatgcgcgacggctgcggtcctgtatccgctgtactttgcccggcgggagtgttcccccgagcccgccggctgtgctgccagggacttccgcctggcagccagtgtcttcgccgggctcctcttcctggcctacgctgtggaggtggccctgacgcgggcccggcccggccaggtgagcagctatatggccacggtgtcggggctcctcaagatcgtccaggccttcgtggcctgcatcatcttcggggcgctggtccatgacagccgctacgggcgctacgtggccacccagtggtgcgtggccgtctacagcctgtgcttcctggccacagtggccgtggtggccctgagtgtgatgggccacacagggggcctgggctgcccctttgaccggctggtggtggtgtacaccttcctggctgtgctcctgtacctcagcgccgccgtgatctggccagtcttctgtttcgatcccaagtacggtgagcccaaacggccccccaactgtgctcggggcagctgtccctgggacagccagctggtggtggccatcttcacctacgtcaacctgctcctgtacgtcgttgacctcgcctactcccagaggattcgcttcgtgcccagcctgtagcccacagtggcagcccacccacctctgctctctggccaccagctccaggctctgcgagggaaactcaggtgaaccaaagtgtcaagtagcgagcaggagggaagccgcgggctcaggggagatgaagtacaacgggagaggtcactccccgacttccagactgggctcagagggacaagggcaggacagtagggcagaggccctgagcagacgcaggggagagcctcacctaggccaatccccaactcactctctctcaccatttcccagcgctcctggggctcagtgctggtcactggaacatcataagggaaaactttaaagcagctgctgttgtgacccattttgcagctggggacatggaggctagaagcatttgcgaggcacccagtacctccattagtgtctggagaccacagtcaggctgggtaaggcaagctgaaagaggaatgacttccagaggagacgaacccaggagagtagctgggccaggcaaggggagggaggggcgtggggagccggaaccactcctggttcagagaggcagctcccagaaccctgggaagagagccctgcctggggagctgtgccagctcacagagaaggagccagaaatctggaccagcctctcccacccacgtccgggaagcctctgggctggtagccacagtgtttggaagcaggcttcctccggagtctccgcaggctggaggtggcgcgggtggcctggaagagcctgcagagcccggcggcaccgagtgcacagtggacggggaggacctggttccgccatagccacggagccccacctggacactcaccattggctgtgacgaagcagcttcagcagtgcccggcgggcatctgtgcactgtgggcatctgtggcactgggagggagcccggctgagggcggccgctggacacagaatctgggtactgcttgcctctgctcaagggtccagttgccgaaactcctgacgccggggccatcatcctccaggctccagccagcttctcctgcacagaagcccagcctggtccagccaggagctgacccactggccacccctgagtccaagccgggtgggcagtggcacaacagcccctcagcccattgactgggccccattgacgtccttgagcaggaaataaatgctgacatttatacgt

SEQ ID NO: 156555 - DNA, 2452 bp, Homo sapiens
  Payload ID: 10690
  Gene Symbol: MYADML2
  Gene Name: myeloid-associated differentiation marker-like 2
  Uniprot ID: A6NDP7
  ENST ID: ENST00000409745
  CDS Start-End: 356-1279
cttcagatgccagtcccaagtacagctgtccctttgtatccttgggggatgggatccagtacctccaaaacaccagaatccacaaggccagagtccctgatacaaaatggcatgttatttgcatataaccccctcctctggacttaaatcacctcttgattacttataacacctgaaccctgtgaaccccaggcaatgacagcaggatcctgaagcccatgcaggctctgaaccacgcggccatccagaaggggctgcaggcacctgccactaccgcagaggactgaggggccttggcccagcagggaccccagggccttgggggactgtgtgagctggaaacgtggctggccagatgggcagcaccatggagccccctgggggtgcgtacctgcacctgggcgccgtgacatcccctgtgggcacagcccgcgtgctgcagctggcctttggctgcactaccttcagcctggtggcccaccggggtggctttgcgggcgtccagggcaccttctgcatggccgcctggggcttctgcttcgccgtctctgcgctggtggtggcctgtgagttcacacggctccacggctgcctgcggctctcctggggcaacttcaccgccgccttcgccatgctggccaccctgctatgcgcgacggctgcggtcctgtatccgctgtactttgcccggcgggagtgttcccccgagcccgccggctgtgctgccagggacttccgcctggcagccagtgtcttcgccgggctcctcttcctggcctacgctgtggaggtggccctgacgcgggcccggcccggccaggtgagcagctatatggccacggtgtcggggctcctcaagatcgtccaggccttcgtggcctgcatcatcttcggggcgctggtccatgacagccgctacgggcgctacgtggccacccagtggtgcgtggccgtctacagcctgtgcttcctggccacagtggccgtggtggccctgagtgtgatgggccacacagggggcctgggctgcccctttgaccggctggtggtggtgtacaccttcctggctgtgctcctgtacctcagcgccgccgtgatctggccagtcttctgtttcgatcccaagtacggtgagcccaaacggccccccaactgtgctcggggcagctgtccctgggacagccagctggtggtggccatcttcacctacgtcaacctgctcctgtacgtcgttgacctcgcctactcccagaggattcgcttcgtgcccagcctgtagcccacagtggcagcccacccacctctgctctctggccaccagctccaggctctgcgagggaaactcaggtgaaccaaagtgtcaagtagcgagcaggagggaagccgcgggctcaggggagatgaagtacaacgggagaggtcactccccgacttccagactgggctcagagggacaagggcaggacagtagggcagaggccctgagcagacgcaggggagagcctcacctaggccaatccccaactcactctctctcaccatttcccagcgctcctggggctcagtgctggtcactggaacatcataagggaaaactttaaagcagctgctgttgtgacccattttgcagctggggacatggaggctagaagcatttgcgaggcacccagtacctccattagtgtctggagaccacagtcaggctgggtaaggcaagctgaaagaggaatgacttccagaggagacgaacccaggagagtagctgggccaggcaaggggagggaggggcgtggggagccggaaccactcctggttcagagaggcagctcccagaaccctgggaagagagccctgcctggggagctgtgccagctcacagagaaggagccagaaatctggaccagcctctcccacccacgtccgggaagcctctgggctggtagccacagtgtttggaagcaggcttcctccggagtctccgcaggctggaggtggcgcgggtggcctggaagagcctgcagagcccggcggcaccgagtgcacagtggacggggaggacctggttccgccatagccacggagccccacctggacactcaccattggctgtgacgaagcagcttcagcagtgcccggcgggcatctgtgcactgtgggcatctgtggcactgggagggagcccggctgagggcggccgctggacacagaatctgggtactgcttgcctctgctcaagggtccagttgccgaaactcctgacgccggggccatcatcctccaggctccagccagcttctcctgcacagaagcccagcctggtccagccaggagctgacccactggccacccctgagtccaagccgggtgggcagtggcacaacagcccctcagcccattgactgggccccattgacgtccttgagcaggaaataaatgctgacatttatacgta

SEQ ID NO: 156556 - DNA, 1018 bp, Homo sapiens
  Payload ID: 10691
  Gene Symbol: MYDGF
  Gene Name: myeloid-derived growth factor
  Uniprot ID: Q969H8
  ENST ID: ENST00000262947
  CDS Start-End: 37-558
gtctacccgcccctgccctgaggaccctagtccaacatggcggcgcccagcggagggtggaacggcgtcggcgcgagcttgtgggccgcgctgctcctaggggccgtggcgctgaggccggcggaggcggtgtccgagcccacgacggtggcgtttgacgtgcggcccggcggcgtcgtgcattccttctcccataacgtgggcccgggggacaaatatacgtgtatgttcacttacgcctctcaaggagggaccaatgagcaatggcagatgagtctggggaccagcgaagaccaccagcacttcacctgcaccatctggaggccccaggggaagtcctatctgtacttcacacagttcaaggcagaggtgcggggcgctgagattgagtacgccatggcctactctaaagccgcatttgaaagggaaagtgatgtccctctgaaaactgaggaatttgaagtgaccaaaacagcagtggctcacaggcccggggcattcaaagctgagctgtccaagctggtgattgtggccaaggcatcgcgcactgagctgtgaccagcagccctgttgcgggtggcaccttctcatctccggtgaagctgaaggggcctgtgtccctgaaagggccagcacatcactggttttctaggagggactcttaagttttctacctgggctgacgttgccttgtccggaggggcttgcagggtggctgaagccctggggcagagaacagagggtccagggccctcctggctcccaacagcttctcagttcccacttcctgctgagctcttctggactcaggatcgcagatccggggcacaaagagggtggggaacatgggggctatgctggggaaagcagccatgctccccccgacctccagccgagcatccttcatgagcctgcagaactgctttcctatgtttacccaggggacctcctttcagatgaactgggaagagatgaaatgttttttcatatttaaataaataagaacattaaaaagcaa

SEQ ID NO: 156557 - DNA, 463 bp, Homo sapiens
  Payload ID: 10691
  Gene Symbol: MYDGF
  Gene Name: myeloid-derived growth factor
  ENST ID: ENST00000599761
  CDS Start-End: 1-254
accaccagcacttcacctgcaccatctggaggccccaggggaagtcctatctgtacttcacacagttcaaggcagaggtgcggggcgctgagattgagtacgccatggcctactctaaagccgcatttgaaagggaaagtgatgtccctctgaaaactgaggaatttgaagtgaccaaaacagcagttatctcagccccacaagaaaaaggagatgaccagccccattggacagatggggaaactgaggcctagaagctggggatttacaagatcccaagaactctgccagaggtccctgcgtcaaagctcgagcgggtgtgattccagggaggtcatctgctgaggggtgtcgggagatgctgggaaggggcaggcatgctgtggaactgggccgttcctgcctctcgctctgcctccttgccctgctccccgtctgtaacacctgagctgtacctgggcaa

SEQ ID NO: 156558 - DNA, 713 bp, Homo sapiens
  Payload ID: 10691
  Gene Symbol: MYDGF
  Gene Name: myeloid-derived growth factor
  ENST ID: ENST00000599630
  CDS Start-End: 29-598
gcccctgccctgaggaccctagtccaacatggcggcgcccagcggagggtggaacggcgtcggcgcgagcttgtgggccgcgctgctcctaggggccgtggcgctgaggccggcggaggcggtgtccgagcccacgacggtggcgtttgacgtgcggcccggcggcgtcgtgcattccttctcccataacgtgggcccgggggacaaatatacgtgtatgttcacttacgcctctcaaggagggaccaatgagcaatggcagatgagtctggggaccagcgaagaccaccagcacttcacctgcaccatctggaggccccaggggaagtcctatctgtacttcacacagttcaaggcagaggtgcggggcgctgagattgagtacgccatggcctactctaaagccgcatttgaaagggaaagtgatgtccctctgaaaactgaggaatttgaagtgaccaaaacagcaggtacggaaagatggggatggggtagaggtgacgccacccccatccaagggtgggcaatcggggcagtttggagaggggggtcagccataggggtcctggagactgtagaccaggcatccacaaactgattctataaaggccacctcgtcaatatcttcagctttgtggcactgtgggttctgtctagagctgtgccattgtggcacaaagctgctgcagacagtatgtccatgcgtgggtgtg

SEQ ID NO: 156559 - DNA, 2287 bp, Homo sapiens
  Payload ID: 10692
  Gene Symbol: MYEOV
  Gene Name: myeloma overexpressed
  Uniprot ID: Q96EZ4
  ENST ID: ENST00000308946
  CDS Start-End: 451-1392
gttactgtcccgcgaacccacatccctacaaagcaggaaagtatgcttgggagaggccaagtgagtggggaatcagcccaaagccaggcgtccagggtctccctcacctgaagctgactttttccccaccttggacagagggcgggagatgccatccccactgaacccagtgctttcaccagccatattagctcccactcaccccccgtcgtggaagcctcggccgtcacacctgcagggccggggcgtgcatggcctcagggatggcctgttcagctgctgggtgactcgggtccaggtgcctcaccacctgctgagctctgtgtgatttctggacacttctgctcgttgcctttgggctcagtgaagagtctggagtttatctggagtgaggtggccggttcttggtgggatctgagcaggacagcgtctggctccttccctcggctcatggccctcagaatctgcgtcacatacaccccagctctcccgataggtctctgcactcgctgttgcctctgcctggaacagtctccctcctggtgtcattgtctccgtggtgtgtccttcctgaccttccacctccaccagtctgtcccccttggggacagggactcgttgctcatgttcacccggcaggctggacacttcgtggagggctccaaagccggcagatcccggggccgcctctgtctctcccaggccctgcgtgttgcggtgagaggagcatttgtgtctctgtggtttgctgctggagctggtgaccgggagagaaacaagggagacaagggtgcccagacaggtgcggggctcagccaggaggcagaagacgtggacgtgtcccgggccaggagggtcacagatgcaccacaaggcactctgtgtggcactgggaacaggaattctgggagtcagtctgcaagggtggtgggcgttgctcacctgggagaagcctttagagtgggcgttgagcaggccattagctcgtgccctgaggaggtgcatgggcggcatgggctctccatggaaattatgtgggcgcgaatggatgtggctctgcgctcacctgggcgaggacttctggccggtgccggggcactctgcatgaccctggcagaatcgagctgccctgactatgaaaggggaagaagagcatgcctgaccctccaccggcaccccacccctcactgctccacctggggcctgcctctgcgggtggctgggtcctggctgactgttgtgactgttgaggccctgggggggtggcgcatgggagttaggaggactggccaggtggggcccactatgcacccacccccagtgtcaggtgcttctcctctcctcctccaccacctcctcctcctcctcctcatcatcatcctcacttgttgaggacgtcctgtgtgccaagtggtttatatgcccagcctcatttaatcctcagaatgactccatgaggtagctactaaaaccccccacttaacagatgaggaaactgaggcctagagaagctcaacaagttgcctaagttccaagtttcctctcccaactctcctaccctctcctcttccttctcctttctcccattcttccctgcctcttccctaactagacaattttttattgagtgtctcccaggtgcaggcatgagccaggtgctgggaaaatcatgataacccagctccttctggtcattttctcagctggttagaggctgggaggacacgcaagttcagctccagccgactggggcattggtggtagcccctggagacattgtgcaatggggctacgaggctgcatctggctccagggaagcgtgttgcaatccatgagtgatgtctgccatgcgtacaggcatggagagtgaggcgcctgtactgtctttctgtagaccctagactggtggggcctctgaaatgcatccagacactgtgctgggtgtgttgcatggccctcccaaccaattcagtatttttctccccattttccagggagaaatctaaggcgtcagaatgtaaggttcttattggaacccaggctccagggtccctggttttctgtgacatcatgctgcaggaccctgtttctctctttgctttggctgctggggagctcagaagggagctttaggcttgctctcagtcaccacattagctcaggggtttgggcatttttgtcgccgtctcctttgggctctgtctcctccctgctgtgcttcctgaggagcaggccggatgtaagttatcaactataaataaaaccaagacttccgttctggctctca

SEQ ID NO: 156560 - DNA, 1996 bp, Homo sapiens
  Payload ID: 10692
  Gene Symbol: MYEOV
  Gene Name: myeloma overexpressed
  Uniprot ID: Q96EZ4
  ENST ID: ENST00000441339
  CDS Start-End: 562-1503
cttgccttgattctcctgttactgtcccgcgaacccacatccctacaaagcaggaaagtatgcttgggagaggccaagtgagtggggaatcagcccaaagccaggcgtccagggtctccctcacctgaagctgactttttccccaccttggacagagggcgggagatgccatccccactgaacccagtgctttcaccagccatattagctcccactcaccccccgtcgtggaagcctcggccgtcacacctgcagggccggggcgtgcatggcctcagggatggcctgttcagctgctgggtgactcgggtccaggtgcctcaccacctgctgagctctgtgtgatttctggacacttctgctcgttgcctttgggctcagtgaagagtctggagtttatctggagtgaggtggccggttcttggtgggatctgagcagagtccattcaggagcaggaaagttcatctcagaccctaaatccagccacgtcatgccacgcttaacacctctaacaacttcccctggcacttaggacagcgtctggctccttccctcggctcatggccctcagaatctgcgtcacatacaccccagctctcccgataggtctctgcactcgctgttgcctctgcctggaacagtctccctcctggtgtcattgtctccgtggtgtgtccttcctgaccttccacctccaccagtctgtcccccttggggacagggactcgttgctcatgttcacccggcaggctggacacttcgtggagggctccaaagccggcagatcccggggccgcctctgtctctcccaggccctgcgtgttgcggtgagaggagcatttgtgtctctgtggtttgctgctggagctggtgaccgggagagaaacaagggagacaagggtgcccagacaggtgcggggctcagccaggaggcagaagacgtggacgtgtcccgggccaggagggtcacagatgcaccacaaggcactctgtgtggcactgggaacaggaattctgggagtcagtctgcaagggtggtgggcgttgctcacctgggagaagcctttagagtgggcgttgagcaggccattagctcgtgccctgaggaggtgcatgggcggcatgggctctccatggaaattatgtgggcgcgaatggatgtggctctgcgctcacctgggcgaggacttctggccggtgccggggcactctgcatgaccctggcagaatcgagctgccctgactatgaaaggggaagaagagcatgcctgaccctccaccggcaccccacccctcactgctccacctggggcctgcctctgcgggtggctgggtcctggctgactgttgtgactgttgaggccctgggggggtggcgcatgggagttaggaggactggccaggtggggcccactatgcacccacccccagtgtcaggtgcttctcctctcctcctccaccacctcctcctcctcctcctcatcatcatcctcacttgttgaggacgtcctgtgtgccaagtggtttatatgcccagcctcatttaatcctcagaatgactccatgaggtagctactaaaaccccccacttaacagatgaggaaactgaggcctagagaagctcaacaagttgcctaagttccaagtttcctctcccaactctcctaccctctcctcttccttctcctttctcccattcttccctgcctcttccctaactagacaattttttattgagtgtctcccaggtgcaggcatgagccaggtgctgggaaaatcatgataacccagctccttctggtcattttctcagctggttagaggctgggaggacacgcaagttcagctccagccgactggggcattggtggtagcccctggagacattgtgcaatggggctacgaggctgcatctggctccagggaagcgtgttgcaatccatgagtgatgtctgccatgcgtacaggcatggagagtgaggcgcctgtactgtc

SEQ ID NO: 156561 - DNA, 2306 bp, Homo sapiens
  Payload ID: 10692
  Gene Symbol: MYEOV
  Gene Name: myeloma overexpressed
  ENST ID: ENST00000535407
  CDS Start-End: 644-1411
actgtcccgcgaacccacatccctacaaagcaggaaagtatgcttgggagaggccaagtgagtggggaatcagcccaaagccaggcgtccagggtctccctcacctgaagctgactttttccccaccttggacagagggcgggagatgccatccccactgaacccagtgctttcaccagccatattagctcccactcaccccccgtcgtggaagcctcggccgtcacacctgcagggccggggcgtgcatggcctcagggatggcctgttcagctgctgggtgactcgggtccaggtgcctcaccacctgctgagctctgtgtgatttctggacacttctgctcgttgcctttgggctcagtgaagagtctggagtttatctggagtgaggtggccggttcttggtgggatctgagcaggtctctgcactcgctgttgcctctgcctggaacagtctccctcctggtgtcattgtctccgtggtgtgtccttcctgaccttccacctccaccaggtgccgacacttccctgaccccagtaacctcttctcttgggtgggtgaatgccacctgctgatgtctgatttattcatcggttttcttgtctgtagtctgtcccccttggggacagggactcgttgctcatgttcacccggcaggctggacacttcgtggagggctccaaagccggcagatcccggggccgcctctgtctctcccaggccctgcgtgttgcggtgagaggagcatttgtgtctctgtggtttgctgctggagctggtgaccgggagagaaacaagggagacaagggtgcccagacaggtgcggggctcagccaggaggcagaagacgtggacgtgtcccgggccaggagggtcacagatgcaccacaaggcactctgtgtggcactgggaacaggaattctgggagtcagtctgcaagggtggtgggcgttgctcacctgggagaagcctttagagtgggcgttgagcaggccattagctcgtgccctgaggaggtgcatgggcggcatgggctctccatggaaattatgtgggcgcgaatggatgtggctctgcgctcacctgggcgaggacttctggccggtgccggggcactctgcatgaccctggcagaatcgagctgccctgactatgaaaggggaagaagagcatgcctgaccctccaccggcaccccacccctcactgctccacctggggcctgcctctgcgggtggctgggtcctggctgactgttgtgactgttgaggccctgggggggtggcgcatgggagttaggaggactggccaggtggggcccactatgcacccacccccagtgtcaggtgcttctcctctcctcctccaccacctcctcctcctcctcctcatcatcatcctcacttgttgaggacgtcctgtgtgccaagtggtttatatgcccagcctcatttaatcctcagaatgactccatgaggtagctactaaaaccccccacttaacagatgaggaaactgaggcctagagaagctcaacaagttgcctaagttccaagtttcctctcccaactctcctaccctctcctcttccttctcctttctcccattcttccctgcctcttccctaactagacaattttttattgagtgtctcccaggtgcaggcatgagccaggtgctgggaaaatcatgataacccagctccttctggtcattttctcagctggttagaggctgggaggacacgcaagttcagctccagccgactggggcattggtggtagcccctggagacattgtgcaatggggctacgaggctgcatctggctccagggaagcgtgttgcaatccatgagtgatgtctgccatgcgtacaggcatggagagtgaggcgcctgtactgtctttctgtagaccctagactggtggggcctctgaaatgcatccagacactgtgctgggtgtgttgcatggccctcccaaccaattcagtatttttctccccattttccagggagaaatctaaggcgtcagaatgtaaggttcttattggaacccaggctccagggtccctggttttctgtgacatcatgctgcaggaccctgtttctctctttgctttggctgctggggagctcagaagggagctttaggcttgctctcagtcaccacattagctcaggggtttgggcatttttgtcgccgtctcctttgggctctgtctcctccctgctgtgcttcctgaggagcaggccggatgtaagttatcaactataaataaaaccaagacttccgttctggctctca

SEQ ID NO: 156562 - DNA, 759 bp, Homo sapiens
  Payload ID: 10693
  Gene Symbol: MYEOV2
  Gene Name: myeloma overexpressed 2
  Uniprot ID: Q8WXC6
  ENST ID: ENST00000307266
  CDS Start-End: 1-759
atgtggcgcgcgccggaagcggctctgaggccggaagtgagcctagagcgccgcggccccgagatgaagccggcggtggacgagatgttccccgagggcgccgggccctacgtggacctggacgaggtggcacgggcccggcgggagtctccgagcgcgggaggcagcaccgggctcttgatggacttggcagccaatgaaaaggccgttcatgcagacttttttaacgattttgaagatctttttgatgatgatgacatccacagctcaggactgcccaggacaagccagcagtcctccatggttcccgcactgcagcgagggcagtcggagcacggggtccgtgggaaggcagcagagcggcctgtggtgtcggaagagagatgtgaactgaacgggagagaagtggcagctttggacagagcgtttgggagcacaggccatgggcagggggcggaggcgctaatgtttaccagatgcagagaacatccgctgtgtggcaccaacaaagcaacaagtgaggggaaaatgggcacaggacgcttaagaaacagtttacggaagaaccaatccaagtggctgggaagttatctagaggtgctcagaaccacaagaagcaggcgagaggtcagcgaagacagcacaatatcagtttctactcactggaggggtaaatgttttaagagtgatgaaacaccatccgttgctggtggagaagaagggaagaagaccacacagccatgcatagatgtgaggtag

SEQ ID NO: 156563 - DNA, 609 bp, Homo sapiens
  Payload ID: 10693
  Gene Symbol: MYEOV2
  Gene Name: myeloma overexpressed 2
  ENST ID: ENST00000403160
  CDS Start-End: 461-609
ctccccgccgcggtgcgaggggccccgtgtgccgcgcacccttccacccgtgttttgctgtttttttgactctgggcgtcccaggggtgcagcggccgtggggccctggtttgctttcacctcttcatctgctcactggccgcgagtgtgtcttcttcagacaaacgtctgaaggtcaagccctgggctcctgtgaacccggccgtctttgcggcagagtctgaggctccttctttattctggatccggcctctggtcggaggcgtgctctgcaggcactgctcccattgctggcagccttttctccccgtggccgcccggccgcccatcagaggcgttgcagacgcccgccctcgccagcgcaaagacaaacgccggtggccgcggacgcgccggcggccgggagcaccccagcgggcgggcaccacagaggcgcggtcctccggcgtctagatctgccatgtggcgcgcgccggaagcggctctgaggccggaagtgagcctagagcgccgcggccccgagatgaagccggcggtggacgagatgttccccgagggcgccgggccctacgtggacctggacgaggcgggaggcagcaccgggctctt

SEQ ID NO: 156564 - DNA, 418 bp, Homo sapiens
  Payload ID: 10693
  Gene Symbol: MYEOV2
  Gene Name: myeloma overexpressed 2
  Uniprot ID: Q8WXC6
  ENST ID: ENST00000607357
  CDS Start-End: 20-193
agagcgccgcggccccgagatgaagccggcggtggacgagatgttccccgagggcgccgggccctacgtggacctggacgaggcgggaggcagcaccgggctcttgatggacttggcagccaatgaaaaggccgttcatgcagacttttttaacgattttgaagatctttttgatgatgatgacatccagtgagatgccctctggctgcaggcggggccaagcccttggtacagagccgcagtgtgagcctgcgcaggacagtttcaggtggttttaaagaacacgtggaaatcccttgaatttaggacctggttaaccagaaagataagactgttcttaacgacctagatgattctgttcatctctgaacgggatcaggttttgtcctcactccaattaaaagaaagcaatgtcaca

SEQ ID NO: 156565 - DNA, 3215 bp, Homo sapiens
  Payload ID: 10694
  Gene Symbol: MPO
  Gene Name: myeloperoxidase
  Uniprot ID: P05164
  ENST ID: ENST00000225275
  CDS Start-End: 178-2415
gacaatatcaggtgagctgtggaggtggggtccttggaagctggatgacagcagctggcaaggggataagagagcagtgagcccctccctcaaggaggtctggctttatccatagacagggccctctgaggtggggctgaggtacaaagggggattgagcagcccaggagaagagagatgggggttcccttcttctcttctctcagatgcatggtggacttaggaccttgctgggctgggggtctcactgcagagatgaagctgcttctggccctagcagggctcctggccattctggccacgccccagccctctgaaggtgctgctccagctgtcctgggggaggtggacacctcgttggtgctgagctccatggaggaggccaagcagctggtggacaaggcctacaaggagcggcgggaaagcatcaagcagcggcttcgcagcggctcagccagccccatggaactcctatcctacttcaagcagccggtggcagccaccaggacggcggtgagggccgctgactacctgcacgtggctctagacctgctggagaggaagctgcggtccctgtggcgaaggccattcaatgtcactgatgtgctgacgcccgcccagctgaatgtgttgtccaagtcaagcggctgcgcctaccaggacgtgggggtgacttgcccggagcaggacaaataccgcaccatcaccgggatgtgcaacaacagacgcagccccacgctgggggcctccaaccgtgcctttgtgcgctggctgccggcggagtatgaggacggcttctctcttccctacggctggacgcccggggtcaagcgcaacggcttcccggtggctctggctcgcgcggtctccaacgagatcgtgcgcttccccactgatcagctgactccggaccaggagcgctcactcatgttcatgcaatggggccagctgttggaccacgacctcgacttcacccctgagccggccgcccgggcctccttcgtcactggcgtcaactgcgagaccagctgcgttcagcagccgccctgcttcccgctcaagatcccgcccaatgacccccgcatcaagaaccaagccgactgcatcccgttcttccgctcctgcccggcttgccccgggagcaacatcaccatccgcaaccagatcaacgcgctcacttccttcgtggacgccagcatggtgtacggcagcgaggagcccctggccaggaacctgcgcaacatgtccaaccagctggggctgctggccgtcaaccagcgcttccaagacaacggccgggccctgctgccctttgacaacctgcacgatgacccctgtctcctcaccaaccgctcagcgcgcatcccctgcttcctggcaggggacacccgttccagtgagatgcccgagctcacctccatgcacaccctcttacttcgggagcacaaccggctggccacagagctcaagagcctgaaccctaggtgggatggggagaggctctaccaggaagcccggaagatcgtgggggccatggtccagatcatcacttaccgggactacctgcccctggtgctggggccaacggccatgaggaagtacctgcccacgtaccgttcctacaatgactcagtggacccacgcatcgccaacgtcttcaccaatgccttccgctacggccacaccctcatccaacccttcatgttccgcctggacaatcggtaccagcccatggaacccaacccccgtgtccccctcagcagggtcttttttgcctcctggagggtcgtgctggaaggtggcattgaccccatcctccggggcctcatggccacccctgccaagctgaatcgtcagaaccaaattgcagtggatgagatccgggagcgattgtttgagcaggtcatgaggattgggctggacctgcctgctctgaacatgcagcgcagcagggaccacggcctcccaggatacaatgcctggaggcgcttctgtgggctcccgcagcctgaaactgtgggccagctgggcacggtgctgaggaacctgaaattggcgaggaaactgatggagcagtatggcacgcccaacaacatcgacatctggatgggcggcgtgtccgagcctctgaagcgcaaaggccgcgtgggcccactcctcgcctgcatcatcggtacccagttcaggaagctccgggatggtgatcggttttggtgggagaacgagggtgtgttcagcatgcagcagcgacaggccctggcccagatctcattgccccggatcatctgcgacaacacaggcatcaccaccgtgtctaagaacaacatcttcatgtccaactcatatccccgggactttgtcaactgcagtacacttcctgcattgaacctggcttcctggagggaagcctcctagaggccaggtaagggggtgcagcagtgaggggtatatctgggctggccagttggaaccacggagatctccttgccctagatgagcccagccctgttctgggtgcagctgagaaaatgagtgactagacgttcatttgtgtgctcatgtatgtgcgaagtatataaattggcttttcatgcgtgtgtgttgtctgaacatggggagtgtttcatgggttatgtgtatgtgccatttatgtgagtgtgtgtttgtgctgatgagaatactgagtatgtggaaggcagcagagcggactggtgaggagcacagctcaggaactagactgcctgggttccaatcctggctctgtggcttgctagctatgtgaccttgagcaaattaccctccttaaacaagagttttcttccttgtaaattacatctgtcatggtttcttggagggcccacttgtatcctctggttcttcatttattgagcacctactacatgcaaggcactgtactaggcgtgagaagcatatagaggcaagaaagagataccaagatgccatctgtgtcctggttagcagagctggaccagtggtgccttggagggataagccagctgcagctgggctgtgtggttgacttatgggcccagccagccaggctcaggccatggctcccctttttcttcctcaccctgatttcttgcttattcactgaagttctcctgaagaggaactgggcctgttgccctttctgtaccatttatttgctcccaatgtttatgataataaaggcaccgctgatggggacctcc

SEQ ID NO: 156566 - DNA, 260 bp, Homo sapiens
  Payload ID: 10694
  Gene Symbol: MPO
  Gene Name: myeloperoxidase
  ENST ID: ENST00000577220
  CDS Start-End: 1-260
cggtaccagcccatggaacccaacccccgtgtccccctcagcagggtcttttttgcctcctggagggtcgtgctggaaggtggcattgaccccatcctccggggcctcatggccacccctgccaagctgaatcgtcagaaccaaattgcagtggatgagatccgggagcgattgtttgagcagatctcattgccccggatcatctgcgacaacacaggcatcaccaccgtgtctaagaacaacatcttcatgtccaactc

SEQ ID NO: 156567 - DNA, 6779 bp, Homo sapiens
  Payload ID: 10695
  Gene Symbol:
  Gene Name: MYO16
  ENST ID: ENST00000635050
  CDS Start-End: 42-5618
caggttgctttcagctatgtaacgtttttcgatcccatgagatggaaatcgaccagtgcttgctagagtcccttccccttggccaacggcagcgtctagtgaagcgcatgcgctgtgagcaaatcaaagcctactatgagcgcgagaaggcttttcagaagcaggaagggttcctgaaaaggctgaagcatgcgaagaatccgaaagttcacttcaacctcacggacatgctacaggacgcgattatccaccacaatgacaaagaagtgcttcggctcctgaaggagggggcagacccccacaccctcgtctcctcgggagggtccctgctccatctgtgtgctcggtatgataatgccttcattgcagaaattctgattgacagaggagtcaacgtcaaccaccaggatgaagacttctggacgcccatgcacattgcctgtgcctgcgataaccctgatattgtcctgcttcttgtattagctggagccaatgtccttctccaggatgtgaatggaaatatcccattagattatgctgtagaagggacagaatccagctctatcctgttgacctatctggatgaaaatggagtggatttgacctcactgcgccagatgaagcttcagagaccaatgagtatgttaacagatgtcaaacacttcttatcatctggaggaaatgtcaatgagaaaaacgatgaaggagtaaccctgttacacatggcgtgtgcgagtggctacaaggaggtggtgtctcttatcctggaacatggtggagacctcaacatagtagatgatcagtactggactcccctccacttggcagccaaatatggccagacaaatctggtgaaacttctcctgatgcatcaggcaaacccacacctcgtgaactgtaatgaggagaaggcgtcagatattgctgcctctgagtttattgaggaaatgctgctgaaagccgaaattgcctgggaagaaaaaatgaaagagcctttatctgcttctaccttagctcaagaagagccctatgaagagatcattcacgatcttcccgtactgtcgagtaagctcagtcccctggtgttaccaattgccaagcaagacagtttgttggaaaaagacattatgttcaaagatgcaacaaaaggtctgtgtaagcagcagtctcaggacagcatccctgaaaaccccatgatgagcggttccaccaaacccgagcaggtcaagctaatgcctcctgccccaaacgatgacctggcaacgctcagcgagctcaatgatggcagcctgctctatgagattcagaagcgctttgggaacaatcagatctatacattcattggagacattcttttgcttgttaacccatacaaggagcttccaatttattcttccatggtgtcccagctgtatttcagctcctcagggaagctgtgttcctcgctgcctcctcacctcttctcctgtgtggagagagcctttcaccagctcttccgggaacagcggcctcagtgtttcatcctcagtggagaaaggggatcaggaaagtctgaagccagcaaacaaatcataagacacctcacctgcagggctggcgccagcagggccacactggattccagattcaaacatgtcgtgtgcatcttagaagcctttggacatgccaagaccacacttaatgatttgtccagttgcttcatcaagtattttgaactgcagttctgtgagaggaaacaacagctaaccggagccagaatttatacatatttgctagagaaatccagacttgtttcacaacctcttggccagagcaattttctcattttctacttgttgatggatgggttatctgctgaagaaaaatatggacttcatcttaataatttatgtgcacaccggtatttgaaccagaccatacaggatgatgcatccacaggggagcgttctctgaacagggagaaattggctgttttgaaacgagccctgaatgtagttggcttcagcagcttggaggtggagaatctgttcgtaattctagcagcaatattgcaccttggagacattcggtttactgccctgaatgaggggaactccgccttcgtttctgacctccagctcctggaacaagtggctggaatgttacaagtatcaacagatgaattggcatctgccttaacaactgatattcaatattttaaaggggatatgataatacgacgacataccatacagattgctgagtttttccgagacctcttggccaagtccctgtacagtcgtttgtttagctttttggtgaataccatgaattcttgcctccacagtcaagatgaacagaaaagcatgcagacattggatattggaatattggacatttttggttttgaagagtttcaaaagaatgaatttgaacaactttgtgtcaacatgaccaatgagaagatgcaccactatatcaatgaagtgctttttctccacgagcaagtggaatgtgtacaagagggagttaccatggaaacagcatattctcctggtaaccagaatggagttttggacttttttttccagaagccatctggatttctcaccttattggatgaagaaagtcaaatgatttggtcagtggaatcaaattttccaaaaaaactacaaagtctcctagaatcctcaaacacaaatgcggtgtactcccccatgaaggatgggaatgggaatgttgccctcaaagaccacggtacagccttcaccatcatgcactacgcaggaagggtaatgtatgatgttgttggggcgattgaaaaaaataaagactccctttcacagaatcttctatttgtaatgaaaactagtgaaaatgtcgtgatcaatcatttgttccagtcgaaattgtcacaaacaggatccctcgtatctgcctatccttcctttaaattccgaggacataagtctgccctgctcagtaagaaaatgacagcttcttcaattattggagaaaacaagaattatctagaacttagtaagttattaaaaaagaaaggaacttctacatttcttcaaagattggaacgaggagatccagtcaccatagcatcacaactcaggaaatcactaatggatattattggaaaacttcagaagtgcactccacacttcattcattgcatcaggcccaataactcaaagctgccagatacttttgataatttttacgtgtctgctcagctacaatatattggggtcctggagatggtgaagatcttccgatatggataccctgttcgcctttccttctcggatttcctgtcaaggtataagccactggctgatacattcctgcgtgagaagaaggaacagtcagctgccgagcgatgtcgacttgttctccagcagtgtaaattacaaggctggcagatgggagtccgaaaagtgtttctaaaatactggcatgctgaccaactcaatgatttgtgcctacagttgcagagaaaaattataacctgccaaaaagttatcagaggatttttagcacgccagcacctgcttcagagaataagcatcagacaacaagaggtgacttctatcaatagctttctgcagaacacagaggacatggggctgaaaacctacgatgccctggtcattcagaatgcttcagacattgcccgggaaaatgaccggctccgtagtgaaatgaacgctccctaccataaagagaagttagaggtcaggaacatgcaagaggaaggaagcaaaagaaccgatgacaagagtggacccaggcatttccaccccagctccatgtcagtctgcgcggccgtggatggcctgggccagtgcctcgttggcccgtccatctggtctccttcgctgcactcggtgttcagcatggatgacagcagcagcctcccgtctccacggaaacagcccccgcccaagccaaagagggaccccaacacccggctgagtgcttcctatgaggctgtgagcgcctgcctctccgcggccagggaagcggccaacgaagctctggcccggcccagaccgcacagcgacgactacagcaccatgaagaagattcctcctcgaaagcccaagcgcagccccaacaccaagctcagcggctcctacgaggagatatcggggtcccggcccggggacgcgaggcccgcgggcgccccgggggcagcagcgcgcgttctgacccccgggactccgcagtgcgcgctgcccccggcggcgcctccgggtgacgaggacgacagcgagcctgtgtacatcgagatgctggggcacgcggccaggcccgatagcccggaccccggggagtccgtgtacgaggagatgaagtgttgcctgcccgacgacggcggcccgggcgcgggctccttcctgctccacggcgcatcgccgcccctgctccaccgcgcgccggaggacgaggcggcggggcccccaggggacgcgtgcgacatcccgccgcccttccccaacctgctgccgcaccggccgcccctgctggtgttccccccgacccccgtcacctgctcccccgcctccgacgagtcgcccctgacacccctggaggtgaagaagctgccagtcctggagaccaacctcaagtaccccgtgcagccggaggggtcgagcccgctgtccccgcagtactccaagagccagaagggcgacggcgacaggcccgcgtcccccggcctggcgctgttcaacgggtccggccgagcctccccgccgtccacgccgcccccgcccccgcccccgcccgggccgccccccgcgccctacaggccctgcgcgcacttggccttcccgccggagcccgccccggtgaacgcggggaaagcggggccgagcgcagaggcgcccaaggttcacccaaagccaaactctgcccccgtggccgggccctgcagctccttccccaagatcccatattcccccgtgaaggccaccagggcggacgccaggaaggccggctccagtgcctcgccccccgcgccctacagccctcccagctccaggcctctcagcagccccctggacgagctcgccagcctcttcaactcggggaggagtgtgcttcggaaatccgcggcgggaagaaaaatcagggaagcagaaggttttgaaactaacatgaacataagtagccgagatgaccctagtacgtcagaaattacttccgagactcaagacagaaatgcaaataaccatggaattcagttatctaattcactatctagtgctataactgctgaaaatggaaattccatctcaaatggtttacctgaagaagatggatactcacggttgtctataagtggcacagggacttcgacatttcaaagacacagggacagtcacaccactcaggtaatccatcagctgaggctctcagagaatgaaagtgtggccctgcaggaactcttggactggaggagaaagctctgtgaggaaggacaagactggcagcagatcctgcaccacgctgagcccagggtgcctcccccaccaccttgcaagaagcccagccttctgaagaagccggaaggggcctcctgcaacaggctgccgtctgagctctgggacaccaccatttgatgtggcctgaactgcagacttacaaaatagaactgcctactgattccgggctgcaacaacagaaggctgccttctgacatgcgctggggcttctctccacgcatttagacaaaaaaagcacaggacacagacactaaatatatgagatcccgtgtgtgtgtgtgtgtgtttgtgtgtgtgtgtgtgggttctttcttatccatctcgtggtgatacactctgattttcaagctcctcatttacggctctgtgctacccctaggtagcaagagagaggctgggaaaagtgtggacgtggccagagcgagagagtagcggaggaaaggagcaatccatgcacactctgtacagttgtttttctacggttcaacagtctgtttattgtacttccaatggttttattataatacagtatacgggacatatattttatttctttgtagctacttgtgttttattggtattataaacctgataattatttacatgtttattactgtaattttataaatttatgcaattggtggtgcttcctttcttcaaaatacagattttaaaaaatcatttctagattatttttttcctccacagtccttttttttcacctaacgcacctaaatcttgaaactacattgttgttttagcttcgccagtgtcaccccttgcaaaactatgaattgagccccatgttttaggtgttactcatggatgaggaggctgttctttcctatgccctgtatttctggataagtggattgtgtaccctttagttaaatttcacctcccgacttcagcatagatcacaggaaatcacatggcacacggttaaacacgtatggcttcaaatccatagccggtggtgtaaaatgatcatattcattcaaaggcctacacagtacaaatgagcacgctgccatgtactggtttgagcagtaggggctgcatcgcacagcgctcgtcccccgggacttacactgcatgattccctcactgtatatcctcaaccctcccataatgcaaggccttgttcattgatgtgctttcgtcggctgtcggaaagttctgagcagtggctccagaccaccttgtcttgctacttggaactttttattcataccagcctttgaaaagttactgtgccaataaagaggtacaactgtg

SEQ ID NO: 156568 - DNA, 7436 bp, Homo sapiens
  Payload ID: 10695
  Gene Symbol:
  Gene Name: MYO16
  ENST ID: ENST00000634615
  CDS Start-End: 623-6265
acagatcaaagatctctgattctaagaggtggctattttaagctcctgctatcaatttcctattcacacacagcaactggtggcaactaaaaataatccgctttactaccagctaagaatctggtcatatgtggctgatggacagtgtgcacgaagaagatttaggatccttctatccgtggcttctctccagcccactcatcagcttagtttgctgccatttgaaagctattgaaaagccattaacaggcaggaccgggagagccgcactgcagcacacctccgtgcagcagaatgtggctgcatgtgaacaccaattagagctgactattcccgggattgtggtactcggggctgtgtcaatcaagggtgctacaatagcacgtgcaccagtggtgcctcaagacccaccggggagaggcttatcttaactccagctgccgaatgagaatgagtttgaagctttttgcaggatcatggaacagagcctccatgcaatagtgcatcctgaggtaaactgttacctgagtaagggctttaagtaatgcatttcctgggaacgacagttgtgacagaagagaatgctggaacccgtagcaagattcctgtctgagatggaaagatgtctcactatcattttatcaagtgctgttgctttcagctatgtaacgtttttcgatcccatgagatggaaatcgaccagtgcttgctagagtcccttccccttggccaacggcagcgtctagtgaagcgcatgcgctgtgagcaaatcaaagcctactatgagcgcgagaaggcttttcagaagcaggaagggttcctgaaaaggctgaagcatgcgaagaatccgaaagttcacttcaacctcacggacatgctacaggacgcgattatccaccacaatgacaaagaagtgcttcggctcctgaaggagggggcagacccccacaccctcgtctcctcgggagggtccctgctccatctgtgtgctcggtatgataatgccttcattgcagaaattctgattgacagaggagtcaacgtcaaccaccaggatgaagacttctggacgcccatgcacattgcctgtgcctgcgataaccctgatattgtcctgcttcttgtattagctggagccaatgtccttctccaggatgtgaatggaaatatcccattagattatgctgtagaagggacagaatccagctctatcctgttgacctatctggatgaaaatggagtggatttgacctcactgcgccagatgaagcttcagagaccaatgagtatgttaacagatgtcaaacacttcttatcatctggaggaaatgtcaatgagaaaaacgatgaaggagtaaccctgttacacatggcgtgtgcgagtggctacaaggaggtggtgtctcttatcctggaacatggtggagacctcaacatagtagatgatcagtactggactcccctccacttggcagccaaatatggccagacaaatctggtgaaacttctcctgatgcatcaggcaaacccacacctcgtgaactgtaatgaggagaaggcgtcagatattgctgcctctgagtttattgaggaaatgctgctgaaagccgaaattgcctgggaagaaaaaatgaaagagcctttatctgcttctaccttagctcaagaagagccctatgaagagatcattcacgatcttcccgtactgtcgagtaagctcagtcccctggtgttaccaattgccaagcaagacagtttgttggaaaaagacattatgttcaaagatgcaacaaaaggtctgtgtaagcagcagtctcaggacagcatccctgaaaaccccatgatgagcggttccaccaaacccgagcaggtcaagctaatgcctcctgccccaaacgatgacctggcaacgctcagcgagctcaatgatggcagcctgctctatgagattcagaagcgctttgggaacaatcagatctatacattcattggagacattcttttgcttgttaacccatacaaggagcttccaatttattcttccatggtgtcccagctgtatttcagctcctcagggaagctgtgttcctcgctgcctcctcacctcttctcctgtgtggagagagcctttcaccagctcttccgggaacagcggcctcagtgtttcatcctcagtggagaaaggggatcaggaaagtctgaagccagcaaacaaatcataagacacctcacctgcagggctggcgccagcagggccacactggattccagattcaaacatgtcgtgtgcatcttagaagcctttggacatgccaagaccacacttaatgatttgtccagttgcttcatcaagtattttgaactgcagttctgtgagaggaaacaacagctaaccggagccagaatttatacatatttgctagagaaatccagacttgtttcacaacctcttggccagagcaattttctcattttctacttgttgatggatgggttatctgctgaagaaaaatatggacttcatcttaataatttatgtgcacaccggtatttgaaccagaccatacaggatgatgcatccacaggggagcgttctctgaacagggagaaattggctgttttgaaacgagccctgaatgtagttggcttcagcagcttggaggtggagaatctgttcgtaattctagcagcaatattgcaccttggagacattcggtttactgccctgaatgaggggaactccgccttcgtttctgacctccagctcctggaacaagtggctggaatgttacaagtatcaacagatgaattggcatctgccttaacaactgatattcaatattttaaaggggatatgataatacgacgacataccatacagattgctgagtttttccgagacctcttggccaagtccctgtacagtcgtttgtttagctttttggtgaataccatgaattcttgcctccacagtcaagatgaacagaaaagcatgcagacattggatattggaatattggacatttttggttttgaagagtttcaaaagaatgaatttgaacaactttgtgtcaacatgaccaatgagaagatgcaccactatatcaatgaagtgctttttctccacgagcaagtggaatgtgtacaagagggagttaccatggaaacagcatattctcctggtaaccagaatggagttttggacttttttttccagaagccatctggatttctcaccttattggatgaagaaagtcaaatgatttggtcagtggaatcaaattttccaaaaaaactacaaagtctcctagaatcctcaaacacaaatgcggtgtactcccccatgaaggatgggaatgggaatgttgccctcaaagaccacggtacagccttcaccatcatgcactacgcaggaagggtaatgtatgatgttgttggggcgattgaaaaaaataaagactccctttcacagaatcttctatttgtaatgaaaactagtgaaaatgtcgtgatcaatcatttgttccagtcgaaattgtcacaaacaggatccctcgtatctgcctatccttcctttaaattccgaggacataagtctgccctgctcagtaagaaaatgacagcttcttcaattattggagaaaacaagaattatctagaacttagtaagttattaaaaaagaaaggaacttctacatttcttcaaagattggaacgaggagatccagtcaccatagcatcacaactcaggaaatcactaatggatattattggaaaacttcagaagtgcactccacacttcattcattgcatcaggcccaataactcaaagctgccagatacttttgataatttttacgtgtctgctcagctacaatatattggggtcctggagatggtgaagatcttccgatatggataccctgttcgcctttccttctcggatttcctgtcaaggtataagccactggctgatacattcctgcgtgagaagaaggaacagtcagctgccgagcgatgtcgacttgttctccagcagtgtaaattacaaggctggcagatgggagtccgaaaagtgtttctaaaatactggcatgctgaccaactcaatgatttgtgcctacagttgcagagaaaaattataacctgccaaaaagttatcagaggatttttagcacgccagcacctgcttcagagaataagcatcagacaacaagaggtgacttctatcaatagctttctgcagaacacagaggacatggggctgaaaacctacgatgccctggtcattcagaatgcttcagacattgcccgggaaaatgaccggctccgtagtgaaatgaacgctccctaccataaagagaagttagaggtcaggaacatgcaagaggaaggaagcaaaagaaccgatgacaagagtggacccaggcatttccaccccagctccatgtcagtctgcgcggccgtggatggcctgggccagtgcctcgttggcccgtccatctggtctccttcgctgcactcggtgttcagcatggatgacagcagcagcctcccgtctccacggaaacagcccccgcccaagccaaagagggaccccaacacccggctgagtgcttcctatgaggctgtgagcgcctgcctctccgcggccagggaagcggccaacgaagctctggcccggcccagaccgcacagcgacgactacagcaccatgaagaagattcctcctcgaaagcccaagcgcagccccaacaccaagctcagcggctcctacgaggagatatcggggtcccggcccggggacgcgaggcccgcgggcgccccgggggcagcagcgcgcgttctgacccccgggactccgcagtgcgcgctgcccccggcggcgcctccgggtgacgaggacgacagcgagcctgtgtacatcgagatgctggggcacgcggccaggcccgatagcccggaccccggggagtccgtgtacgaggagatgaagtgttgcctgcccgacgacggcggcccgggcgcgggctccttcctgctccacggcgcatcgccgcccctgctccaccgcgcgccggaggacgaggcggcggggcccccaggggacgcgtgcgacatcccgccgcccttccccaacctgctgccgcaccggccgcccctgctggtgttccccccgacccccgtcacctgctcccccgcctccgacgagtcgcccctgacacccctggaggtgaagaagctgccagtcctggagaccaacctcaagtaccccgtgcagccggaggggtcgagcccgctgtccccgcagtactccaagagccagaagggcgacggcgacaggcccgcgtcccccggcctggcgctgttcaacgggtccggccgagcctccccgccgtccacgccgcccccgcccccgcccccgcccgggccgccccccgcgccctacaggccctgcgcgcacttggccttcccgccggagcccgccccggtgaacgcggggaaagcggggccgagcgcagaggcgcccaaggttcacccaaagccaaactctgcccccgtggccgggccctgcagctccttccccaagatcccatattcccccgtgaaggccaccagggcggacgccaggaaggccggctccagtgcctcgccccccgcgccctacagccctcccagctccaggcctctcagcagccccctggacgagctcgccagcctcttcaactcggggaggagtgtgcttcggaaatccgcggcgggaagaaaaatcagggaagcagaaggttttgaaactaacatgaacataagtagccgagatgaccctagtacgtcagaaattacttccgagactcaagacagaaatgcaaataaccatggaattcagttatctaattcactatctagtgctataactgctgaaaatggaaattccatctcaaatggtttacctgaagaagatggatactcacggttgtctataagtggcacagggacttcgacatttcaaagacacagggacagtcacaccactcaggtaatccatcagctgaggctctcagagaatgaaagtgtggccctgcaggaactcttggactggaggagaaagctctgtgaggaaggacaagactggcagcagatcctgcaccacgctgagcccagggtgcctcccccaccaccttgcaagaagcccagccttctgaagaagccggaaggggcctcctgcaacaggctgccgtctgagctctgggacaccaccatttgatgtggcctgaactgcagacttacaaaatagaactgcctactgattccgggctgcaacaacagaaggctgccttctgacatgcgctggggcttctctccacgcatttagacaaaaaaagcacaggacacagacactaaatatatgagatcccgtgtgtgtgtgtgtgtgtttgtgtgtgtgtgtgtgggttctttcttatccatctcgtggtgatacactctgattttcaagctcctcatttacggctctgtgctacccctaggtagcaagagagaggctgggaaaagtgtggacgtggccagagcgagagagtagcggaggaaaggagcaatccatgcacactctgtacagttgtttttctacggttcaacagtctgtttattgtacttccaatggttttattataatacagtatacgggacatatattttatttctttgtagctacttgtgttttattggtattataaacctgataattatttacatgtttattactgtaattttataaatttatgcaattggtggtgcttcctttcttcaaaatacagattttaaaaaatcatttctagattatttttttcctccacagtccttttttttcacctaacgcacctaaatcttgaaactacattgttgttttagcttcgccagtgtcaccccttgcaaaactatgaattgagccccatgttttaggtgttactcatggatgaggaggctgttctttcctatgccctgtatttctggataagtggattgtgtaccctttagttaaatttcacctcccgacttcagcatagatcacaggaaatcacatggcacacggttaaacacgtatggcttcaaatccatagccggtggtgtaaaatgatcatattcattcaaaggcctacacagtacaaatgagcacgctgccatgtactggtttgagcagtaggggctgcatcgcacagcgctcgtcccccgggacttacactgcatgattccctcactgtatatcctcaaccctcccataatgcaaggccttgttcattgatgtgctttcgtcggctgtcggaaagttctgagcagtggctccagaccaccttgtcttgctacttggaactttttattcataccagcctttgaaaagttactgtgccaataaagaggtacaactgtgttcttctatt

SEQ ID NO: 156569 - DNA, 3492 bp, Homo sapiens
  Payload ID: 10695
  Gene Symbol:
  Gene Name: MYO16
  ENST ID: ENST00000634825
  CDS Start-End: 42-2864
caggttgctttcagctatgtaacgtttttcgatcccatgagatggaaatcgaccagtgcttgctagagtcccttccccttggccaacggcagcgtctagtgaagcgcatgcgctgtgagcaaatcaaagcctactatgagcgcgagaaggcttttcagaagcaggaagggttcctgaaaaggctgaagcatgcgaagaatccgaaagttcacttcaacctcacggacatgctacaggacgcgattatccaccacaatgacaaagaagtgcttcggctcctgaaggagggggcagacccccacaccctcgtctcctcgggagggtccctgctccatctgtgtgctcggtatgataatgccttcattgcagaaattctgattgacagaggagtcaacgtcaaccaccaggatgaagacttctggacgcccatgcacattgcctgtgcctgcgataaccctgatattgtcctgcttcttgtattagctggagccaatgtccttctccaggatgtgaatggaaatatcccattagattatgctgtagaagggacagaatccagctctatcctgttgacctatctggatgaaaatggagtggatttgacctcactgcgccagatgaagcttcagagaccaatgagtatgttaacagatgtcaaacacttcttatcatctggaggaaatgtcaatgagaaaaacgatgaaggagtaaccctgttacacatggcgtgtgcgagtggctacaaggaggtggtgtctcttatcctggaacatggtggagacctcaacatagtagatgatcagtactggactcccctccacttggcagccaaatatggccagacaaatctggtgaaacttctcctgatgcatcaggcaaacccacacctcgtgaactgtaatgaggagaaggcgtcagatattgctgcctctgagtttattgaggaaatgctgctgaaagccgaaattgcctgggaagaaaaaatgaaagagcctttatctgcttctaccttagctcaagaagagccctatgaagagatcattcacgatcttcccgtactgtcgagtaagctcagtcccctggtgttaccaattgccaagcaagacagtttgttggaaaaagacattatgttcaaagatgcaacaaaaggtctgtgtaagcagcagtctcaggacagcatccctgaaaaccccatgatgagcggttccaccaaacccgagcaggtcaagctaatgcctcctgccccaaacgatgacctggcaacgctcagcgagctcaatgatggcagcctgctctatgagattcagaagcgctttgggaacaatcagatctatacattcattggagacattcttttgcttgttaacccatacaaggagcttccaatttattcttccatggtgtcccagctgtatttcagctcctcagggaagctgtgttcctcgctgcctcctcacctcttctcctgtgtggagagagcctttcaccagctcttccgggaacagcggcctcagtgtttcatcctcagtggagaaaggggatcaggaaagtctgaagccagcaaacaaatcataagacacctcacctgcagggctggcgccagcagggccacactggattccagattcaaacatgtcgtgtgcatcttagaagcctttggacatgccaagaccacacttaatgatttgtccagttgcttcatcaagtattttgaactgcagttctgtgagaggaaacaacagctaaccggagccagaatttatacatatttgctagagaaatccagacttgtttcacaacctcttggccagagcaattttctcattttctacttgttgatggatgggttatctgctgaagaaaaatatggacttcatcttaataatttatgtgcacaccggtatttgaaccagaccatacaggatgatgcatccacaggggagcgttctctgaacagggagaaattggctgttttgaaacgagccctgaatgtagttggcttcagcagcttggaggtggagaatctgttcgtaattctagcagcaatattgcaccttggagacattcggtttactgccctgaatgaggggaactccgccttcgtttctgacctccagctcctggaacaagtggctggaatgttacaagtatcaacagatgaattggcatctgccttaacaactgatattcaatattttaaaggggatatgataatacgacgacataccatacagattgctgagtttttccgagacctcttggccaagtccctgtacagtcgtttgtttagctttttggtgaataccatgaattcttgcctccacagtcaagatgaacagaaaagcatgcagacattggatattggaatattggacatttttggttttgaagagtttcaaaagaatgaatttgaacaactttgtgtcaacatgaccaatgagaagatgcaccactatatcaatgaagtgctttttctccacgagcaagtggaatgtgtacaagagggagttaccatggaaacagcatattctcctggtaaccagaatggagttttggacttttttttccagaagccatctggatttctcaccttattggatgaagaaagtcaaatgatttggtcagtggaatcaaattttccaaaaaaactacaaagtctcctagaatcctcaaacacaaatgcggtgtactcccccatgaaggatgggaatgggaatgttgccctcaaagaccacggtacagccttcaccatcatgcactacgcaggaagggtaatgtatgatgttgttggggcgattgaaaaaaataaagactccctttcacagaatcttctatttgtaatgaaaagaggaaggtgcttctgagcaaaaggacagaatttacaatgtacccttttgtatttatacaggaggtgtcagatttttttttttgtaaagggctagagaataaatattttagaccttgtgcaccataagatccttgttgcagttactcacctctgctgttataatgtgaaaaacagctgtagacaatacaaatggatgtgactgtattctgataaaattttatttacaaaaacaggcagtgggccatgtttggctcaggagccatgattgctcactcactctatcataaaagcaaaatatttgtggttgccatcatgttttatgaatctgtgaaatactttgatgcttgtacatatttattaaaagcaagtgtaattcataaataataatttttatttgcaggtactttgcttatagtatctaattcaattttcgtagcatcaaaaagctcccagttgaggaagatggtgaggtctgttgtagaatgtacacaagcagagctgagtctctgagaccactaaccaggtacagtcagggagcttggagacagctcatagagacacacagcaaatacactcattagtgcctaagattagaagtaaagtctacttcactcaaaaggaggcagaaaaaaaaaaaaaaaaaa

SEQ ID NO: 156570 - DNA, 6874 bp, Homo sapiens
  Payload ID: 10695
  Gene Symbol:
  Gene Name: MYO16
  ENST ID: ENST00000634397
  CDS Start-End: 127-5703
ctgcgctcggagactttcagtgaaagcagaggagagatttccaaaggttgtattttccttctggttggagcctctcatccacattgtggttgctttcagctatgtaacgtttttcgatcccatgagatggaaatcgaccagtgcttgctagagtcccttccccttggccaacggcagcgtctagtgaagcgcatgcgctgtgagcaaatcaaagcctactatgagcgcgagaaggcttttcagaagcaggaagggttcctgaaaaggctgaagcatgcgaagaatccgaaagttcacttcaacctcacggacatgctacaggacgcgattatccaccacaatgacaaagaagtgcttcggctcctgaaggagggggcagacccccacaccctcgtctcctcgggagggtccctgctccatctgtgtgctcggtatgataatgccttcattgcagaaattctgattgacagaggagtcaacgtcaaccaccaggatgaagacttctggacgcccatgcacattgcctgtgcctgcgataaccctgatattgtcctgcttcttgtattagctggagccaatgtccttctccaggatgtgaatggaaatatcccattagattatgctgtagaagggacagaatccagctctatcctgttgacctatctggatgaaaatggagtggatttgacctcactgcgccagatgaagcttcagagaccaatgagtatgttaacagatgtcaaacacttcttatcatctggaggaaatgtcaatgagaaaaacgatgaaggagtaaccctgttacacatggcgtgtgcgagtggctacaaggaggtggtgtctcttatcctggaacatggtggagacctcaacatagtagatgatcagtactggactcccctccacttggcagccaaatatggccagacaaatctggtgaaacttctcctgatgcatcaggcaaacccacacctcgtgaactgtaatgaggagaaggcgtcagatattgctgcctctgagtttattgaggaaatgctgctgaaagccgaaattgcctgggaagaaaaaatgaaagagcctttatctgcttctaccttagctcaagaagagccctatgaagagatcattcacgatcttcccgtactgtcgagtaagctcagtcccctggtgttaccaattgccaagcaagacagtttgttggaaaaagacattatgttcaaagatgcaacaaaaggtctgtgtaagcagcagtctcaggacagcatccctgaaaaccccatgatgagcggttccaccaaacccgagcaggtcaagctaatgcctcctgccccaaacgatgacctggcaacgctcagcgagctcaatgatggcagcctgctctatgagattcagaagcgctttgggaacaatcagatctatacattcattggagacattcttttgcttgttaacccatacaaggagcttccaatttattcttccatggtgtcccagctgtatttcagctcctcagggaagctgtgttcctcgctgcctcctcacctcttctcctgtgtggagagagcctttcaccagctcttccgggaacagcggcctcagtgtttcatcctcagtggagaaaggggatcaggaaagtctgaagccagcaaacaaatcataagacacctcacctgcagggctggcgccagcagggccacactggattccagattcaaacatgtcgtgtgcatcttagaagcctttggacatgccaagaccacacttaatgatttgtccagttgcttcatcaagtattttgaactgcagttctgtgagaggaaacaacagctaaccggagccagaatttatacatatttgctagagaaatccagacttgtttcacaacctcttggccagagcaattttctcattttctacttgttgatggatgggttatctgctgaagaaaaatatggacttcatcttaataatttatgtgcacaccggtatttgaaccagaccatacaggatgatgcatccacaggggagcgttctctgaacagggagaaattggctgttttgaaacgagccctgaatgtagttggcttcagcagcttggaggtggagaatctgttcgtaattctagcagcaatattgcaccttggagacattcggtttactgccctgaatgaggggaactccgccttcgtttctgacctccagctcctggaacaagtggctggaatgttacaagtatcaacagatgaattggcatctgccttaacaactgatattcaatattttaaaggggatatgataatacgacgacataccatacagattgctgagtttttccgagacctcttggccaagtccctgtacagtcgtttgtttagctttttggtgaataccatgaattcttgcctccacagtcaagatgaacagaaaagcatgcagacattggatattggaatattggacatttttggttttgaagagtttcaaaagaatgaatttgaacaactttgtgtcaacatgaccaatgagaagatgcaccactatatcaatgaagtgctttttctccacgagcaagtggaatgtgtacaagagggagttaccatggaaacagcatattctcctggtaaccagaatggagttttggacttttttttccagaagccatctggatttctcaccttattggatgaagaaagtcaaatgatttggtcagtggaatcaaattttccaaaaaaactacaaagtctcctagaatcctcaaacacaaatgcggtgtactcccccatgaaggatgggaatgggaatgttgccctcaaagaccacggtacagccttcaccatcatgcactacgcaggaagggtaatgtatgatgttgttggggcgattgaaaaaaataaagactccctttcacagaatcttctatttgtaatgaaaactagtgaaaatgtcgtgatcaatcatttgttccagtcgaaattgtcacaaacaggatccctcgtatctgcctatccttcctttaaattccgaggacataagtctgccctgctcagtaagaaaatgacagcttcttcaattattggagaaaacaagaattatctagaacttagtaagttattaaaaaagaaaggaacttctacatttcttcaaagattggaacgaggagatccagtcaccatagcatcacaactcaggaaatcactaatggatattattggaaaacttcagaagtgcactccacacttcattcattgcatcaggcccaataactcaaagctgccagatacttttgataatttttacgtgtctgctcagctacaatatattggggtcctggagatggtgaagatcttccgatatggataccctgttcgcctttccttctcggatttcctgtcaaggtataagccactggctgatacattcctgcgtgagaagaaggaacagtcagctgccgagcgatgtcgacttgttctccagcagtgtaaattacaaggctggcagatgggagtccgaaaagtgtttctaaaatactggcatgctgaccaactcaatgatttgtgcctacagttgcagagaaaaattataacctgccaaaaagttatcagaggatttttagcacgccagcacctgcttcagagaataagcatcagacaacaagaggtgacttctatcaatagctttctgcagaacacagaggacatggggctgaaaacctacgatgccctggtcattcagaatgcttcagacattgcccgggaaaatgaccggctccgtagtgaaatgaacgctccctaccataaagagaagttagaggtcaggaacatgcaagaggaaggaagcaaaagaaccgatgacaagagtggacccaggcatttccaccccagctccatgtcagtctgcgcggccgtggatggcctgggccagtgcctcgttggcccgtccatctggtctccttcgctgcactcggtgttcagcatggatgacagcagcagcctcccgtctccacggaaacagcccccgcccaagccaaagagggaccccaacacccggctgagtgcttcctatgaggctgtgagcgcctgcctctccgcggccagggaagcggccaacgaagctctggcccggcccagaccgcacagcgacgactacagcaccatgaagaagattcctcctcgaaagcccaagcgcagccccaacaccaagctcagcggctcctacgaggagatatcggggtcccggcccggggacgcgaggcccgcgggcgccccgggggcagcagcgcgcgttctgacccccgggactccgcagtgcgcgctgcccccggcggcgcctccgggtgacgaggacgacagcgagcctgtgtacatcgagatgctggggcacgcggccaggcccgatagcccggaccccggggagtccgtgtacgaggagatgaagtgttgcctgcccgacgacggcggcccgggcgcgggctccttcctgctccacggcgcatcgccgcccctgctccaccgcgcgccggaggacgaggcggcggggcccccaggggacgcgtgcgacatcccgccgcccttccccaacctgctgccgcaccggccgcccctgctggtgttccccccgacccccgtcacctgctcccccgcctccgacgagtcgcccctgacacccctggaggtgaagaagctgccagtcctggagaccaacctcaagtaccccgtgcagccggaggggtcgagcccgctgtccccgcagtactccaagagccagaagggcgacggcgacaggcccgcgtcccccggcctggcgctgttcaacgggtccggccgagcctccccgccgtccacgccgcccccgcccccgcccccgcccgggccgccccccgcgccctacaggccctgcgcgcacttggccttcccgccggagcccgccccggtgaacgcggggaaagcggggccgagcgcagaggcgcccaaggttcacccaaagccaaactctgcccccgtggccgggccctgcagctccttccccaagatcccatattcccccgtgaaggccaccagggcggacgccaggaaggccggctccagtgcctcgccccccgcgccctacagccctcccagctccaggcctctcagcagccccctggacgagctcgccagcctcttcaactcggggaggagtgtgcttcggaaatccgcggcgggaagaaaaatcagggaagcagaaggttttgaaactaacatgaacataagtagccgagatgaccctagtacgtcagaaattacttccgagactcaagacagaaatgcaaataaccatggaattcagttatctaattcactatctagtgctataactgctgaaaatggaaattccatctcaaatggtttacctgaagaagatggatactcacggttgtctataagtggcacagggacttcgacatttcaaagacacagggacagtcacaccactcaggtaatccatcagctgaggctctcagagaatgaaagtgtggccctgcaggaactcttggactggaggagaaagctctgtgaggaaggacaagactggcagcagatcctgcaccacgctgagcccagggtgcctcccccaccaccttgcaagaagcccagccttctgaagaagccggaaggggcctcctgcaacaggctgccgtctgagctctgggacaccaccatttgatgtggcctgaactgcagacttacaaaatagaactgcctactgattccgggctgcaacaacagaaggctgccttctgacatgcgctggggcttctctccacgcatttagacaaaaaaagcacaggacacagacactaaatatatgagatcccgtgtgtgtgtgtgtgtgtttgtgtgtgtgtgtgtgggttctttcttatccatctcgtggtgatacactctgattttcaagctcctcatttacggctctgtgctacccctaggtagcaagagagaggctgggaaaagtgtggacgtggccagagcgagagagtagcggaggaaaggagcaatccatgcacactctgtacagttgtttttctacggttcaacagtctgtttattgtacttccaatggttttattataatacagtatacgggacatatattttatttctttgtagctacttgtgttttattggtattataaacctgataattatttacatgtttattactgtaattttataaatttatgcaattggtggtgcttcctttcttcaaaatacagattttaaaaaatcatttctagattatttttttcctccacagtccttttttttcacctaacgcacctaaatcttgaaactacattgttgttttagcttcgccagtgtcaccccttgcaaaactatgaattgagccccatgttttaggtgttactcatggatgaggaggctgttctttcctatgccctgtatttctggataagtggattgtgtaccctttagttaaatttcacctcccgacttcagcatagatcacaggaaatcacatggcacacggttaaacacgtatggcttcaaatccatagccggtggtgtaaaatgatcatattcattcaaaggcctacacagtacaaatgagcacgctgccatgtactggtttgagcagtaggggctgcatcgcacagcgctcgtcccccgggacttacactgcatgattccctcactgtatatcctcaaccctcccataatgcaaggccttgttcattgatgtgctttcgtcggctgtcggaaagttctgagcagtggctccagaccaccttgtcttgctacttggaactttttattcataccagcctttgaaaagttactgtgccaataaagaggtacaactgtgttcttctatt

SEQ ID NO: 156571 - DNA, 2361 bp, Homo sapiens
  Payload ID: 10696
  Gene Symbol: MYZAP
  Gene Name: myocardial zonula adherens protein
  Uniprot ID: P0CAP1
  ENST ID: ENST00000267853
  CDS Start-End: 95-1495
gtcccgcgtcgcccccgcgcagggcgggccccgcacgcttattctgcccgggaggaacgccggcgtccagcccgctaccgaccgccgctgcgggatgctgcgctccacgtccacggtcaccctgctctcgggcggcgccgccaggacgcccggggcgcccagcaggagggcaaatgtttgcagactacggctgaccgtacctcctgagagtccagttcctgagcaatgtgaaaagaagattgagagaaaagagcagcttcttgacctgagcaatggagaacctaccaggaaacttcctcagggtgttgtttatggtgtggtgcgaagatcagatcaaaatcagcagaaagaaatggtggtgtatgggtggtccaccagtcagctgaaagaagagatgaactacatcaaagatgtgagagccactttggaaaaggtgagaaagcgaatgtatggagactatgatgagatgagacagaagattcgacagctcacccaggaactatcagtttcccatgctcagcaggagtatctggagaatcacatccaaacccagtcgtctgccctggatcgttttaatgccatgaactcagccttggcatcagattccattggcctgcagaaaaccctcgtggatgtgactttggaaaacagcaacattaaggatcaaatcagaaatctgcagcagacgtatgaagcatccatggacaagctgagggaaaagcagaggcagttggaggtagcgcaagttgaaaaccagctgctaaaaatgaaggtggaatcgtcccaagaagccaatgctgaggtgatgcgagagatgaccaagaagctgtacagccagtatgaggagaagctgcaggaagaacagaggaagcacagtgctgagaaggaggctcttttggaagaaaccaatagttttctgaaagcgattgaagaagccaataaaaagatgcaagcagcagagatcagcctagaggagaaagaccagaggatcggggagctggacaggctgattgagcgcatggaaaaggaacgtcatcaactgcaacttcaactcctagaacatgaaacagaaatgtctggggagttaactgattctgacaaggaaaggtatcagcagttggaggaggcatcagccagcctccgtgagcggatcagacacctagatgacatggtgcattgccagcagaagaaagtcaagcagatggtcgaggagattgaatcattaaagaaaaagttgcaacagaaacagctcttaatactgcagcttttagaaaagatatctttcttagaaggagagaataatgaactacaaagcaggttggactatttaacagaaacccaggccaagaccgaagtggaaaccagagagataggagtgggctgtgatcttctacccagccaaacaggcaggactcgtgaaattgtgatgccttctaggaactacaccccatacacaagagtcctggagttaaccatgaagaaaactctgacttaggcactcagaggcatacactttttacagatggacaaaagctctggaaccctgtggcttcaaatcctttgggaagggtgactgttgtttcccctacacacagtgtaagccggaatgggaatcgctgaggctctgatccacttctaagacaggaaggaaagtgaaggcagagtgagcaggtaagagagggatatacaaggtcacatttcagacacccactcggcataccctgccgtactgcatcatcatttgttttctttgtagacactgaaatcctatcaggaggattccttcacaatgtattttatttgctagactttggttgggagggaaaaggacattaatttgaagtttcatgttattcatgccaggattgtttgatagagcatgaaggttttgtttacccataaaagtattagaggcagcgtttctctgatacagagaggcctgtccacaagaagcatgggcacccagccaaacttgaacctggaagggagggttcccggcctgcaggtgctctttcctcttggtcccaagcatctgtgcagggtcgtgggagccacactgagagacttgtgtgggccagacaagcttcattctgatgcgctagtcccttggtttaatttgtgccttatgctttcattggaccagctgaaatcactgtatttattcaactagtgatttttttttctttctcactttaacttaaagagaattttatatgtcttggaaatttaataatttagtgttctcagtatcaattggtgtttttgttaaacgaatgaatcatctgttcatgcatgctctactttgatattataacctatgtcacatgtgtttaataaataccatatattttgttctactaa

SEQ ID NO: 156572 - DNA, 2181 bp, Homo sapiens
  Payload ID: 10696
  Gene Symbol: MYZAP
  Gene Name: myocardial zonula adherens protein
  Uniprot ID: P0CAP1
  ENST ID: ENST00000380565
  CDS Start-End: 3-1319
ggatgctgcgctccacgtccacggtcaccctgctctcgggcggcgccgccaggacgcccggggcgcccagcaggagggcaaatgtttgcagactacggctgaccgtacctcctgagagtccagttcctgagcaatgtgaaaagaagattgagagaaaagagcagcttcttgacctgagcaatggagaacctaccaggaaacttcctcagggtgttgtttatggtgtggtgcgaagatcagatcaaaatcagcagaaagaaatggtggtgtatgggtggtccaccagtcagctgaaagaagagatgaactacatcaaagatgtgagagccactttggaaaaggtgagaaagcgaatgtatggagactatgatgagatgagacagaagattcgacagctcacccaggaactatcagtttcccatgctcagcaggagtatctggagaatcacatccaaacccagtcgtctgccctggatcgttttaatgccatgaactcagccttggcatcagattccattggcctgcagaaaaccctcgtggatgtgactttggaaaacagcaacattaaggatcaaatcagaaatctgcagcagacgtatgaagcatccatggacaagctgagggaaaagcagaggcagttggaggtagcgcaagttgaaaaccagctgctaaaaatgaaggtggaatcgtcccaagaagccaatgctgaggtgatgcgagagatgaccaagaagctgtacagccagtatgaggagaagctgcaggaagaacagaggaagcacagtgctgagaaggaggctcttttggaagaaaccaatagttttctgaaagcgattgaagaagccaataaaaagatgcaagcagcagagatcagcctagaggagaaagaccagaggatcggggagctggacaggctgattgagcgcatggaaaaggaacgtcatcaactgcaacttcaactcctagaacatgaaacagaaatgtctggggagttaactgattctgacaaggaaaggtatcagcagttggaggaggcatcagccagcctccgtgagcggatcagacacctagatgacatggtgcattgccagcagaagaaagtcaagcagatggtcgaggagaataatgaactacaaagcaggttggactatttaacagaaacccaggccaagaccgaagtggaaaccagagagataggagtgggctgtgatcttctacccagccaaacaggcaggactcgtgaaattgtgatgccttctaggaactacaccccatacacaagagtcctggagttaaccatgaagaaaactctgacttaggcactcagaggcatacactttttacagatggacaaaagctctggaaccctgtggcttcaaatcctttgggaagggtgactgttgtttcccctacacacagtgtaagccggaatgggaatcgctgaggctctgatccacttctaagacaggaaggaaagtgaaggcagagtgagcaggtaagagagggatatacaaggtcacatttcagacacccactcggcataccctgccgtactgcatcatcatttgttttctttgtagacactgaaatcctatcaggaggattccttcacaatgtattttatttgctagactttggttgggagggaaaaggacattaatttgaagtttcatgttattcatgccaggattgtttgatagagcatgaaggttttgtttacccataaaagtattagaggcagcgtttctctgatacagagaggcctgtccacaagaagcatgggcacccagccaaacttgaacctggaagggagggttcccggcctgcaggtgctctttcctcttggtcccaagcatctgtgcagggtcgtgggagccacactgagagacttgtgtgggccagacaagcttcattctgatgcgctagtcccttggtttaatttgtgccttatgctttcattggaccagctgaaatcactgtatttattcaactagtgatttttttttctttctcactttaacttaaagagaattttatatgtcttggaaatttaataatttagtgttctcagtatcaattggtgtttttgttaaacgaatgaatcatctgttcatgcatgctctactttgatattataacctatgtcacatgtgtttaataaataccatatattttgttcta

SEQ ID NO: 156573 - DNA, 738 bp, Homo sapiens
  Payload ID: 10696
  Gene Symbol: MYZAP
  Gene Name: myocardial zonula adherens protein
  ENST ID: ENST00000461709
  CDS Start-End: 1-369
caagcagcagagatcagcctagaggagaaagaccagaggatcggggagctggacaggctgattgagcgcatggaaaaggaacgtcatcaactgcaacttcaactcctagaacatgaaacagaaatgtctggggagttaactgattctgacaaggaaaggtatcagcagttggaggaggcatcagccagcctccgtgagcggatcagacacctagatgacatggtgcattgccagcagaagaaagtcaagcagatggtcgaggagattgaatcattaaagaaaaagttgcaacagaaacagctcttaatactgcagcttttagaaaagatatctttcttagaaggagagccaaacaggcaggactcgtgaaattgtgatgccttctaggaactacaccccatacacaagagtcctggagttaaccatgaagaaaactctgacttaggcactcagaggcatacactttttacagatggacaaaagctctggaaccctgtggcttcaaatcctttgggaagggtgactgttgtttcccctacacacagtgtaagccggaatgggaatcgctgaggctctgatccacttctaagacaggaaggaaagtgaaggcagagtgagcaggtaagagagggatatacaaggtcacatttcagacacccactcggcataccctgccgtactgcatcatcatttgttttctttgtagacactgaaatcctatcaggaggattccttcac

SEQ ID NO: 156574 - DNA, 567 bp, Homo sapiens
  Payload ID: 10696
  Gene Symbol: MYZAP
  Gene Name: myocardial zonula adherens protein
  ENST ID: ENST00000569089
  CDS Start-End: 171-567
aataggtgctcagtaactgagtaataaagtatgctgagtccagcttcctgctttgatctcctggaaggaacccttgcccccagggacagctggttcggtagcagtggtgttcagggcactgccaagcctggggcatctctggagattgtgtatccgagtttcaggagaccatggagatcagcctcgtaaaatgctcggaggcaaatgtttgcagactacggctgaccgtacctcctgagagtccagttcctgagcaatgtgaaaagaagattgagagaaaagagcagcttcttgacctgagcaatggagaacctaccaggaaacttcctcagggtgttgtttatggtgtggtgcgaagatcagatcaaaatcagcagaaagaaatggtggtgtatgggtggtccaccagtcagctgaaagaagagatgaactacatcaaagatgtgagagccactttggaaaaggtgagaaagcgaatgtatggagactatgatgagatgagacagaagattcgacagctcacccaggaactatcagtttcccatgctcagcaggagtatctggaga

SEQ ID NO: 156575 - DNA, 2817 bp, Homo sapiens
  Payload ID: 10697
  Gene Symbol: MYOCD
  Gene Name: myocardin
  Uniprot ID: Q8IZQ8
  ENST ID: ENST00000343344
  CDS Start-End: 1-2817
atgacactcctggggtctgagcattccttgctgattaggagcaagttcagatcagttttacagttaagacttcaacaaagaaggacccaggaacaactggctaaccaaggcataataccaccactgaaacgtccagctgaattccatgagcaaagaaaacatttggatagtgacaaggctaaaaattccctgaagcgcaaagccagaaacaggtgcaacagtgccgacttggttaatatgcacatactccaagcttccactgcagagaggtccattccaactgctcagatgaagctgaaaagagcccgactcgccgatgatctcaatgaaaaaattgctctacgaccagggccactggagctggtggaaaaaaacattcttcctgtggattctgctgtgaaagaggccataaaaggtaaccaggtgagtttctccaaatccacggatgcttttgcctttgaagaggacagcagcagcgatgggctttctccggatcagactcgaagtgaagacccccaaaactcagcgggatccccgccagacgctaaagcctcagataccccttcgacaggttctctggggacaaaccaggatcttgcttctggctcagaaaatgacagaaatgactcagcctcacagcccagccaccagtcagatgcggggaagcaggggcttggcccccccagcacccccatagccgtgcatgctgctgtaaagtccaaatccttgggtgacagtaagaaccgccacaaaaagcccaaggaccccaagccaaaggtgaagaagcttaaatatcaccagtacattcccccagaccagaaggcagagaagtcccctccacctatggactcagcctacgctcggctgctccagcaacagcagctgttcctgcagctccaaatcctcagccagcagcagcagcagcagcaacaccgattcagctacctagggatgcaccaagctcagcttaaggaaccaaatgaacagatggtcagaaatccaaactcttcttcaacgccactgagcaatacccccttgtctcctgtcaaaaacagtttttctggacaaactggtgtctcttctttcaaaccaggcccactcccacctaacctggatgatctgaaggtctctgaattaagacaacagcttcgaattcggggcttgcctgtgtcaggcaccaaaacggctctcatggaccggcttcgacccttccaggactgctctggcaacccagtgccgaactttggggatataacgactgtcacttttcctgtcacacccaacacgctgcccaattaccagtcttcctcttctaccagtgccctgtccaacggcttctaccactttggcagcaccagctccagccccccgatctccccagcctcctctgacctgtcagtcgctgggtccctgccggacaccttcaatgatgcctccccctccttcggcctgcacccgtccccagtccacgtgtgcacggaggaaagtctcatgagcagcctgaatgggggctctgttccttctgagctggatgggctggactccgagaaggacaagatgctggtggagaagcagaaggtgatcaatgaactcacctggaaactccagcaagagcagaggcaggtggaggagctgaggatgcagcttcagaagcagaaaaggaataactgttcagagaagaagccgctgcctttcctggctgcctccatcaagcaggaagaggctgtctccagctgtccttttgcatcccaagtacctgtgaaaagacaaagcagcagctcagagtgtcacccaccggcttgtgaagctgctcaactccagcctcttggaaatgctcattgtgtggagtcctcagatcaaaccaatgtactttcttccacatttctcagcccccagtgttcccctcagcattcaccgctgggggctgtgaaaagcccacagcacatcagtttgcccccatcacccaacaaccctcactttctgccctcatcctccggggcccagggagaagggcacagggtctcctcgcccatcagcagccaggtgtgcactgcacagatggctggtttacactcttctgataaggtggggccaaagttttcaattccatccccaactttttctaagtcaagttcagcaatttcagaggtaacacagcctccatcctatgaagatgccgtaaagcagcaaatgacccggagtcagcagatggatgaactcctggacgtgcttattgaaagcggagaaatgccagcagacgctagagaggatcactcatgtcttcaaaaagtcccaaagatacccagatcttcccgaagtccaactgctgtcctcaccaagccctcggcttcctttgaacaagcctcttcaggcagccagatcccctttgatccctatgccaccgacagtgatgagcatcttgaagtcttattaaattcccagagccccctaggaaagatgagtgatgtcacccttctaaaaattgggagcgaagagcctcactttgatgggataatggatggattctctgggaaggctgcagaagacctcttcaatgcacatgagatcttgccaggccccctctctccaatgcagacacagttttcaccctcttctgtggacagcaatgggctgcagttaagcttcactgaatctccctgggaaaccatggagtggctggacctcactccgccaaattccacaccaggctttagcgccctcaccaccagcagccccagcatcttcaacatcgatttcctggatgtcactgatctcaatttgaattcttccatggaccttcacttgcagcagtggtag

SEQ ID NO: 156576 - DNA, 3632 bp, Homo sapiens
  Payload ID: 10697
  Gene Symbol: MYOCD
  Gene Name: myocardin
  ENST ID: ENST00000443061
  CDS Start-End: 1-1947
ttcctgcagctccaaatcctcagccagcagcagcagcagcagcaacaccgattcagctacctagggatgcaccaagctcagcttaaggaaccaaatgaacagatggtcagaaatccaaactcttcttcaacgccactgagcaatacccccttgtctcctgtcaaaaacagtttttctggacaaactggtgtctcttctttcaaaccaggcccactcccacctaacctggatgatctgaaggtctctgaattaagacaacagcttcgaattcggggcttgcctgtgtcaggcaccaaaacggctctcatggaccggcttcgacccttccaggactgctctggcaacccagtgccgaactttggggatataacgactgtcacttttcctgtcacacccaacacgctgcccaattaccagtcttcctcttctaccagtgccctgtccaacggcttctaccactttggcagcaccagctccagccccccgatctccccagcctcctctgacctgtcagtcgctgggtccctgccggacaccttcaatgatgcctccccctccttcggcctgcacccgtccccagtccacgtgtgcacggaggaaagtctcatgagcagcctgaatgggggctctgttccttctgagctggatgggctggactccgagaaggacaagatgctggtggagaagcagaaggtgatcaatgaactcacctggaaactccagcaagagcagaggcaggtggaggagctgaggatgcagcttcagaagcagaaaaggaataactgttcagagaagaagccgctgcctttcctggctgcctccatcaagcaggaagaggctgtctccagctgtccttttgcatcccaagtacctgtgaaaagacaaagcagcagctcagagtgtcacccaccggcttgtgaagctgctcaactccagcctcttggaaatgctcattgtgtggagtcctcagatcaaaccaatgtactttcttccacatttctcagcccccagtgttcccctcagcattcaccgctgggggctgtgaaaagcccacagcacatcagtttgcccccatcacccaacaaccctcactttctgccctcatcctccggggcccagggagaagggcacagggtctcctcgcccatcagcagccaggtgtgcactgcacagaactcaggagcacacgatggccatcctccaagcttctctccccattcttccagcctccacccgcccttctctggagcccaagcagacagcagtcatggtgccgggggaaacccttgtcccaaaagcccatgtgtacagcaaaagcaaatgacccggagtcagcagatggatgaactcctggacgtgcttattgaaagcggagaaatgccagcagacgctagagaggatcactcatgtcttcaaaaagtcccaaagatacccagatcttcccgaagtccaactgctgtcctcaccaagccctcggcttcctttgaacaagcctcttcaggcagccagatcccctttgatccctatgccaccgacagtgatgagcatcttgaagtcttattaaattcccagagccccctaggaaagatgagtgatgtcacccttctaaaaattgggagcgaagagcctcactttgatgggataatggatggattctctgggaaggctgcagaagacctcttcaatgcacatgagatcttgccaggccccctctctccaatgcagacacagttttcaccctcttctgtggacagcaatgggctgcagttaagcttcactgaatctccctgggaaaccatggagtggctggacctcactccgccaaattccacaccaggctttagcgccctcaccaccagcagccccagcatcttcaacatcgatttcctggatgtcactgatctcaatttgaattcttccatggaccttcacttgcagcagtggtagaatgcccaatgcaccagtgctatggaagaccaatggagttccatgggggaaagcacacagccatacatactttactgtccaaaaacagaagaagaagaagagaattaaaaagaagcaatgatttctgtgccaatgaacaagaacaaaagtcatttttagaaatacatatactgtaatatttaccaacagtcagtaactgttaatgatttcaacaatgcattaaaagaatgtgctttctcagattaaggatgccaaaaaagatatttcactgccttttcaaagaccagtatattttctagcccataatttttctcaggcattgttggggcataagctcacactgtaagcttttctcatgaattcactagacataacgtggaaggaaaacgtagtcttttgggagtacagggaagccagcccctcaaagcttatggaagacatacctgcaatggaagctgttgcccaatgtctccattactatctttcaaaagagaagccagacccagcttcagatcaaaagttcttgagacagaggaacaaaaccaatcgatttccagggaagctaatcaactctcttttccctctaccacaaaactgccctgctggagtggttctgaacctgtacccaggactcgatgtggtcactaataacaattaacctgaactgagtccacagaactccactcggaactttcttcttttttaactagtggcccaatcattcccaccatctctgtgctgataagtacgtgtcctagatgagaaccctgaagaatgcagaccttcttcccccgaaggagatgccacaagctctccaacacagccccctttagttccaaagactagagatgaccacattggtagaagtatatctcgaggcacaggaagggagccccaccagggataattcagacaggactagagaataacatcatttcacataccctgggataaacaccctgggttcctatagaaggactattacttatgggagtccaacttctccttttgttttgttattatcagtttatctttctcccactccacttttccttcaaggtaccaatcctttcctgttcctcgtttggccatctttctttttctgcctccacattgggaggggaggacttctcagttctaacaagctgccatactcctaagaaagccatttttgaaaaatttaacaatccaggttcttctggagaactcattctccacacgcacagtttgctgcaaaaggaagttgcaagaatttcttgaggaagaaactggtgacttggtccatcagtcacgaagttctttctattctcgtttagttttcaagaaattattggtttgtgttgctctggggaaattggaaatcattacattgtaaagacaaatatggatgatatttacaagagagaatttcagatctgggtttttgaaagaaaacagaattgcgcattgaaaacgatggaaggaaaaagacaatggtctaatgtgcattcctcattacctctcgtggctttggctgggagttggaaaaagctaaaatttcagaacagtctctgtaaggctctctgtggctccagttcaccattttatattgttgcatgctgtagaaaggagctattgctgttgttttgtttttttatttaaatcactaaggcactgtttttatcttttgtaaaaaaaaaaaaaaa

SEQ ID NO: 156577 - DNA, 8466 bp, Homo sapiens
  Payload ID: 10697
  Gene Symbol: MYOCD
  Gene Name: myocardin
  Uniprot ID: Q8IZQ8
  ENST ID: ENST00000425538
  CDS Start-End: 201-3161
aattagccccgcacggcgaggggggaggcgccagttttctggggacactggctgccactgtactcctacccaggggagctcacggagagttggatgaattctgggttgttagctgcggtcagctgggctcccgggagcctgttgctggtggagaacagggggcgcctggccaagggaccagcggcttgctgagactcaacatgacactcctggggtctgagcattccttgctgattaggagcaagttcagatcagttttacagttaagacttcaacaaagaaggacccaggaacaactggctaaccaaggcataataccaccactgaaacgtccagctgaattccatgagcaaagaaaacatttggatagtgacaaggctaaaaattccctgaagcgcaaagccagaaacaggtgcaacagtgccgacttggttaatatgcacatactccaagcttccactgcagagaggtccattccaactgctcagatgaagctgaaaagagcccgactcgccgatgatctcaatgaaaaaattgctctacgaccagggccactggagctggtggaaaaaaacattcttcctgtggattctgctgtgaaagaggccataaaaggtaaccaggtgagtttctccaaatccacggatgcttttgcctttgaagaggacagcagcagcgatgggctttctccggatcagactcgaagtgaagacccccaaaactcagcgggatccccgccagacgctaaagcctcagataccccttcgacaggttctctggggacaaaccaggatcttgcttctggctcagaaaatgacagaaatgactcagcctcacagcccagccaccagtcagatgcggggaagcaggggcttggcccccccagcacccccatagccgtgcatgctgctgtaaagtccaaatccttgggtgacagtaagaaccgccacaaaaagcccaaggaccccaagccaaaggtgaagaagcttaaatatcaccagtacattcccccagaccagaaggcagagaagtcccctccacctatggactcagcctacgctcggctgctccagcaacagcagctgttcctgcagctccaaatcctcagccagcagcagcagcagcagcaacaccgattcagctacctagggatgcaccaagctcagcttaaggaaccaaatgaacagatggtcagaaatccaaactcttcttcaacgccactgagcaatacccccttgtctcctgtcaaaaacagtttttctggacaaactggtgtctcttctttcaaaccaggcccactcccacctaacctggatgatctgaaggtctctgaattaagacaacagcttcgaattcggggcttgcctgtgtcaggcaccaaaacggctctcatggaccggcttcgacccttccaggactgctctggcaacccagtgccgaactttggggatataacgactgtcacttttcctgtcacacccaacacgctgcccaattaccagtcttcctcttctaccagtgccctgtccaacggcttctaccactttggcagcaccagctccagccccccgatctccccagcctcctctgacctgtcagtcgctgggtccctgccggacaccttcaatgatgcctccccctccttcggcctgcacccgtccccagtccacgtgtgcacggaggaaagtctcatgagcagcctgaatgggggctctgttccttctgagctggatgggctggactccgagaaggacaagatgctggtggagaagcagaaggtgatcaatgaactcacctggaaactccagcaagagcagaggcaggtggaggagctgaggatgcagcttcagaagcagaaaaggaataactgttcagagaagaagccgctgcctttcctggctgcctccatcaagcaggaagaggctgtctccagctgtccttttgcatcccaagtacctgtgaaaagacaaagcagcagctcagagtgtcacccaccggcttgtgaagctgctcaactccagcctcttggaaatgctcattgtgtggagtcctcagatcaaaccaatgtactttcttccacatttctcagcccccagtgttcccctcagcattcaccgctgggggctgtgaaaagcccacagcacatcagtttgcccccatcacccaacaaccctcactttctgccctcatcctccggggcccagggagaagggcacagggtctcctcgcccatcagcagccaggtgtgcactgcacagaactcaggagcacacgatggccatcctccaagcttctctccccattcttccagcctccacccgcccttctctggagcccaagcagacagcagtcatggtgccgggggaaacccttgtcccaaaagcccatgtgtacagcaaaagatggctggtttacactcttctgataaggtggggccaaagttttcaattccatccccaactttttctaagtcaagttcagcaatttcagaggtaacacagcctccatcctatgaagatgccgtaaagcagcaaatgacccggagtcagcagatggatgaactcctggacgtgcttattgaaagcggagaaatgccagcagacgctagagaggatcactcatgtcttcaaaaagtcccaaagatacccagatcttcccgaagtccaactgctgtcctcaccaagccctcggcttcctttgaacaagcctcttcaggcagccagatcccctttgatccctatgccaccgacagtgatgagcatcttgaagtcttattaaattcccagagccccctaggaaagatgagtgatgtcacccttctaaaaattgggagcgaagagcctcactttgatgggataatggatggattctctgggaaggctgcagaagacctcttcaatgcacatgagatcttgccaggccccctctctccaatgcagacacagttttcaccctcttctgtggacagcaatgggctgcagttaagcttcactgaatctccctgggaaaccatggagtggctggacctcactccgccaaattccacaccaggctttagcgccctcaccaccagcagccccagcatcttcaacatcgatttcctggatgtcactgatctcaatttgaattcttccatggaccttcacttgcagcagtggtagaatgcccaatgcaccagtgctatggaagaccaatggagttccatgggggaaagcacacagccatacatactttactgtccaaaaacagaagaagaagaagagaattaaaaagaagcaatgatttctgtgccaatgaacaagaacaaaagtcatttttagaaatacatatactgtaatatttaccaacagtcagtaactgttaatgatttcaacaatgcattaaaagaatgtgctttctcagattaaggatgccaaaaaagatatttcactgccttttcaaagaccagtatattttctagcccataatttttctcaggcattgttggggcataagctcacactgtaagcttttctcatgaattcactagacataacgtggaaggaaaacgtagtcttttgggagtacagggaagccagcccctcaaagcttatggaagacatacctgcaatggaagctgttgcccaatgtctccattactatctttcaaaagagaagccagacccagcttcagatcaaaagttcttgagacagaggaacaaaaccaatcgatttccagggaagctaatcaactctcttttccctctaccacaaaactgccctgctggagtggttctgaacctgtacccaggactcgatgtggtcactaataacaattaacctgaactgagtccacagaactccactcggaactttcttcttttttaactagtggcccaatcattcccaccatctctgtgctgataagtacgtgtcctagatgagaaccctgaagaatgcagaccttcttcccccgaaggagatgccacaagctctccaacacagccccctttagttccaaagactagagatgaccacattggtagaagtatatctcgaggcacaggaagggagccccaccagggataattcagacaggactagagaataacatcatttcacataccctgggataaacaccctgggttcctatagaaggactattacttatgggagtccaacttctccttttgttttgttattatcagtttatctttctcccactccacttttccttcaaggtaccaatcctttcctgttcctcgtttggccatctttctttttctgcctccacattgggaggggaggacttctcagttctaacaagctgccatactcctaagaaagccatttttgaaaaatttaacaatccaggttcttctggagaactcattctccacacgcacagtttgctgcaaaaggaagttgcaagaatttcttgaggaagaaactggtgacttggtccatcagtcacgaagttctttctattctcgtttagttttcaagaaattattggtttgtgttgctctggggaaattggaaatcattacattgtaaagacaaatatggatgatatttacaagagagaatttcagatctgggtttttgaaagaaaacagaattgcgcattgaaaacgatggaaggaaaaagacaatggtctaatgtgcattcctcattacctctcgtggctttggctgggagttggaaaaagctaaaatttcagaacagtctctgtaaggctctctgtggctccagttcaccattttatattgttgcatgctgtagaaaggagctattgctgttgttttgtttttttatttaaatcactaaggcactgtttttatcttttgtaaaaaaaaaaaaaaagttgttcactgtgcacttatagaaaaaataatcaaaaatgttgggattttagaagctctctttttgataaaccaaagatttagaagtcattccattgttaacttgtaaaaatgtgtgaacacagagagtttttggtgattgctactctgaaagctgccagatcttattctgggggtgggatgtggaggaatacacatacacacacaaacatacatgtatgtataatagatatatacatatgtgtatattatatctgtgtgtgcatgtatctccaaaagcggcgttacagagttctacaccaaaagcctttaacccttaatctgctgtgaatgatacctggcctttctcactatgaatttctgattaaccaaccagactacacgttgcctctctgtgtatgactaacggctccaacccgatgactcacagctacttgcttatcgtgaacaagctcatcttggcaatgaatatggatgtgaaaagacagaacagcttcaccattagtagctggaaatggtatcacagtctcttatagaggaatatgaaaggaacaagaaaatcattttacattccttttatctgtattgtgctttaaaagatccacatggtaaattttttattttgcttttatgtcagtcatcagaaccaaaaaaatccagaagaaaaaattgccagtgtttcctttgaagatgaagctactggggaagaaaaccttattaatacactccacacatttgttcattcctcagctgttggtgttttcttggggtcttgacaaagcttgctggtcagtgcacttttcaggtgtcacgttttgctgtttgtatgttttttcttccccttacttcctttggaaaacaaactcacacagtgcccctactctgagacctgggactgagtgttaattattttttccttgggtatttctatctgagagactagacctagttaggaggcctctgtacttctccagattgtacctttttatggggatctttgaggctatgacccaggactgatagatatgccttacggaagacaaaagataaaatggttcctatatcctaatgcaaaccaacacagttaaaagagcagatctctggataactgctctcaacctgcttctacagtctccacaaaccgcattcaccctctctcttcatagctcagacatgaaatttgagggagaaaactggagataattgggagaaaattgatgaagttggctgcttccagtagatcagataatccatgaatttgtctcccattgagaattttattttaaattcttttaaactcttcgttgtgtcttttgtgatgacaaatcaggcatgactaaaagatgtacagagacttacgaagatggtcacattcaagttccctaatgctcttagaacctgaagatgaccatgtgtagttttcttaagacctctgaacccccatggtgatgaagacttgaagacatttgcagctatctgctgcagtctggtagattcatacttatctaaagaagtcaaaaaatttattcgtgcaagtgcttgcaggaagccagtgcttattagtagtgaccctgcttctatcaacgttattgagacaacacatattctattctaagggagaaagagggaggaagagagggagggagggaggaagaagagggagggagcgaggaaggaagataggagatgggtaggggggtaaagagaaaaggagggagaagggaaggaaggaaagaagagaggaaagaaaggagggaaggaaaaaagggccaaactttctgatctatgaacttctcagttcagctgtcacattatgagaagtaaatcagaatttttttaaggagaagtcattcttagcactacaataattgtaccagtaattgaggaaaccaagacaatcttcacctgaataatagagggtctgagaactgtcagccttttgccattcaaaaacatttatgtccaacctgaaaaaaaagcatcaataaaacctatcccaagcattcaaaatagtcctttccaaatgttatttattttaaagtcaatcagctcttttagaaacagattctggtctggctgaaaactcccacaacaaatttactcatccagtggctaatatttaatgcccaccatgggcagagcacacaaatcttcagataaacaatactgaattgattcagcacagattgttcagatttgaatgaccagggagttgtatttgcacatgcaagaacactaagaatctcccagtcctcaaactagaaacctttcagctacgatgaaaaaaaaaaaggggtcttcatttttccaagagggggtggaggtggggatcactttttagctaaaagctatctctcacttcaaaattcttgtctttttctttgtggacaaacaccagtagtctatcacttggagatcttttaatatctcccatcatttaaaacatccacgagagtttgaagatttgtgttgattgccagatacagaagccccttgaaaataaggaaagggtggaggaagcatttttgtgtcctatccctacttatcgtagcagctctatagacaaaagggacacttactggtgagcctctggcccttaaaagaaaatcatctaagaatatgaaggcaatttgatttccccccacagccctcagctgccttcctcacagaaggaagttcccaaaattgctggtacacagtttgcaatcaaatatcagatatgagaaaacctgtagtgaagagtctgggttcttggttttctcataaatccaatataaatttgtaggttggttcagggtcaaaattgccagtgctttattagacagatgatactgatagacacacagagcccaggtcctggaacaagacaatcctgtagtgccaagatctggtcagttgcgttaaggagctgggtttgattctagagtccaggtttatagagaaaccctggctagattgagcctacccatggggagacgatttcaagacaggatgagatctgggaagaattttgttgtcatctgccagggaaattatcacaggactcattgaatgcaataacatgtgagtaagttcccttttgattctgggaatcagcgattttccctgtggattaagacaaaccaacgccagaaggtctcctgtgcttattttaaccatctgctcccatcgtgaaccctggagcatgcatttcctagaagtggtttcatagctcctgtgtgttcatggaaaaggggagtataatgatggggatgctggaagcttttttaatgttttccaaaggaaaggaacccacactgctccccagagttcctttccaatggccctgcagtaagaacggaggacaatgtattgctgggtgcttaaaatcctccctcagtgaagcacaaagagacactttgtaaagaaaaaaagagcaagcataggttctctgtgggaccttgtggagtggtgttttcacgttggtctctttggctcaattgagcataatcagaaagaaatgtgggttattgggaagagacaaaaagcagtggctaaaataccaaagttggcatgtgttcttttttaaaaaaaaaaaaaaatgcatatatttttaaataaaatgtttattttaaaaagaaa

SEQ ID NO: 156578 - DNA, 565 bp, Homo sapiens
  Payload ID: 10697
  Gene Symbol: MYOCD
  Gene Name: myocardin
  ENST ID: ENST00000579237
  CDS Start-End: 300-425
aatcgccggcagcctatgacatcagacaggaacgcctgggatgccgcgctgctcctggccaacctccgaggaggaggagggtcccgccggctaagagttaattagccccgcacggcgaggggggaggcgccagttttctggggacactggctgccactgtactcctacccaggggagctcacggagagttggatgaattctgggttgttagctgcggtcagctgggctcccgggagcctgttgctggtggagaacagggggcgcctggccaagggaccagcggcttgctgagactcaacatgacactcctggggtctgagcattccttgctgattaggagcaagttcagatcagttttacagttaagacttcaacaaagaaggacccaggaacaactggctaaccaaggcataataccacactaatccaagctacagcagccacatacttactgcaaaaccttgcactgaaacgtccagctgaattccatgagcaaagaaaacatttggatagtgacaaggctaaaaattccctgaagcgcaaagccagaaacaggtgcaacagt

SEQ ID NO: 156579 - DNA, 2095 bp, Homo sapiens
  Payload ID: 10698
  Gene Symbol: MYOC
  Gene Name: myocilin, trabecular meshwork inducible glucocorticoid response
  Uniprot ID: Q99972
  ENST ID: ENST00000037502
  CDS Start-End: 73-1587
agcaaggccacccatccaggcacctctcagcacagcagagctttccagaggaagcctcaccaagcctctgcaatgaggttcttctgtgcacgttgctgcagctttgggcctgagatgccagctgtccagctgctgcttctggcctgcctggtgtgggatgtgggggccaggacagctcagctcaggaaggccaatgaccagagtggccgatgccagtataccttcagtgtggccagtcccaatgaatccagctgcccagagcagagccaggccatgtcagtcatccataacttacagagagacagcagcacccaacgcttagacctggaggccaccaaagctcgactcagctccctggagagcctcctccaccaattgaccttggaccaggctgccaggccccaggagacccaggaggggctgcagagggagctgggcaccctgaggcgggagcgggaccagctggaaacccaaaccagagagttggagactgcctacagcaacctcctccgagacaagtcagttctggaggaagagaagaagcgactaaggcaagaaaatgagaatctggccaggaggttggaaagcagcagccaggaggtagcaaggctgagaaggggccagtgtccccagacccgagacactgctcgggctgtgccaccaggctccagagaagtttctacgtggaatttggacactttggccttccaggaactgaagtccgagctaactgaagttcctgcttcccgaattttgaaggagagcccatctggctatctcaggagtggagagggagacaccggatgtggagaactagtttgggtaggagagcctctcacgctgagaacagcagaaacaattactggcaagtatggtgtgtggatgcgagaccccaagcccacctacccctacacccaggagaccacgtggagaatcgacacagttggcacggatgtccgccaggtttttgagtatgacctcatcagccagtttatgcagggctacccttctaaggttcacatactgcctaggccactggaaagcacgggtgctgtggtgtactcggggagcctctatttccagggcgctgagtccagaactgtcataagatatgagctgaataccgagacagtgaaggctgagaaggaaatccctggagctggctaccacggacagttcccgtattcttggggtggctacacggacattgacttggctgtggatgaagcaggcctctgggtcatttacagcaccgatgaggccaaaggtgccattgtcctctccaaactgaacccagagaatctggaactcgaacaaacctgggagacaaacatccgtaagcagtcagtcgccaatgccttcatcatctgtggcaccttgtacaccgtcagcagctacacctcagcagatgctaccgtcaactttgcttatgacacaggcacaggtatcagcaagaccctgaccatcccattcaagaaccgctataagtacagcagcatgattgactacaaccccctggagaagaagctctttgcctgggacaacttgaacatggtcacttatgacatcaagctctccaagatgtgaaaagcctccaagctgtacaggcaatggcagaaggagatgctcagggctcctggggggagcaggctgaagggagagccagccagccagggcccaggcagctttgactgctttccaagttttcattaatccagaaggatgaacatggtcaccatctaactattcaggaattgtagtctgagggcgtagacaatttcatataataaatatcctttatcttctgtcagcatttatgggatgtttaatgacatagttcaagttttcttgtgatttggggcaaaagctgtaaggcataatagtttcttcctgaaaaccattgctcttgcatgttacatggttaccacaagccacaataaaaagcataacttctaaaggaagcagaatagctcctctggccagcatcgaatataagtaagatgcatttactacagttggcttctaatgcttcagatagaatacagttgggtctcacataaccctttacattgtgaaataaaattttcttacccaa

SEQ ID NO: 156580 - DNA, 2042 bp, Homo sapiens
  Payload ID: 10698
  Gene Symbol: MYOC
  Gene Name: myocilin, trabecular meshwork inducible glucocorticoid response
  ENST ID: ENST00000614688
  CDS Start-End: 23-1057
gaagcctcaccaagcctctgcaatgaggttcttctgtgcacgttgctgcagctttgggcctgagatgccagctgtccagctgctgcttctggcctgcctggtgtgggatgtgggggccaggacagctcagctcaggaaggccaatgaccagagtggccgatgccagtataccttcagtgtggccagtcccaatgaatccagctgcccagagcagagccaggccatgtcagtcatccataacttacagagagacagcagcacccaacgcttagacctggaggccaccaaagctcgactcagctccctggagagcctcctccaccaattgaccttggaccaggctgccaggccccaggagacccaggaggggctgcagagggagctgggcaccctgaggcgggagcgggaccagctggaaacccaaaccagagagttggagactgcctacagcaacctcctccgagacaagtcagttctggaggaagagaagaagcgactaaggcaagaaaatgagaatctggccaggaggttggaaagcagcagccaggaggtagcaaggctgagaaggggccagtgtccccagacccgagacactgctcgggctgtgccaccaggctccagagaagtttctacgtggaatttggacactttggccttccaggaactgaagtccgagctaactgaagttcctgcttcccgaattttgaaggagagcccatctggctatctcaggagtggagagggagacaccggatgtggagaactagtttgggtaggagagcctctcacgctgagaacagcagaaacaattactggcaagtatggtgtgtggatgcgagaccccaagcccacctacccctacacccaggagaccacgtggagaatcgacacagttggcacggatgtccgccaggtttttgagtatgacctcatcagccagtttatgcagggctacccttctaaggttcacatactgcctaggccactggaaagcacgggtgctgtggtgtactcggggagcctctatttcagggcgctgagtccagaactgtcataagatatgagctgaataccgagacagtgaaggctgagaaggaaatccctggagctggctaccacggacagttcccgtattcttggggtggctacacggacattgacttggctgtggatgaagcaggcctctgggtcatttacagcaccgatgaggccaaaggtgccattgtcctctccaaactgaacccagagaatctggaactcgaacaaacctgggagacaaacatccgtaagcagtcagtcgccaatgccttcatcatctgtggcaccttgtacaccgtcagcagctacacctcagcagatgctaccgtcaactttgcttatgacacaggcacaggtatcagcaagaccctgaccatcccattcaagaaccgctataagtacagcagcatgattgactacaaccccctggagaagaagctctttgcctgggacaacttgaacatggtcacttatgacatcaagctctccaagatgtgaaaagcctccaagctgtacaggcaatggcagaaggagatgctcagggctcctggggggagcaggctgaagggagagccagccagccagggcccaggcagctttgactgctttccaagttttcattaatccagaaggatgaacatggtcaccatctaactattcaggaattgtagtctgagggcgtagacaatttcatataataaatatcctttatcttctgtcagcatttatgggatgtttaatgacatagttcaagttttcttgtgatttggggcaaaagctgtaaggcataatagtttcttcctgaaaaccattgctcttgcatgttacatggttaccacaagccacaataaaaagcataacttctaaaggaagcagaatagctcctctggccagcatcgaatataagtaagatgcatttactacagttggcttctaatgcttcagatagaatacagttgggtctcacataaccctttacattgtgaaataaaattttcttaccc

SEQ ID NO: 156581 - DNA, 5464 bp, Homo sapiens
  Payload ID: 10699
  Gene Symbol: MEF2A
  Gene Name: myocyte enhancer factor 2A
  Uniprot ID: Q02078
  ENST ID: ENST00000338042
  CDS Start-End: 320-1813
agaacgagttccggtctggccgaggcttgtctcctaaaaatagccccggtgtggggatccgtgcgcggatgtcccggcgagtcccgggctgaaagaggcggctccgggcggcgcgaagcgctggtggcgggcccgggctgcggcgtgtgcgcgcccgccagctgctccggagatacgatcttgtagaaaatttcagctgtagcccttggactagaagctgaaataacagaagctgtgtacgatgcattagggtattgaagaaaattaacttttgaattaaatatttggaatataaggaaataaggaaagttgactgaaaatggggcggaagaaaatacaaatcacacgcataatggatgaaaggaaccgacaggtcacttttacaaagagaaagtttggattaatgaagaaagcctatgaacttagtgtgctctgtgactgtgaaatagcactcatcattttcaacagctctaacaaactgtttcaatatgctagcactgatatggacaaagttcttctcaagtatacagaatataatgaacctcatgaaagcagaaccaactcggatattgttgagactttaagaaagaaaggccttaatggttgtgagagccctgatgctgacgattactttgagcacagtccactctcggaggacagattcagcaaactaaatgaagatagtgattttattttcaaacgaggccctcctggtctgccacctcagaacttttcaatgtctgtcacagttccagtgaccagccccaatgctttgtcctacactaacccagggagttcactggtgtccccatctttggcagccagctcaacgttaacagattcaagcatgctctctccacctcaaaccacattacatagaaatgtgtctcctggagctcctcagagaccaccaagtactggcaatgcaggtgggatgttgagcactacagacctcacagtgccaaatggagctggaagcagtccagtggggaatggatttgtaaactcaagagcttctccaaatttgattggagctactggtgcaaatagcttaggcaaagtcatgcctacaaagtctccccctccaccaggtggtggtaatcttggaatgaacagtaggaaaccagatcttcgagttgtcatccccccttcaagcaagggcatgatgcctccactaaatacccagaggatcagtagttctcaagccactcaacctcttgctaccccagtcgtgtctgtgacaaccccaagcttgcctccgcaaggacttgtgtactcagcaatgccgactgcctacaacactgattattcactgaccagcgctgacctgtcagcccttcaaggcttcaactcgccaggaatgctgtcgctgggacaggtgtcggcctggcagcagcaccacctaggacaagcagccctcagctctcttgttgctggagggcagttatctcagggttccaatttatccattaataccaaccaaaacatcagcatcaagtccgaaccgatttcacctcctcgggatcgtatgaccccatcgggcttccagcagcagcagcagcagcagcagcagcagcagccgccgccaccaccgcagccccagccacaacccccgcagccccagccccgacaggaaatggggcgctcccctgtggacagtctgagcagctctagtagctcctatgatggcagtgatcgggaggatccacggggcgacttccattctccaattgtgcttggccgacccccaaacactgaggacagagaaagcccttctgtaaagcgaatgaggatggacgcgtgggtgacctaaggcttccaagctgatgtttgtacttttgtgttactgcagtgacctgccctacatatctaaatcggtaaataaggacatgagttaaatatatttatatgtacatacatatatatatccctttacatatatatgtatgtgggtgtgagtgtgtatgtgtgggtgtgtgttacatacacagaatcaggcacttacctgcaaactccttgtaggtctgcagatgtgtgtcccatggcagacaaagcaccctgtaggcacagacaagtctggcacttccttggactacttgtttcgtaaagataaccagtttttgcagagaaacgtgtacccatatataattctcccacactagcttgcagaaacctagagggccccctacttgttttatttaactgtgcagtgactgtagttacttaagagaaaatgctttgtagaacagagcagtagaaaagcaggaaccaagaaagcaatactgtacataaaatgtcatttatattttccaacctggcatgggtgtctgttgcaaaggggtgcatgggaaagggctgttgatattaaaaacaaacaaaacaaaaaagccccacacataactgttttgcacgtgcaaaaatgtattgggtcaagaagtgatctttagctaataaagaaagagaatagaaaacacgcatgagatattcagaaaatactagcctagaaatatagagcattaacaaagtaaaattaatatattaagttataattggaatatgtcagaagtttctttttacattcatatcttaaaaattaaagaaactgattttagctcatgtatattttatatgaaagaaaacacccttatgaattgatgactatatataaaattatattcactacttttgaacacattctgctatgaattatttatataagccaaagctatatgttgtaacttttttttagagaatagctttatcttggtttaactctttagttttattttaagaggggaaaacaaaaatatcttgcaagcagaaccttggaaaaaaaaagccatgaacacttattctaaatgtaaattaaaagttgagccaaactctttgtgtatatagcatcttaaatatattatcacctttgatgtaagtacctatgtattgtatggtcaccagattaaaaagtatatttttgtggattgccgccaatctggggggaaaaggcgaggtcctttattaagtattcactgtttaatatttactattttgttaaatatactgtactttggattttaattattagcccagttttttcagaggattgtataaaggggtttctcccctcactggtggtgaatgtgtgatgttacattgtaatctttgtgctgtatgggttgagcatcattatatattttgtatgtgtacataaatagcaaagtggcaaaaaaaattggtgttaagttcatcctgcataagtataaaatgtgttgtaacagattttgtaaggcattatttaaaacttgccttttgtgaggaaaaaatgtagtagaaaaagctgacctaatttaattaatattagagaaaatggcaaaatagtagatgagcacaaaggttttataagtggtaaatgattaggggaaaataatcatggggaaagggatcttttttccttgaccctctgaaaacagaacgatgcagctggttacaaaatcctaccgttatcagctcttctgcacattgcagtgatgctttggtatgcggggagaaacactcttagggtgctggtccttggcatgactcttgccattctaattggaattagtgccaccctcagcttggattttgaacaaggccttattctttcaggaagacaactaatggatgatagcaagttcatccacttactgggcttgtgccatgagcaaaattcaaagtcctgtatatctttcattgtagatttttaaatactccttttcctaaaaaactcaagggtttaaaaattgctattttatattttaaatgatattgagcagctacctacaatttctatgtacattttgttcccccccccccaccccccccccaaattacgttccttttgacattttcctcatctgctgtttgtgacaagtcatcagccagatttcctgactgacacataggtatgatcagtgcaggagagacctgcgcaccacaggctgcaaactggaggttctgttctcatggcagtttgggcagtaacttttgagagaggccaaaaaaaggaggatgacatgctgtctcctctcttcagtatagacattaggctcttattcagaaaggatttttctttaaaaatgtacttactttactgaactacttacaggcacatttcttcataaggccacacctaatccaaacaagacagtctcccaacactgaagttccaaaataatccttaccactttgtaaaccatttatagctttgaaagtgttaagtgattccttcgttattatttatgcatgttcatgaacttctgctgtacattggaataggagttaacacattcacatttactgtctattttcttgtgtgccttatgagatggcttttctgactgtatctcaatagtctttctttctatgcaggtttataatcagtacaactactgttttctaaaatactactactcaaggctcggagtttgtatttaaattacactgaccaagtaacaatgtattccatttcaggaactgaatatttgactgttaacctttttcccatacgtccagtgtggcatggagcatatggacttgacagacatctctcacccagacgcccacgtgtgaacacacccacatccacatctctgggtggaaaccagcctagagaggggacgacgctaatggtgttgctttagaaccgtcttttcttacccttttagactcgtgttttgtatgagacaccattgcaagaaaattttatccctccagaagtattttattactaaagaacaaaagcaaaaaaagcttaaattgcactggttaaagtacagtttccaacagctgtccttcctcagtactctaatggccactccaccgcgagtggaagtcactgttgtgtgtacacaggtggtcccaatcaaaactccatcttttgagcccaattatgtccattttgttatagactaaatcaggggtttgttctacaagaacaatacatgttttaccctttcctttaactagaaggataactagtaatgcatcaacataatttctgtattaaccatcatgcgcacaagaaatacatagtaaataaggaagctgaaaactcctggcattggatcttaagctagatgattagaatgtgaaaaagattttacaaatgtaaaacttctatttctctgtagaaactttcttcactttgctgtgcaagaagacactgctttgctatatttaaaatggcttttttaaaagagatttatgtatttggtaaatgtttgtagtcaacagttcacacaagaagctgtacacggtttgatcatgtaaaaccgtttggcggcacaagctggactttgttgccatccttgagatgaaccttttaagaaaaataagttaatctcaatttttccctgaatgtgttgtttttcttcattatacaataaatataatagtgaactttttatcaaatggtgaagacaatgct

SEQ ID NO: 156582 - DNA, 5824 bp, Homo sapiens
  Payload ID: 10699
  Gene Symbol: MEF2A
  Gene Name: myocyte enhancer factor 2A
  Uniprot ID: Q02078
  ENST ID: ENST00000354410
  CDS Start-End: 630-2129
atagtccgcccccacgtccttgtggaatagcgcccgcttccaagcaccgtgactctctttgccctacccttgtctttcccattccaattactctagaacccaccgagaggataattcagtcctgaaaagaaactgatggggagaagcgaggaagggaacccaggagggaggggaggcagggctgcggagggacaccgaggcggcggaggtagtgcgcacgcgcagcacagaacgagttccggtctggccgaggcttgtctcctaaaaatagccccggtgtggggatccgtgcgcggatgtcccggcgagtcccgggctgaaagaggcggctccgggcggcgcgaagcgctggtggcgggcccgggctgcggcgtgtgcgcgcccgccagctgctccggagatacggaattgcattttgtgaaaaaagaacaagaattttctgcaaggatcatatctaagtgcactttttgctgatacttcatttctaatcttgtagaaaatttcagctgtagcccttggactagaagctgaaataacagaagctgtgtacgatgcattagggtattgaagaaaattaacttttgaattaaatatttggaatataaggaaataaggaaagttgactgaaaatggggcggaagaaaatacaaatcacacgcataatggatgaaaggaaccgacaggtcacttttacaaagagaaagtttggattaatgaagaaagcctatgaacttagtgtgctctgtgactgtgaaatagcactcatcattttcaacagctctaacaaactgtttcaatatgctagcactgatatggacaaagttcttctcaagtatacagaatataatgaacctcatgaaagcagaaccaactcggatattgttgaggctctgaacaagaaggaacacagagggtgcgacagcccagaccctgatacttcatatgtgctaactccacatacagaagaaaaatataaaaaaattaatgaggaatttgataatatgatgcggaatcataaaatcgcacctggtctgccacctcagaacttttcaatgtctgtcacagttccagtgaccagccccaatgctttgtcctacactaacccagggagttcactggtgtccccatctttggcagccagctcaacgttaacagattcaagcatgctctctccacctcaaaccacattacatagaaatgtgtctcctggagctcctcagagaccaccaagtactggcaatgcaggtgggatgttgagcactacagacctcacagtgccaaatggagctggaagcagtccagtggggaatggatttgtaaactcaagagcttctccaaatttgattggagctactggtgcaaatagcttaggcaaagtcatgcctacaaagtctccccctccaccaggtggtggtaatcttggaatgaacagtaggaaaccagatcttcgagttgtcatccccccttcaagcaagggcatgatgcctccactaaatacccagaggatcagtagttctcaagccactcaacctcttgctaccccagtcgtgtctgtgacaaccccaagcttgcctccgcaaggacttgtgtactcagcaatgccgactgcctacaacactgattattcactgaccagcgctgacctgtcagcccttcaaggcttcaactcgccaggaatgctgtcgctgggacaggtgtcggcctggcagcagcaccacctaggacaagcagccctcagctctcttgttgctggagggcagttatctcagggttccaatttatccattaataccaaccaaaacatcagcatcaagtccgaaccgatttcacctcctcgggatcgtatgaccccatcgggcttccagcagcagcagcagcagcagcagcagcagcagccgccgccaccaccgcagccccagccacaacccccgcagccccagccccgacaggaaatggggcgctcccctgtggacagtctgagcagctctagtagctcctatgatggcagtgatcgggaggatccacggggcgacttccattctccaattgtgcttggccgacccccaaacactgaggacagagaaagcccttctgtaaagcgaatgaggatggacgcgtgggtgacctaaggcttccaagctgatgtttgtacttttgtgttactgcagtgacctgccctacatatctaaatcggtaaataaggacatgagttaaatatatttatatgtacatacatatatatatccctttacatatatatgtatgtgggtgtgagtgtgtatgtgtgggtgtgtgttacatacacagaatcaggcacttacctgcaaactccttgtaggtctgcagatgtgtgtcccatggcagacaaagcaccctgtaggcacagacaagtctggcacttccttggactacttgtttcgtaaagataaccagtttttgcagagaaacgtgtacccatatataattctcccacactagcttgcagaaacctagagggccccctacttgttttatttaactgtgcagtgactgtagttacttaagagaaaatgctttgtagaacagagcagtagaaaagcaggaaccaagaaagcaatactgtacataaaatgtcatttatattttccaacctggcatgggtgtctgttgcaaaggggtgcatgggaaagggctgttgatattaaaaacaaacaaaacaaaaaagccccacacataactgttttgcacgtgcaaaaatgtattgggtcaagaagtgatctttagctaataaagaaagagaatagaaaacacgcatgagatattcagaaaatactagcctagaaatatagagcattaacaaagtaaaattaatatattaagttataattggaatatgtcagaagtttctttttacattcatatcttaaaaattaaagaaactgattttagctcatgtatattttatatgaaagaaaacacccttatgaattgatgactatatataaaattatattcactacttttgaacacattctgctatgaattatttatataagccaaagctatatgttgtaacttttttttagagaatagctttatcttggtttaactctttagttttattttaagaggggaaaacaaaaatatcttgcaagcagaaccttggaaaaaaaaagccatgaacacttattctaaatgtaaattaaaagttgagccaaactctttgtgtatatagcatcttaaatatattatcacctttgatgtaagtacctatgtattgtatggtcaccagattaaaaagtatatttttgtggattgccgccaatctggggggaaaaggcgaggtcctttattaagtattcactgtttaatatttactattttgttaaatatactgtactttggattttaattattagcccagttttttcagaggattgtataaaggggtttctcccctcactggtggtgaatgtgtgatgttacattgtaatctttgtgctgtatgggttgagcatcattatatattttgtatgtgtacataaatagcaaagtggcaaaaaaaattggtgttaagttcatcctgcataagtataaaatgtgttgtaacagattttgtaaggcattatttaaaacttgccttttgtgaggaaaaaatgtagtagaaaaagctgacctaatttaattaatattagagaaaatggcaaaatagtagatgagcacaaaggttttataagtggtaaatgattaggggaaaataatcatggggaaagggatcttttttccttgaccctctgaaaacagaacgatgcagctggttacaaaatcctaccgttatcagctcttctgcacattgcagtgatgctttggtatgcggggagaaacactcttagggtgctggtccttggcatgactcttgccattctaattggaattagtgccaccctcagcttggattttgaacaaggccttattctttcaggaagacaactaatggatgatagcaagttcatccacttactgggcttgtgccatgagcaaaattcaaagtcctgtatatctttcattgtagatttttaaatactccttttcctaaaaaactcaagggtttaaaaattgctattttatattttaaatgatattgagcagctacctacaatttctatgtacattttgttcccccccccccaccccccccccaaattacgttccttttgacattttcctcatctgctgtttgtgacaagtcatcagccagatttcctgactgacacataggtatgatcagtgcaggagagacctgcgcaccacaggctgcaaactggaggttctgttctcatggcagtttgggcagtaacttttgagagaggccaaaaaaaggaggatgacatgctgtctcctctcttcagtatagacattaggctcttattcagaaaggatttttctttaaaaatgtacttactttactgaactacttacaggcacatttcttcataaggccacacctaatccaaacaagacagtctcccaacactgaagttccaaaataatccttaccactttgtaaaccatttatagctttgaaagtgttaagtgattccttcgttattatttatgcatgttcatgaacttctgctgtacattggaataggagttaacacattcacatttactgtctattttcttgtgtgccttatgagatggcttttctgactgtatctcaatagtctttctttctatgcaggtttataatcagtacaactactgttttctaaaatactactactcaaggctcggagtttgtatttaaattacactgaccaagtaacaatgtattccatttcaggaactgaatatttgactgttaacctttttcccatacgtccagtgtggcatggagcatatggacttgacagacatctctcacccagacgcccacgtgtgaacacacccacatccacatctctgggtggaaaccagcctagagaggggacgacgctaatggtgttgctttagaaccgtcttttcttacccttttagactcgtgttttgtatgagacaccattgcaagaaaattttatccctccagaagtattttattactaaagaacaaaagcaaaaaaagcttaaattgcactggttaaagtacagtttccaacagctgtccttcctcagtactctaatggccactccaccgcgagtggaagtcactgttgtgtgtacacaggtggtcccaatcaaaactccatcttttgagcccaattatgtccattttgttatagactaaatcaggggtttgttctacaagaacaatacatgttttaccctttcctttaactagaaggataactagtaatgcatcaacataatttctgtattaaccatcatgcgcacaagaaatacatagtaaataaggaagctgaaaactcctggcattggatcttaagctagatgattagaatgtgaaaaagattttacaaatgtaaaacttctatttctctgtagaaactttcttcactttgctgtgcaagaagacactgctttgctatatttaaaatggcttttttaaaagagatttatgtatttggtaaatgtttgtagtcaacagttcacacaagaagctgtacacggtttgatcatgtaaaaccgtttggcggcacaagctggactttgttgccatccttgagatgaaccttttaagaaaaataagttaatctcaatttttccctgaatgtgttgtttttcttcattatacaataaatataatagtgaactttttatcaaatggtgaagacaatgctaaaggttgttgtaaactgtttgtctcccgcactcactccagtaa

SEQ ID NO: 156583 - DNA, 5182 bp, Homo sapiens
  Payload ID: 10699
  Gene Symbol: MEF2A
  Gene Name: myocyte enhancer factor 2A
  Uniprot ID: Q02078
  ENST ID: ENST00000449277
  CDS Start-End: 258-1547
gcgcggatgtcccggcgagtcccgggctgaaagaggcggctccgggcggcgcgaagcgctggtggcgggcccgggctgcggcgtgtgcgcgcccgccagctgctccggagatacgatcttgtagaaaatttcagctgtagcccttggactagaagctgaaataacagaagctgtgtacgatgcattagggtattgaagaaaattaacttttgaattaaatatttggaatataaggaaataaggaaagttgactgaaaatggggcggaagaaaatacaaatcacacgcataatggatgaaaggaaccgacagactttaagaaagaaaggccttaatggttgtgagagccctgatgctgacgattactttgagcacagtccactctcggaggacagattcagcaaactaaatgaagatagtgattttattttcaaacgaggccctcctggtctgccacctcagaacttttcaatgtctgtcacagttccagtgaccagccccaatgctttgtcctacactaacccagggagttcactggtgtccccatctttggcagccagctcaacgttaacagattcaagcatgctctctccacctcaaaccacattacatagaaatgtgtctcctggagctcctcagagaccaccaagtactggcaatgcaggtgggatgttgagcactacagacctcacagtgccaaatggagctggaagcagtccagtggggaatggatttgtaaactcaagagcttctccaaatttgattggagctactggtgcaaatagcttaggcaaagtcatgcctacaaagtctccccctccaccaggtggtggtaatcttggaatgaacagtaggaaaccagatcttcgagttgtcatccccccttcaagcaagggcatgatgcctccactaaatacccagaggatcagtagttctcaagccactcaacctcttgctaccccagtcgtgtctgtgacaaccccaagcttgcctccgcaaggacttgtgtactcagcaatgccgactgcctacaacactgattattcactgaccagcgctgacctgtcagcccttcaaggcttcaactcgccaggaatgctgtcgctgggacaggtgtcggcctggcagcagcaccacctaggacaagcagccctcagctctcttgttgctggagggcagttatctcagggttccaatttatccattaataccaaccaaaacatcagcatcaagtccgaaccgatttcacctcctcgggatcgtatgaccccatcgggcttccagcagcagcagcagcagcagcagcagcagcagccgccgccaccaccgcagccccagccacaacccccgcagccccagccccgacaggaaatggggcgctcccctgtggacagtctgagcagctctagtagctcctatgatggcagtgatcgggaggatccacggggcgacttccattctccaattgtgcttggccgacccccaaacactgaggacagagaaagcccttctgtaaagcgaatgaggatggacgcgtgggtgacctaaggcttccaagctgatgtttgtacttttgtgttactgcagtgacctgccctacatatctaaatcggtaaataaggacatgagttaaatatatttatatgtacatacatatatatatccctttacatatatatgtatgtgggtgtgagtgtgtatgtgtgggtgtgtgttacatacacagaatcaggcacttacctgcaaactccttgtaggtctgcagatgtgtgtcccatggcagacaaagcaccctgtaggcacagacaagtctggcacttccttggactacttgtttcgtaaagataaccagtttttgcagagaaacgtgtacccatatataattctcccacactagcttgcagaaacctagagggccccctacttgttttatttaactgtgcagtgactgtagttacttaagagaaaatgctttgtagaacagagcagtagaaaagcaggaaccaagaaagcaatactgtacataaaatgtcatttatattttccaacctggcatgggtgtctgttgcaaaggggtgcatgggaaagggctgttgatattaaaaacaaacaaaacaaaaaagccccacacataactgttttgcacgtgcaaaaatgtattgggtcaagaagtgatctttagctaataaagaaagagaatagaaaacacgcatgagatattcagaaaatactagcctagaaatatagagcattaacaaagtaaaattaatatattaagttataattggaatatgtcagaagtttctttttacattcatatcttaaaaattaaagaaactgattttagctcatgtatattttatatgaaagaaaacacccttatgaattgatgactatatataaaattatattcactacttttgaacacattctgctatgaattatttatataagccaaagctatatgttgtaacttttttttagagaatagctttatcttggtttaactctttagttttattttaagaggggaaaacaaaaatatcttgcaagcagaaccttggaaaaaaaaagccatgaacacttattctaaatgtaaattaaaagttgagccaaactctttgtgtatatagcatcttaaatatattatcacctttgatgtaagtacctatgtattgtatggtcaccagattaaaaagtatatttttgtggattgccgccaatctggggggaaaaggcgaggtcctttattaagtattcactgtttaatatttactattttgttaaatatactgtactttggattttaattattagcccagttttttcagaggattgtataaaggggtttctcccctcactggtggtgaatgtgtgatgttacattgtaatctttgtgctgtatgggttgagcatcattatatattttgtatgtgtacataaatagcaaagtggcaaaaaaaattggtgttaagttcatcctgcataagtataaaatgtgttgtaacagattttgtaaggcattatttaaaacttgccttttgtgaggaaaaaatgtagtagaaaaagctgacctaatttaattaatattagagaaaatggcaaaatagtagatgagcacaaaggttttataagtggtaaatgattaggggaaaataatcatggggaaagggatcttttttccttgaccctctgaaaacagaacgatgcagctggttacaaaatcctaccgttatcagctcttctgcacattgcagtgatgctttggtatgcggggagaaacactcttagggtgctggtccttggcatgactcttgccattctaattggaattagtgccaccctcagcttggattttgaacaaggccttattctttcaggaagacaactaatggatgatagcaagttcatccacttactgggcttgtgccatgagcaaaattcaaagtcctgtatatctttcattgtagatttttaaatactccttttcctaaaaaactcaagggtttaaaaattgctattttatattttaaatgatattgagcagctacctacaatttctatgtacattttgttcccccccccccaccccccccccaaattacgttccttttgacattttcctcatctgctgtttgtgacaagtcatcagccagatttcctgactgacacataggtatgatcagtgcaggagagacctgcgcaccacaggctgcaaactggaggttctgttctcatggcagtttgggcagtaacttttgagagaggccaaaaaaaggaggatgacatgctgtctcctctcttcagtatagacattaggctcttattcagaaaggatttttctttaaaaatgtacttactttactgaactacttacaggcacatttcttcataaggccacacctaatccaaacaagacagtctcccaacactgaagttccaaaataatccttaccactttgtaaaccatttatagctttgaaagtgttaagtgattccttcgttattatttatgcatgttcatgaacttctgctgtacattggaataggagttaacacattcacatttactgtctattttcttgtgtgccttatgagatggcttttctgactgtatctcaatagtctttctttctatgcaggtttataatcagtacaactactgttttctaaaatactactactcaaggctcggagtttgtatttaaattacactgaccaagtaacaatgtattccatttcaggaactgaatatttgactgttaacctttttcccatacgtccagtgtggcatggagcatatggacttgacagacatctctcacccagacgcccacgtgtgaacacacccacatccacatctctgggtggaaaccagcctagagaggggacgacgctaatggtgttgctttagaaccgtcttttcttacccttttagactcgtgttttgtatgagacaccattgcaagaaaattttatccctccagaagtattttattactaaagaacaaaagcaaaaaaagcttaaattgcactggttaaagtacagtttccaacagctgtccttcctcagtactctaatggccactccaccgcgagtggaagtcactgttgtgtgtacacaggtggtcccaatcaaaactccatcttttgagcccaattatgtccattttgttatagactaaatcaggggtttgttctacaagaacaatacatgttttaccctttcctttaactagaaggataactagtaatgcatcaacataatttctgtattaaccatcatgcgcacaagaaatacatagtaaataaggaagctgaaaactcctggcattggatcttaagctagatgattagaatgtgaaaaagattttacaaatgtaaaacttctatttctctgtagaaactttcttcactttgctgtgcaagaagacactgctttgctatatttaaaatggcttttttaaaagagatttatgtatttggtaaatgtttgtagtcaacagttcacacaagaagctgtacacggtttgatcatgtaaaaccgtttggcggcacaagctggactttgttgccatccttgagatgaaccttttaagaaaaataagttaatctcaatttttccctgaatgtgttgtttttcttcattatacaataaatataatagtgaactttttatcaaa

SEQ ID NO: 156584 - DNA, 574 bp, Homo sapiens
  Payload ID: 10699
  Gene Symbol: MEF2A
  Gene Name: myocyte enhancer factor 2A
  ENST ID: ENST00000559903
  CDS Start-End: 342-574
agtcgcgcgggctggtggcgagcagcctccccgggcgcgcaccccttggggccggggggcggtggtggacgtcgcctccttgaaagttgaaggagttctcgggagaccccggagaaggaattgcattttgtgaaaaaagaacaagaattttctgcaaggatcatatctaagtgcactttttgctgatacttcatttctaatcttgtagaaaatttcagctgtagcccttggactagaagctgaaataacagaagctgtgtacgatgcattagggtattgaagaaaattaacttttgaattaaatatttggaatataaggaaataaggaaagttgactgaaaatggggcggaagaaaatacaaatcacacgcataatggatgaaaggaaccgacaggtcacttttacaaagagaaagtttggattaatgaagaaagcctatgaacttagtgtgctctgtgactgtgaaatagcactcatcattttcaacagctctaacaaactgtttcaatatgctagcactgatatggacaaagttcttctcaagtatacagaatataatgaacctcatgaaag

SEQ ID NO: 156585 - DNA, 5413 bp, Homo sapiens
  Payload ID: 10699
  Gene Symbol: MEF2A
  Gene Name: myocyte enhancer factor 2A
  Uniprot ID: Q02078
  ENST ID: ENST00000557942
  CDS Start-End: 243-1760
agctgctccggagatacggaattgcattttgtgaaaaaagaacaagaattttctgcaaggatcatatctaagtgcactttttgctgatacttcatttctaatcttgtagaaaatttcagctgtagcccttggactagaagctgaaataacagaagctgtgtacgatgcattagggtattgaagaaaattaacttttgaattaaatatttggaatataaggaaataaggaaagttgactgaaaatggggcggaagaaaatacaaatcacacgcataatggatgaaaggaaccgacaggtcacttttacaaagagaaagtttggattaatgaagaaagcctatgaacttagtgtgctctgtgactgtgaaatagcactcatcattttcaacagctctaacaaactgtttcaatatgctagcactgatatggacaaagttcttctcaagtatacagaatataatgaacctcatgaaagcagaaccaactcggatattgttgagactttaagaaagaaaggccttaatggttgtgagagccctgatgctgacgattactttgagcacagtccactctcggaggacagattcagcaaactaaatgaagatagtgattttattttcaaacgaggccctcctggtctgccacctcagaacttttcaatgtctgtcacagttccagtgaccagccccaatgctttgtcctacactaacccagggagttcactggtgtccccatctttggcagccagctcaacgttaacagattcaagcatgctctctccacctcaaaccacattacatagaaatgtgtctcctggagctcctcagagaccaccaagtactggcaatgcaggtgggatgttgagcactacagacctcacagtgccaaatggagctggaagcagtccagtggggaatggatttgtaaactcaagagcttctccaaatttgattggagctactggtgcaaatagcttaggcaaagtcatgcctacaaagtctccccctccaccaggtggtggtaatcttggaatgaacagtaggaaaccagatcttcgagttgtcatccccccttcaagcaagggcatgatgcctccactatcggaggaagaggaattggagttgaatacccagaggatcagtagttctcaagccactcaacctcttgctaccccagtcgtgtctgtgacaaccccaagcttgcctccgcaaggacttgtgtactcagcaatgccgactgcctacaacactgattattcactgaccagcgctgacctgtcagcccttcaaggcttcaactcgccaggaatgctgtcgctgggacaggtgtcggcctggcagcagcaccacctaggacaagcagccctcagctctcttgttgctggagggcagttatctcagggttccaatttatccattaataccaaccaaaacatcagcatcaagtccgaaccgatttcacctcctcgggatcgtatgaccccatcgggcttccagcagcagcagcagcagcagcagcagcagcagccgccgccaccaccgcagccccagccacaacccccgcagccccagccccgacaggaaatggggcgctcccctgtggacagtctgagcagctctagtagctcctatgatggcagtgatcgggaggatccacggggcgacttccattctccaattgtgcttggccgacccccaaacactgaggacagagaaagcccttctgtaaagcgaatgaggatggacgcgtgggtgacctaaggcttccaagctgatgtttgtacttttgtgttactgcagtgacctgccctacatatctaaatcggtaaataaggacatgagttaaatatatttatatgtacatacatatatatatccctttacatatatatgtatgtgggtgtgagtgtgtatgtgtgggtgtgtgttacatacacagaatcaggcacttacctgcaaactccttgtaggtctgcagatgtgtgtcccatggcagacaaagcaccctgtaggcacagacaagtctggcacttccttggactacttgtttcgtaaagataaccagtttttgcagagaaacgtgtacccatatataattctcccacactagcttgcagaaacctagagggccccctacttgttttatttaactgtgcagtgactgtagttacttaagagaaaatgctttgtagaacagagcagtagaaaagcaggaaccaagaaagcaatactgtacataaaatgtcatttatattttccaacctggcatgggtgtctgttgcaaaggggtgcatgggaaagggctgttgatattaaaaacaaacaaaacaaaaaagccccacacataactgttttgcacgtgcaaaaatgtattgggtcaagaagtgatctttagctaataaagaaagagaatagaaaacacgcatgagatattcagaaaatactagcctagaaatatagagcattaacaaagtaaaattaatatattaagttataattggaatatgtcagaagtttctttttacattcatatcttaaaaattaaagaaactgattttagctcatgtatattttatatgaaagaaaacacccttatgaattgatgactatatataaaattatattcactacttttgaacacattctgctatgaattatttatataagccaaagctatatgttgtaacttttttttagagaatagctttatcttggtttaactctttagttttattttaagaggggaaaacaaaaatatcttgcaagcagaaccttggaaaaaaaaagccatgaacacttattctaaatgtaaattaaaagttgagccaaactctttgtgtatatagcatcttaaatatattatcacctttgatgtaagtacctatgtattgtatggtcaccagattaaaaagtatatttttgtggattgccgccaatctggggggaaaaggcgaggtcctttattaagtattcactgtttaatatttactattttgttaaatatactgtactttggattttaattattagcccagttttttcagaggattgtataaaggggtttctcccctcactggtggtgaatgtgtgatgttacattgtaatctttgtgctgtatgggttgagcatcattatatattttgtatgtgtacataaatagcaaagtggcaaaaaaaattggtgttaagttcatcctgcataagtataaaatgtgttgtaacagattttgtaaggcattatttaaaacttgccttttgtgaggaaaaaatgtagtagaaaaagctgacctaatttaattaatattagagaaaatggcaaaatagtagatgagcacaaaggttttataagtggtaaatgattaggggaaaataatcatggggaaagggatcttttttccttgaccctctgaaaacagaacgatgcagctggttacaaaatcctaccgttatcagctcttctgcacattgcagtgatgctttggtatgcggggagaaacactcttagggtgctggtccttggcatgactcttgccattctaattggaattagtgccaccctcagcttggattttgaacaaggccttattctttcaggaagacaactaatggatgatagcaagttcatccacttactgggcttgtgccatgagcaaaattcaaagtcctgtatatctttcattgtagatttttaaatactccttttcctaaaaaactcaagggtttaaaaattgctattttatattttaaatgatattgagcagctacctacaatttctatgtacattttgttcccccccccccaccccccccccaaattacgttccttttgacattttcctcatctgctgtttgtgacaagtcatcagccagatttcctgactgacacataggtatgatcagtgcaggagagacctgcgcaccacaggctgcaaactggaggttctgttctcatggcagtttgggcagtaacttttgagagaggccaaaaaaaggaggatgacatgctgtctcctctcttcagtatagacattaggctcttattcagaaaggatttttctttaaaaatgtacttactttactgaactacttacaggcacatttcttcataaggccacacctaatccaaacaagacagtctcccaacactgaagttccaaaataatccttaccactttgtaaaccatttatagctttgaaagtgttaagtgattccttcgttattatttatgcatgttcatgaacttctgctgtacattggaataggagttaacacattcacatttactgtctattttcttgtgtgccttatgagatggcttttctgactgtatctcaatagtctttctttctatgcaggtttataatcagtacaactactgttttctaaaatactactactcaaggctcggagtttgtatttaaattacactgaccaagtaacaatgtattccatttcaggaactgaatatttgactgttaacctttttcccatacgtccagtgtggcatggagcatatggacttgacagacatctctcacccagacgcccacgtgtgaacacacccacatccacatctctgggtggaaaccagcctagagaggggacgacgctaatggtgttgctttagaaccgtcttttcttacccttttagactcgtgttttgtatgagacaccattgcaagaaaattttatccctccagaagtattttattactaaagaacaaaagcaaaaaaagcttaaattgcactggttaaagtacagtttccaacagctgtccttcctcagtactctaatggccactccaccgcgagtggaagtcactgttgtgtgtacacaggtggtcccaatcaaaactccatcttttgagcccaattatgtccattttgttatagactaaatcaggggtttgttctacaagaacaatacatgttttaccctttcctttaactagaaggataactagtaatgcatcaacataatttctgtattaaccatcatgcgcacaagaaatacatagtaaataaggaagctgaaaactcctggcattggatcttaagctagatgattagaatgtgaaaaagattttacaaatgtaaaacttctatttctctgtagaaactttcttcactttgctgtgcaagaagacactgctttgctatatttaaaatggcttttttaaaagagatttatgtatttggtaaatgtttgtagtcaacagttcacacaagaagctgtacacggtttgatcatgtaaaaccgtttggcggcacaagctggactttgttgccatccttgagatgaaccttttaagaaaaataagttaatctcaatttttccctgaatgtgttgtttttcttcattatacaataaatataatagtgaactttttatcaaatggtgaagacaatgctaa

SEQ ID NO: 156586 - DNA, 2854 bp, Homo sapiens
  Payload ID: 10699
  Gene Symbol: MEF2A
  Gene Name: myocyte enhancer factor 2A
  Uniprot ID: Q02078
  ENST ID: ENST00000557785
  CDS Start-End: 350-1843
ggggatccgtgcgcggatgtcccggcgagtcccgggctgaaagaggcggctccgggcggcgcgaagcgctggtggcgggcccgggctgcggcgtgtgcgcgcccgccagctgctccggagatacggaattgcattttgtgaaaaaagaacaagaattttctgcaaggatcatatctaagtgcactttttgctgatacttcatttctaatcttgtagaaaatttcagctgtagcccttggactagaagctgaaataacagaagctgtgtacgatgcattagggtattgaagaaaattaacttttgaattaaatatttggaatataaggaaataaggaaagttgactgaaaatggggcggaagaaaatacaaatcacacgcataatggatgaaaggaaccgacaggtcacttttacaaagagaaagtttggattaatgaagaaagcctatgaacttagtgtgctctgtgactgtgaaatagcactcatcattttcaacagctctaacaaactgtttcaatatgctagcactgatatggacaaagttcttctcaagtatacagaatataatgaacctcatgaaagcagaaccaactcggatattgttgagactttaagaaagaaaggccttaatggttgtgagagccctgatgctgacgattactttgagcacagtccactctcggaggacagattcagcaaactaaatgaagatagtgattttattttcaaacgaggccctcctggtctgccacctcagaacttttcaatgtctgtcacagttccagtgaccagccccaatgctttgtcctacactaacccagggagttcactggtgtccccatctttggcagccagctcaacgttaacagattcaagcatgctctctccacctcaaaccacattacatagaaatgtgtctcctggagctcctcagagaccaccaagtactggcaatgcaggtgggatgttgagcactacagacctcacagtgccaaatggagctggaagcagtccagtggggaatggatttgtaaactcaagagcttctccaaatttgattggagctactggtgcaaatagcttaggcaaagtcatgcctacaaagtctccccctccaccaggtggtggtaatcttggaatgaacagtaggaaaccagatcttcgagttgtcatccccccttcaagcaagggcatgatgcctccactaaatacccagaggatcagtagttctcaagccactcaacctcttgctaccccagtcgtgtctgtgacaaccccaagcttgcctccgcaaggacttgtgtactcagcaatgccgactgcctacaacactgattattcactgaccagcgctgacctgtcagcccttcaaggcttcaactcgccaggaatgctgtcgctgggacaggtgtcggcctggcagcagcaccacctaggacaagcagccctcagctctcttgttgctggagggcagttatctcagggttccaatttatccattaataccaaccaaaacatcagcatcaagtccgaaccgatttcacctcctcgggatcgtatgaccccatcgggcttccagcagcagcagcagcagcagcagcagcagcagccgccgccaccaccgcagccccagccacaacccccgcagccccagccccgacaggaaatggggcgctcccctgtggacagtctgagcagctctagtagctcctatgatggcagtgatcgggaggatccacggggcgacttccattctccaattgtgcttggccgacccccaaacactgaggacagagaaagcccttctgtaaagcgaatgaggatggacgcgtgggtgacctaaggcttccaagctgatgtttgtacttttgtgttactgcagtgacctgccctacatatctaaatcggtaaataaggacatgagttaaatatatttatatgtacatacatatatatatccctttacatatatatgtatgtgggtgtgagtgtgtatgtgtgggtgtgtgttacatacacagaatcaggcacttacctgcaaactccttgtaggtctgcagatgtgtgtcccatggcagacaaagcaccctgtaggcacagacaagtctggcacttccttggactacttgtttcgtaaagataaccagtttttgcagagaaacgtgtacccatatataattctcccacactagcttgcagaaacctagagggccccctacttgttttatttaactgtgcagtgactgtagttacttaagagaaaatgctttgtagaacagagcagtagaaaagcaggaaccaagaaagcaatactgtacataaaatgtcatttatattttccaacctggcatgggtgtctgttgcaaaggggtgcatgggaaagggctgttgatattaaaaacaaacaaaacaaaaaagccccacacataactgttttgcacgtgcaaaaatgtattgggtcaagaagtgatctttagctaataaagaaagagaatagaaaacacgcatgagatattcagaaaatactagcctagaaatatagagcattaacaaagtaaaattaatatattaagttataattggaatatgtcagaagtttctttttacattcatatcttaaaaattaaagaaactgattttagctcatgtatattttatatgaaagaaaacacccttatgaattgatgactatatataaaattatattcactacttttgaacacattctgctatgaattatttatataagccaaagctatatgttgtaacttttttttagagaatagctttatcttggtttaactctttagttttattttaagaggggaaaacaaaaatatcttgcaagcagaac

SEQ ID NO: 156587 - DNA, 732 bp, Homo sapiens
  Payload ID: 10699
  Gene Symbol: MEF2A
  Gene Name: myocyte enhancer factor 2A
  ENST ID: ENST00000560493
  CDS Start-End: 478-732
gatttgccacgcgccgcgtcaccgggccgctcccggcctgggctcccgggggctggtcagggaggtggcggcggctgagcggcggagcgggggcggcagggcgcgacgccgccgggccgccccgccctgggaggcgcccgggccctcatcaagtgaccagtatcccttccaggggaacacggtccttcagaggaaagcgagctccaacccgcggccccggcgccaagccgccgtcatcttcttcctgtgccaggaattgcattttgtgaaaaaagaacaagaattttctgcaaggatcatatctaagtgcactttttgctgatacttcatttctaatcttgtagaaaatttcagctgtagcccttggactagaagctgaaataacagaagctgtgtacgatgcattagggtattgaagaaaattaacttttgaattaaatatttggaatataaggaaataaggaaagttgactgaaaatggggcggaagaaaatacaaatcacacgcataatggatgaaaggaaccgacaggtcacttttacaaagagaaagtttggattaatgaagaaagcctatgaacttagtgtgctctgtgactgtgaaatagcactcatcattttcaacagctctaacaaactgtttcaatatgctagcactgatatggacaaagttcttctcaagtatacagaatataatgaacctcatgaaagcagaaccaactcggatattgtt

SEQ ID NO: 156588 - DNA, 565 bp, Homo sapiens
  Payload ID: 10699
  Gene Symbol: MEF2A
  Gene Name: myocyte enhancer factor 2A
  ENST ID: ENST00000558049
  CDS Start-End: 451-565
cgtgcgcggatgtcccggcgagtcccgggctgaaagaggcggctccgggcggcgcgaagcgctggtggcgggcccgggctgcggcgtgtgcgcgcccgccagctgctccggagatacggctgaagtgcagtggtgtgatctcggttcactgcaacctccgcctccaggttcaagtgattctcgtacctcagcctcccgagtagctgggattacaggcgcctgccaccatgcctggctgatatttatatttttagtagagatggagtttcaccatgttggccaggctggtctcgaactctggacctcagatcttgtagaaaatttcagctgtagcccttggactagaagctgaaataacagaagctgtgtacgatgcattagggtattgaagaaaattaacttttgaattaaatatttggaatataaggaaataaggaaagttgactgaaaatggggcggaagaaaatacaaatcacacgcataatggatgaaaggaaccgacaggtcacttttacaaagagaaagtttggattaatgaagaaagcctatgaacttagtgtgctct

SEQ ID NO: 156589 - DNA, 2186 bp, Homo sapiens
  Payload ID: 10699
  Gene Symbol: MEF2A
  Gene Name: myocyte enhancer factor 2A
  Uniprot ID: Q02078
  ENST ID: ENST00000558812
  CDS Start-End: 320-1633
agaacgagttccggtctggccgaggcttgtctcctaaaaatagccccggtgtggggatccgtgcgcggatgtcccggcgagtcccgggctgaaagaggcggctccgggcggcgcgaagcgctggtggcgggcccgggctgcggcgtgtgcgcgcccgccagctgctccggagatacgatcttgtagaaaatttcagctgtagcccttggactagaagctgaaataacagaagctgtgtacgatgcattagggtattgaagaaaattaacttttgaattaaatatttggaatataaggaaataaggaaagttgactgaaaatggggcggaagaaaatacaaatcacacgcataatggatgaaaggaaccgacagactttaagaaagaaaggccttaatggttgtgagagccctgatgctgacgattactttgagcacagtccactctcggaggacagattcagcaaactaaatgaagatagtgattttattttcaaacgaggccctcctggtctgccacctcagaacttttcaatgtctgtcacagttccagtgaccagccccaatgctttgtcctacactaacccagggagttcactggtgtccccatctttggcagccagctcaacgttaacagattcaagcatgctctctccacctcaaaccacattacatagaaatgtgtctcctggagctcctcagagaccaccaagtactggcaatgcaggtgggatgttgagcactacagacctcacagtgccaaatggagctggaagcagtccagtggggaatggatttgtaaactcaagagcttctccaaatttgattggagctactggtgcaaatagcttaggcaaagtcatgcctacaaagtctccccctccaccaggtggtggtaatcttggaatgaacagtaggaaaccagatcttcgagttgtcatccccccttcaagcaagggcatgatgcctccactatcggaggaagaggaattggagttgaatacccagaggatcagtagttctcaagccactcaacctcttgctaccccagtcgtgtctgtgacaaccccaagcttgcctccgcaaggacttgtgtactcagcaatgccgactgcctacaacactgattattcactgaccagcgctgacctgtcagcccttcaaggcttcaactcgccaggaatgctgtcgctgggacaggtgtcggcctggcagcagcaccacctaggacaagcagccctcagctctcttgttgctggagggcagttatctcagggttccaatttatccattaataccaaccaaaacatcagcatcaagtccgaaccgatttcacctcctcgggatcgtatgaccccatcgggcttccagcagcagcagcagcagcagcagcagcagcagccgccgccaccaccgcagccccagccacaacccccgcagccccagccccgacaggaaatggggcgctcccctgtggacagtctgagcagctctagtagctcctatgatggcagtgatcgggaggatccacggggcgacttccattctccaattgtgcttggccgacccccaaacactgaggacagagaaagcccttctgtaaagcgaatgaggatggacgcgtgggtgacctaaggcttccaagctgatgtttgtacttttgtgttactgcagtgacctgccctacatatctaaatcggtaaataaggacatgagttaaatatatttatatgtacatacatatatatatccctttacatatatatgtatgtgggtgtgagtgtgtatgtgtgggtgtgtgttacatacacagaatcaggcacttacctgcaaactccttgtaggtctgcagatgtgtgtcccatggcagacaaagcaccctgtaggcacagacaagtctggcacttccttggactacttgtttcgtaaagataaccagtttttgcagagaaacgtgtacccatatataattctcccacactagcttgcagaaacctagagggccccctacttgttttatttaactgtgcagtgactgtagttacttaagagaaaatgctttgtagaacagagcagtagaaaagcaggaaccaagaaagcaatactgtacataaaatgtcatttatattttccaacctggcatgggtgtctgttgcaaaggggtgcatgggaaagggctgttgatatt

SEQ ID NO: 156590 - DNA, 1429 bp, Homo sapiens
  Payload ID: 10700
  Gene Symbol: MEF2B
  Gene Name: myocyte enhancer factor 2B
  ENST ID: ENST00000410050
  CDS Start-End: 74-1201
ccgcgggtccgtgcgcccagcgtcccagggcccaggccgagcagacaaagatcattccactcagcctgggacgatggggaggaaaaaaatccagatctcccgcatcctggaccaaaggaatcggcaggtgacgttcaccaagcggaagttcgggctgatgaagaaggcctatgagctgagcgtgctctgtgactgtgagatagccctcatcatcttcaacagcgccaaccgcctcttccagtatgccagcacggacatggaccgtgtgctgctgaagtacacagagtacagcgagccccacgagagccgcaccaacactgacatcctcgagacgctgaagcggaggggcattggcctcgatgggccagagctggagccggatgaagggcctgaggagccaggagagaagtttcggaggctggcaggcgaagggggtgatccggccttgccccgaccccggctgtatcctgcagctcctgctatgcccagcccagatgtggtatacggggccttaccgccaccaggctgtgaccccagtgggcttggggaagcactgcccgcccagagccgcccatctcccttccgaccagcagcccccaaagccgggcccccaggcctggtgcaccctctcttctcaccaagccacctcaccagcaagacaccacccccactgtacctgccgacggaagggcggaggtcagacctgcctggtggcctggctgggccccgagggggactaaacacctccagaagcctctacagtggcctgcagaacccctgctccactgcaactcccggacccccactggggagcttccccttcctccccggaggccccccagcccccaattcctgcccaccagaatatggcctgggagaccctccaccgccccctggcttgttgcagccccccaccctggccccctggcagccctcgaggggtgatgggccccccgccgtgtcctcccagcccagtgggggccgaagcctgggcgaggagggtcccccaacccgcggcgcctccccgccgacccccccagtcagcatcaagtctgagcgcctctctccggcccccgggggccccggcgactttcctaagaccttcccctatcccttgctcctcgcccggtccctggcagagcctctgcggcctgggcccgccctgcgccggctgcccttggccgacggctggccccggtaggagatcacccggtggcaccagcccagagcgctcgccaggtacggcgagggcacgtggggaccccacctccctccaggcctcttcagagaagacccaacagtgacgcccccctccgcggtgggggcttggaggtgggcggctggactcaatccaccctggggggctcctttccttcttcctatttgtgtgtatatccacaaataaaacgcgcgtggcgtccgtggacca

SEQ ID NO: 156591 - DNA, 1683 bp, Homo sapiens
  Payload ID: 10700
  Gene Symbol: MEF2B
  Gene Name: myocyte enhancer factor 2B
  ENST ID: ENST00000409224
  CDS Start-End: 89-982
atcttcgtgcagccgccgcgggtccgtgcgcccagcgtcccagggcccaggccgagcagacaaagatcattccactcagcctgggacgatggggaggaaaaaaatccagatctcccgcatcctggaccaaaggaatcggcaggtgacgttcaccaagcggaagttcgggctgatgaagaaggcctatgagctgagcgtgctctgtgactgtgagatagccctcatcatcttcaacagcgccaaccgcctcttccagtatgccagcacggacatggaccgtgtgctgctgaagtacacagagtacagcgagccccacgagagccgcaccaacactgacatcctcgaggtaccccagacgctgaagcggaggggcattggcctcgatgggccagagctggagccggatgaagggcctgaggagccaggagagaagtttcggaggctggcaggcgaagggggtgatccggccttgccccgaccccggctgtatcctgcagctcctgctatgcccagcccagatgtggtatacggggccttaccgccaccaggctgtgaccccagtgggcttggggaagcactgcccgcccagagccgcccatctcccttccgaccagcagcccccaaagccgggcccccaggcctggtgcaccctctcttctcaccaagccacctcaccagcaagacaccacccccactgtacctgccgacggaagggcggaggtcagacctgcctggtggcctggctgggccccgagggggactaaacacctccagaagcctctacagtggcctgcagaacccctgctccactgcaactcccggacccccactggggagcttccccttcctccccggaggccccccagaatatggcctgggagaccctccaccgccccctggcttgttgcagccccccaccctggccccctggcagccctcgaggggtgatgggccccccgccgtgtcctcccagcccaggtaagtgccctgagacgacggcaagtcccagtcctccaaagccccggccgctgctgacccctggtggccatccctggtactgcgcacacttccggtacggatgggcagctattttgaggccccaagagggaccgccaccccctcctttcccagggtcctcctgccaagcctttgcccacgctgtgccatcccctggcttccttcccttcctcgctgagctcacggcctccctctctctttccccctgcagtgggggccgaagcctgggcgaggagggtcccccaacccgcggcgcctccccgccgacccccccagtcagcatcaagtctgagcgcctctctccggcccccgggggccccggcgactttcctaagaccttcccctatcccttgctcctcgcccggtccctggcagagcctctgcggcctgggcccgccctgcgccggctgcccttggccgacggctggccccggtaggagatcacccggtggcaccagcccagagcgctcgccaggtacggcgagggcacgtggggaccccacctccctccaggcctcttcagagaagacccaacagtgacgcccccctccgcggtgggggcttggaggtgggcggctggactcaatccaccctggggggctcctttccttcttcctatttgtgtgtatatccacaaataaaacgcgcgtggcgtccgtggaccag

SEQ ID NO: 156592 - DNA, 1297 bp, Homo sapiens
  Payload ID: 10700
  Gene Symbol: MEF2B
  Gene Name: myocyte enhancer factor 2B
  ENST ID: ENST00000409447
  CDS Start-End: 233-1093
aaggcacctgcggccgcgggcccctgatcttcgtgcagccgccgcgggtccgtgcgcccagcgtcccagggcccaggccgagcagcaatgcatgagagctggaagtggaagagcttacaagatcatcatcgctcactgtaaccttgaactcctgggctcacagaatcctcccgtctcaggctcccacatagccaggactacagacaaagatcattccactcagcctgggacgatggggaggaaaaaaatccagatctcccgcatcctggaccaaaggaatcggcaggtgacgttcaccaagcggaagttcgggctgatgaagaaggcctatgagctgagcgtgctctgtgactgtgagatagccctcatcatcttcaacagcgccaaccgcctcttccagtatgccagcacggacatggaccgtgtgctgctgaagtacacagagtacagcgagccccacgagagccgcaccaacactgacatcctcgagacgctgaagcggaggggcattggcctcgatgggccagagctggagccggatgaagggcctgaggagccaggagagaagtttcggaggctggcaggcgaagggggtgatccggccttgccccgaccccggctgtatcctgcagctcctgctatgcccagcccagatgtggtatacggggccttaccgccaccaggctgtgaccccagtgggcttggggaagcactgcccgcccagagccgcccatctcccttccgaccagcagcccccaaagccgggcccccagagaagcctctacagtggcctgcagaacccctgctccactgcaactcccggacccccactggggagcttccccttcctccccggaggccccccagtgggggccgaagcctgggcgaggagggtcccccaacccgcggcgcctccccgccgacccccccagtcagcatcaagtctgagcgcctctctccggcccccgggggccccggcgactttcctaagaccttcccctatcccttgctcctcgcccggtccctggcagagcctctgcggcctgggcccgccctgcgccggctgcccttggccgacggctggccccggtaggagatcacccggtggcaccagcccagagcgctcgccaggtacggcgagggcacgtggggaccccacctccctccaggcctcttcagagaagacccaacagtgacgcccccctccgcggtgggggcttggaggtgggcggctggactcaatccaccctggggggctcctttccttcttcctatttgtgtgtatatccacaaataa

SEQ ID NO: 156593 - DNA, 1405 bp, Homo sapiens
  Payload ID: 10700
  Gene Symbol: MEF2B
  Gene Name: myocyte enhancer factor 2B
  Uniprot ID: Q02080
  ENST ID: ENST00000424583
  CDS Start-End: 71-1177
cgggtccgtgcgcccagcgtcccagggcccaggccgagcagacaaagatcattccactcagcctgggacgatggggaggaaaaaaatccagatctcccgcatcctggaccaaaggaatcggcaggtgacgttcaccaagcggaagttcgggctgatgaagaaggcctatgagctgagcgtgctctgtgactgtgagatagccctcatcatcttcaacagcgccaaccgcctcttccagtatgccagcacggacatggaccgtgtgctgctgaagtacacagagtacagcgagccccacgagagccgcaccaacactgacatcctcgagacgctgaagcggaggggcattggcctcgatgggccagagctggagccggatgaagggcctgaggagccaggagagaagtttcggaggctggcaggcgaagggggtgatccggccttgccccgaccccggctgtatcctgcagctcctgctatgcccagcccagatgtggtatacggggccttaccgccaccaggctgtgaccccagtgggcttggggaagcactgcccgcccagagccgcccatctcccttccgaccagcagcccccaaagccgggcccccaggcctggtgcaccctctcttctcaccaagccacctcaccagcaagacaccacccccactgtacctgccgacggaagggcggaggtcagacctgcctggtggcctggctgggccccgagggggactaaacacctccagaagcctctacagtggcctgcagaacccctgctccactgcaactcccggacccccactggggagcttccccttcctccccggaggccccccagaatatggcctgggagaccctccaccgccccctggcttgttgcagccccccaccctggccccctggcagccctcgaggggtgatgggccccccgccgtgtcctcccagcccagtgggggccgaagcctgggcgaggagggtcccccaacccgcggcgcctccccgccgacccccccagtcagcatcaagtctgagcgcctctctccggcccccgggggccccggcgactttcctaagaccttcccctatcccttgctcctcgcccggtccctggcagagcctctgcggcctgggcccgccctgcgccggctgcccttggccgacggctggccccggtaggagatcacccggtggcaccagcccagagcgctcgccaggtacggcgagggcacgtggggaccccacctccctccaggcctcttcagagaagacccaacagtgacgcccccctccgcggtgggggcttggaggtgggcggctggactcaatccaccctggggggctcctttccttcttcctatttgtgtgtatatccacaaataaaacgcgcgtggcgtccgtggacca

SEQ ID NO: 156594 - DNA, 6192 bp, Homo sapiens
  Payload ID: 10701
  Gene Symbol: MEF2C
  Gene Name: myocyte enhancer factor 2C
  Uniprot ID: Q06413
  ENST ID: ENST00000340208
  CDS Start-End: 378-1829
caaactggggggtttctcttcaaagccagctggtctggctttattctgcaggaatttttttacctgtcagggtttggacaacaaagccctcagcaggtgctgacgggtacaacttcctggagaagcagaaaggcactggtgccaaagaagagttgcaaactgtgaagtaacttctatgaagagatgaagtaaagaacggaaggcaaatgattgtggcagtaaagaagtgtatgtgcaggaacgaatgcaggaatttgggaactgagctgtgcaagtgctgaagaaggagatttgtttggaggaaacaggaaagagaaagaaaaggaaggaaaaaatacataatttcagggacgagagagagaagaaaaacggggactatggggagaaaaaagattcagattacgaggattatggatgaacgtaacagacaggtgacatttacaaagaggaaatttgggttgatgaagaaggcttatgagctgagcgtgctgtgtgactgtgagattgcgctgatcatcttcaacagcaccaacaagctgttccagtatgccagcaccgacatggacaaagtgcttctcaagtacacggagtacaacgagccgcatgagagccggacaaactcagacatcgtggagacgttgagaaagaagggccttaatggctgtgacagcccagaccccgatgcggacgattccgcattgaacaagaaagaaaacaaaggctgtgaaagccccgatcccgactcctcttatgcactcaccccacgcactgaagaaaaatacaaaaaaattaatgaagaatttgataatatgatcaagagtcataaaattcctgctgttccacctcccaacttcgagatgccagtctccatcccagtgtccagccacaacagtttggtgtacagcaaccctgtcagctcactgggaaaccccaacctattgccactggctcacccttctctgcagaggaatagtatgtctcctggtgtaacacatcgacctccaagtgcaggtaacacaggtggtctgatgggtggagacctcacgtctggtgcaggcaccagtgcagggaacgggtatggcaatccccgaaactcaccaggtctgctggtctcacctggtaacttgaacaagaatatgcaagcaaaatctcctcccccaatgaatttaggaatgaataaccgtaaaccagatctccgagttcttattccaccaggcagcaagaatacgatgccatcagtgaatcaaaggataaataactcccagtcggctcagtcattggctaccccagtggtttccgtagcaactcctactttaccaggacaaggaatgggaggatatccatcagccatttcaacaacatatggtaccgagtactctctgagtagtgcagacctgtcatctctgtctgggtttaacaccgccagcgctcttcaccttggttcagtaactggctggcaacagcaacacctacataacatgccaccatctgccctcagtcagttgggagcttgcactagcactcatttatctcagagttcaaatctctccctgccttctactcaaagcctcaacatcaagtcagaacctgtttctcctcctagagaccgtaccaccaccccttcgagatacccacaacacacgcgccacgaggcggggagatctcctgttgacagcttgagcagctgtagcagttcgtacgacgggagcgaccgagaggatcaccggaacgaattccactcccccattggactcaccagaccttcgccggacgaaagggaaagtccctcagtcaagcgcatgcgactttctgaaggatgggcaacatgatcagattattacttactagtttttttttttttcttgcagtgtgtgtgtgtgctataccttaatggggaaggggggtcgatatgcattatatgtgccgtgtgtggaaaaaaaaaaagtcaggtactctgttttgtaaaagtacttttaaattgcctcagtgatacagtataaagataaacagaaatgctgagataagcttagcacttgagttgtacaacagaacacttgtacaaaatagattttaaggctaacttcttttcactgttgtgctcctttgcaaaatgtatgttacaatagatagtgtcatgttgcaggttcaacgttatttacatgtaaatagacaaaaggaaacatttgccaaaagcggcagatctttactgaaagagagagcagctgttatgcaacatatagaaaaatgtatagatgcttggacagacccggtaatgggtggccattggtaaatgttaggaacacaccaggtcacctgacatcccaagaatgctcacaaacctgcaggcatatcattggcgtatggcactcattaaaaaggatcagagaccattaaaagaggaccatacctattaaaaaaaaatgtggagttggagggctaacatatttaattaaataaataaataaatctgggtctgcatctcttattaaataaaaatataaaaatatgtacattacattttgcttattttcatataaaaggtaagacagagtttgcaaagcatttgtggctttttgtagtttacttaagccaaaatgtgtttttttccccttgatagcttcgctaatattttaaacagtcctgtaaaaaaccaaaaaggactttttgtatagaaagcactaccctaagccatgaagaactccatgctttgctaaccaagataactgttttctctttgtagaagttttgtttttgaaatgtgtatttctaattatataaaatattaagaatcttttaaaaaaatctgtgaaattaacatgcttgtgtatagctttctaatatatataatattatggtaatagcagaagttttgttatcttaatagcgggaggggggtatatttgtgcagttgcacatttgagtaactattttctttctgttttcttttactctgcttacattttataagtttaaggtcagctgtcaaaaggataacctgtggggttagaacatatcacattgcaacaccctaaattgtttttaatacattagcaatctattgggtcaactgacatccattgtatatactagtttctttcatgctatttttattttgttttttgcatttttatcaaatgcagggcccctttctgatctcaccatttcaccatgcatcttggaattcagtaagtgcatatcctaacttgcccatattctaaatcatctggttggttttcagcctagaatttgatacgctttttagaaatatgcccagaatagaaaagctatgttggggcacatgtcctgcaaatatggccctagaaacaagtgatatggaatttacttggtgaataagttataaattcccacagaagaaaaatgtgaaagactgggtgctagacaagaaggaagcaggtaaagggatagttgctttgtcatccgtttttaattattttaactgacccttgacaatcttgtcagcaatataggactgttgaacaatcccggtgtgtcaggacccccaaatgtcacttctgcataaagcatgtatgtcatctattttttcttcaataaagagatttaatagccatttcaagaaatcccataaagaacctctctatgtccctttttttaatttaaaaaaaatgactcttgtctaatattcgtctataagggattaattttcagaccctttaataagtgagtgccataagaaagtcaatatatattgtttaaaagatatttcagtctaggaaagattttccttctcttggaatgtgaagatctgtcgattcatctccaatcatatgcattgacatacacagcaaagaagatataggcagtaatatcaacactgctatatcatgtgtaggacatttcttatccattttttctcttttacttgcatagttgctatgtgtttctcattgtaaaaggctgccgctgggtggcagaagccaagagaccttattaactaggctatatttttcttaacttgatctgaaatccacaattagaccacaatgcacctttggttgtatccataaaggatgctagcctgccttgtactaatgttttatatattaaaaaaaaaaaatctatcaaccatttcatatatatcccactactcaaggtatccatggaacatgaaagaataacatttatgcagaggaaaaacaaaaacatccctgaaaatatacacactcatacacacacacgcacaggggaataaaataagaaaatcattttcctcaccatagacttgatcccatccttacaacccatccttctaacttgatgtgtataaaatatgcaaacatttcacaaatgttctttgtcatttcaaaatactttagtatatcaatatcagtagataccagtgggtgggaaagggtcattacatgaaaatatgaagaaatagccatattagttttttaacctgcaatttgcctcagcaacaaagaaaaagtgaatttttaatgctgaagataaagtaagctaaagtaccagcagaagccttggctatttatagcagttctgacaatagttttataagaacatgaagagaacagaatcacttgaaaatggatgccagtcatctcttgttcccactactgaattcttataaagtggtggcaagatagggaagggataatctgagaatttttaaaagatgatttaatgagaagaagcacaattttgattttgatgagtcactttctgtaaacaatcttggtctatctttacccttataccttatctgtaatttaccatttattgtatttgcaaagctagtatggtttttaatcacagtaaatcctttgtattccagactttagggcagagccctgagggagtattattttacataacccgtcctagagtaacattttaggcaacattcttcattgcaagtaaaagatccataagtggcattttacacggctgcgagtattgttatatctaatcctattttaaaagatttttggtaatatgaagcttgaatactggtaacagtgatgcaatatacgcaagctgcacaacctgtatattgtatgcattgctgcgtggaggctgtttatttcaacctttttaaaaattgtgttttttagtaaaatggcttattttttcccaaaggtggaatttagcattttgtaatgatgaatataaaaatacctgtcatccccagatcatttaaaagttaactaaagtgagaatgaaaaaacaaaattccaagacactttttaaaagaatgtctgccctcacacacttttatggatttgtttttcttacatacccatcttttaacttagagatagcattttttgccctctttattttgttgtttgtttctccagagagtaaacgctttgtagttctttctttaaaaaacattttttttaaagaagaagaagccacttgaaccctcaataaaggctgttgcctaagcatggcatacttcatctgttctcatttgtgccatctgccgtgatgtcgtcacttttatggcgttaatttcctgccactacagatcttttgaagattgctggaatactggtgtctgttagaatgcttcagactacagatgtaattaaaggcttttcttaatatgttttaaccaaagatgtggagcaatccaagccacatatcttctacatcaaatttttccattttggttattttcataatctggtattgcattttgccttccctgttcatacctcaaattgattcatacctcagtttaattcagagaggtcagttaagtgacggattctgttgtggtttgaatgcagtaccagtgttctcttcgagcaaagtagacctgggtcactgtaggcataggacttggattgcttcagatggtttgctgtatcatttttcttctttttcttttcctggggacttgtttccattaaatgagagtaattaaaatcgcttgtaaatgagggcatacaagcatttgcaacaaatattcaaatagaggctcacagcggcataagctggactttgtcgccactagatgacaagatgttataactaagttaaaccacatctgtgtatctcaagggacttaattcagctgtctgtagtgaataaaagtgggaaattttcaaaagtttctcctgctggaaataaggtataatttgtattttgcagacaattcagtaaagttactggctttcttagtga

SEQ ID NO: 156595 - DNA, 6336 bp, Homo sapiens
  Payload ID: 10701
  Gene Symbol: MEF2C
  Gene Name: myocyte enhancer factor 2C
  Uniprot ID: Q06413
  ENST ID: ENST00000424173
  CDS Start-End: 582-1973
agcaattctgtgttcttttgccagcactgacaaaggtctggttgtcagtgatacctttacagctaaatttactccagagtgacagaaacaggtgcacctcggcctgccagacacttgtgcagagagatcacgcatctcacggcttgacgatcaagggggcaaagcctcggtcttcatagaaaaggagaggaggcaaacgcagcccaaactggggggtttctcttcaaagccagctggtctggctttattctgcaggaatttttttacctgtcagggtttggacaacaaagccctcagcaggtgctgacgggtacaacttcctggagaagcagaaaggcactggtgccaaagaagagttgcaaactgtgaagtaacttctatgaagagatgaagtaaagaacggaaggcaaatgattgtggcagtaaagaagtgtatgtgcaggaacgaatgcaggaatttgggaactgagctgtgcaagtgctgaagaaggagatttgtttggaggaaacaggaaagagaaagaaaaggaaggaaaaaatacataatttcagggacgagagagagaagaaaaacggggactatggggagaaaaaagattcagattacgaggattatggatgaacgtaacagacaggtgacatttacaaagaggaaatttgggttgatgaagaaggcttatgagctgagcgtgctgtgtgactgtgagattgcgctgatcatcttcaacagcaccaacaagctgttccagtatgccagcaccgacatggacaaagtgcttctcaagtacacggagtacaacgagccgcatgagagccggacaaactcagacatcgtggaggcattgaacaagaaagaaaacaaaggctgtgaaagccccgatcccgactcctcttatgcactcaccccacgcactgaagaaaaatacaaaaaaattaatgaagaatttgataatatgatcaagagtcataaaattcctgctgttccacctcccaacttcgagatgccagtctccatcccagtgtccagccacaacagtttggtgtacagcaaccctgtcagctcactgggaaaccccaacctattgccactggctcacccttctctgcagaggaatagtatgtctcctggtgtaacacatcgacctccaagtgcaggtaacacaggtggtctgatgggtggagacctcacgtctggtgcaggcaccagtgcagggaacgggtatggcaatccccgaaactcaccaggtctgctggtctcacctggtaacttgaacaagaatatgcaagcaaaatctcctcccccaatgaatttaggaatgaataaccgtaaaccagatctccgagttcttattccaccaggcagcaagaatacgatgccatcagtgaatcaaaggataaataactcccagtcggctcagtcattggctaccccagtggtttccgtagcaactcctactttaccaggacaaggaatgggaggatatccatcagccatttcaacaacatatggtaccgagtactctctgagtagtgcagacctgtcatctctgtctgggtttaacaccgccagcgctcttcaccttggttcagtaactggctggcaacagcaacacctacataacatgccaccatctgccctcagtcagttgggagcttgcactagcactcatttatctcagagttcaaatctctccctgccttctactcaaagcctcaacatcaagtcagaacctgtttctcctcctagagaccgtaccaccaccccttcgagatacccacaacacacgcgccacgaggcggggagatctcctgttgacagcttgagcagctgtagcagttcgtacgacgggagcgaccgagaggatcaccggaacgaattccactcccccattggactcaccagaccttcgccggacgaaagggaaagtccctcagtcaagcgcatgcgactttctgaaggatgggcaacatgatcagattattacttactagtttttttttttttcttgcagtgtgtgtgtgtgctataccttaatggggaaggggggtcgatatgcattatatgtgccgtgtgtggaaaaaaaaaaagtcaggtactctgttttgtaaaagtacttttaaattgcctcagtgatacagtataaagataaacagaaatgctgagataagcttagcacttgagttgtacaacagaacacttgtacaaaatagattttaaggctaacttcttttcactgttgtgctcctttgcaaaatgtatgttacaatagatagtgtcatgttgcaggttcaacgttatttacatgtaaatagacaaaaggaaacatttgccaaaagcggcagatctttactgaaagagagagcagctgttatgcaacatatagaaaaatgtatagatgcttggacagacccggtaatgggtggccattggtaaatgttaggaacacaccaggtcacctgacatcccaagaatgctcacaaacctgcaggcatatcattggcgtatggcactcattaaaaaggatcagagaccattaaaagaggaccatacctattaaaaaaaaatgtggagttggagggctaacatatttaattaaataaataaataaatctgggtctgcatctcttattaaataaaaatataaaaatatgtacattacattttgcttattttcatataaaaggtaagacagagtttgcaaagcatttgtggctttttgtagtttacttaagccaaaatgtgtttttttccccttgatagcttcgctaatattttaaacagtcctgtaaaaaaccaaaaaggactttttgtatagaaagcactaccctaagccatgaagaactccatgctttgctaaccaagataactgttttctctttgtagaagttttgtttttgaaatgtgtatttctaattatataaaatattaagaatcttttaaaaaaatctgtgaaattaacatgcttgtgtatagctttctaatatatataatattatggtaatagcagaagttttgttatcttaatagcgggaggggggtatatttgtgcagttgcacatttgagtaactattttctttctgttttcttttactctgcttacattttataagtttaaggtcagctgtcaaaaggataacctgtggggttagaacatatcacattgcaacaccctaaattgtttttaatacattagcaatctattgggtcaactgacatccattgtatatactagtttctttcatgctatttttattttgttttttgcatttttatcaaatgcagggcccctttctgatctcaccatttcaccatgcatcttggaattcagtaagtgcatatcctaacttgcccatattctaaatcatctggttggttttcagcctagaatttgatacgctttttagaaatatgcccagaatagaaaagctatgttggggcacatgtcctgcaaatatggccctagaaacaagtgatatggaatttacttggtgaataagttataaattcccacagaagaaaaatgtgaaagactgggtgctagacaagaaggaagcaggtaaagggatagttgctttgtcatccgtttttaattattttaactgacccttgacaatcttgtcagcaatataggactgttgaacaatcccggtgtgtcaggacccccaaatgtcacttctgcataaagcatgtatgtcatctattttttcttcaataaagagatttaatagccatttcaagaaatcccataaagaacctctctatgtccctttttttaatttaaaaaaaatgactcttgtctaatattcgtctataagggattaattttcagaccctttaataagtgagtgccataagaaagtcaatatatattgtttaaaagatatttcagtctaggaaagattttccttctcttggaatgtgaagatctgtcgattcatctccaatcatatgcattgacatacacagcaaagaagatataggcagtaatatcaacactgctatatcatgtgtaggacatttcttatccattttttctcttttacttgcatagttgctatgtgtttctcattgtaaaaggctgccgctgggtggcagaagccaagagaccttattaactaggctatatttttcttaacttgatctgaaatccacaattagaccacaatgcacctttggttgtatccataaaggatgctagcctgccttgtactaatgttttatatattaaaaaaaaaaaatctatcaaccatttcatatatatcccactactcaaggtatccatggaacatgaaagaataacatttatgcagaggaaaaacaaaaacatccctgaaaatatacacactcatacacacacacgcacaggggaataaaataagaaaatcattttcctcaccatagacttgatcccatccttacaacccatccttctaacttgatgtgtataaaatatgcaaacatttcacaaatgttctttgtcatttcaaaatactttagtatatcaatatcagtagataccagtgggtgggaaagggtcattacatgaaaatatgaagaaatagccatattagttttttaacctgcaatttgcctcagcaacaaagaaaaagtgaatttttaatgctgaagataaagtaagctaaagtaccagcagaagccttggctatttatagcagttctgacaatagttttataagaacatgaagagaacagaatcacttgaaaatggatgccagtcatctcttgttcccactactgaattcttataaagtggtggcaagatagggaagggataatctgagaatttttaaaagatgatttaatgagaagaagcacaattttgattttgatgagtcactttctgtaaacaatcttggtctatctttacccttataccttatctgtaatttaccatttattgtatttgcaaagctagtatggtttttaatcacagtaaatcctttgtattccagactttagggcagagccctgagggagtattattttacataacccgtcctagagtaacattttaggcaacattcttcattgcaagtaaaagatccataagtggcattttacacggctgcgagtattgttatatctaatcctattttaaaagatttttggtaatatgaagcttgaatactggtaacagtgatgcaatatacgcaagctgcacaacctgtatattgtatgcattgctgcgtggaggctgtttatttcaacctttttaaaaattgtgttttttagtaaaatggcttattttttcccaaaggtggaatttagcattttgtaatgatgaatataaaaatacctgtcatccccagatcatttaaaagttaactaaagtgagaatgaaaaaacaaaattccaagacactttttaaaagaatgtctgccctcacacacttttatggatttgtttttcttacatacccatcttttaacttagagatagcattttttgccctctttattttgttgtttgtttctccagagagtaaacgctttgtagttctttctttaaaaaacattttttttaaagaagaagaagccacttgaaccctcaataaaggctgttgcctaagcatggcatacttcatctgttctcatttgtgccatctgccgtgatgtcgtcacttttatggcgttaatttcctgccactacagatcttttgaagattgctggaatactggtgtctgttagaatgcttcagactacagatgtaattaaaggcttttcttaatatgttttaaccaaagatgtggagcaatccaagccacatatcttctacatcaaatttttccattttggttattttcataatctggtattgcattttgccttccctgttcatacctcaaattgattcatacctcagtttaattcagagaggtcagttaagtgacggattctgttgtggtttgaatgcagtaccagtgttctcttcgagcaaagtagacctgggtcactgtaggcataggacttggattgcttcagatggtttgctgtatcatttttcttctttttcttttcctggggacttgtttccattaaatgagagtaattaaaatcgcttgtaaatgagggcatacaagcatttgcaacaaatattcaaatagaggctcacagcggcataagctggactttgtcgccactagatgacaagatgttataactaagttaaaccacatctgtgtatctcaagggacttaattcagctgtctgtagtgaataaaagtgggaaattttcaaaagtttctcctgctggaaataaggtataatttgtattttgcagacaattcagtaaagttactggctttcttagtga

SEQ ID NO: 156596 - DNA, 4340 bp, Homo sapiens
  Payload ID: 10701
  Gene Symbol: MEF2C
  Gene Name: myocyte enhancer factor 2C
  Uniprot ID: Q06413
  ENST ID: ENST00000437473
  CDS Start-End: 652-2073
gagctgttctccttttcccattcgtcttctgtcacttccttcctggacgcagttttctggacgagtctggttacttttaatccgaccggccgctgagagccactttctcctcctcctcctcctcctccttctcttcctcctccttcttcctcctcctcctcctcttccgagcggcctcggcgcgcgcgaatgcgcggccccgcgccccccccctcgcgcgcgctcccctcgcgcgcgcgcacacacgcacacatcgtctccagctctctgctcgctctgctcgcagtcacagacacttgagcacacgcgtacacccagacatcttcgggctgctattggattgactttgaaggttctgtgtgggtcgccgtggctgcatgtttgaatcaggtggagaagcacttcaacgctggacgaagtaaagattattgttgttattttttttttctctctctctctctcttaagaaaggaaaatatcccaaggactaatctgatcgggtcttccttcatgaacgaatgcaggaatttgggaactgagctgtgcaagtgctgaagaaggagatttgtttggaggaaacaggaaagagaaagaaaaggaaggaaaaaatacataatttcagggacgagagagagaagaaaaacggggactatggggagaaaaaagattcagattacgaggattatggatgaacgtaacagacaggtgacatttacaaagaggaaatttgggttgatgaagaaggcttatgagctgagcgtgctgtgtgactgtgagattgcgctgatcatcttcaacagcaccaacaagctgttccagtatgccagcaccgacatggacaaagtgcttctcaagtacacggagtacaacgagccgcatgagagccggacaaactcagacatcgtggagacgttgagaaagaagggccttaatggctgtgacagcccagaccccgatgcggacgattccgtaggtcacagccctgagtctgaggacaagtacaggaaaattaacgaagatattgatctaatgatcagcaggcaaagattgtgtgctgttccacctcccaacttcgagatgccagtctccatcccagtgtccagccacaacagtttggtgtacagcaaccctgtcagctcactgggaaaccccaacctattgccactggctcacccttctctgcagaggaatagtatgtctcctggtgtaacacatcgacctccaagtgcaggtaacacaggtggtctgatgggtggagacctcacgtctggtgcaggcaccagtgcagggaacgggtatggcaatccccgaaactcaccaggtctgctggtctcacctggtaacttgaacaagaatatgcaagcaaaatctcctcccccaatgaatttaggaatgaataaccgtaaaccagatctccgagttcttattccaccaggcagcaagaatacgatgccatcagtgtctgaggatgtcgacctgcttttgaatcaaaggataaataactcccagtcggctcagtcattggctaccccagtggtttccgtagcaactcctactttaccaggacaaggaatgggaggatatccatcagccatttcaacaacatatggtaccgagtactctctgagtagtgcagacctgtcatctctgtctgggtttaacaccgccagcgctcttcaccttggttcagtaactggctggcaacagcaacacctacataacatgccaccatctgccctcagtcagttgggagcttgcactagcactcatttatctcagagttcaaatctctccctgccttctactcaaagcctcaacatcaagtcagaacctgtttctcctcctagagaccgtaccaccaccccttcgagatacccacaacacacgcgccacgaggcggggagatctcctgttgacagcttgagcagctgtagcagttcgtacgacgggagcgaccgagaggatcaccggaacgaattccactcccccattggactcaccagaccttcgccggacgaaagggaaagtccctcagtcaagcgcatgcgactttctgaaggatgggcaacatgatcagattattacttactagtttttttttttttcttgcagtgtgtgtgtgtgctataccttaatggggaaggggggtcgatatgcattatatgtgccgtgtgtggaaaaaaaaaaagtcaggtactctgttttgtaaaagtacttttaaattgcctcagtgatacagtataaagataaacagaaatgctgagataagcttagcacttgagttgtacaacagaacacttgtacaaaatagattttaaggctaacttcttttcactgttgtgctcctttgcaaaatgtatgttacaatagatagtgtcatgttgcaggttcaacgttatttacatgtaaatagacaaaaggaaacatttgccaaaagcggcagatctttactgaaagagagagcagctgttatgcaacatatagaaaaatgtatagatgcttggacagacccggtaatgggtggccattggtaaatgttaggaacacaccaggtcacctgacatcccaagaatgctcacaaacctgcaggcatatcattggcgtatggcactcattaaaaaggatcagagaccattaaaagaggaccatacctattaaaaaaaaatgtggagttggagggctaacatatttaattaaataaataaataaatctgggtctgcatctcttattaaataaaaatataaaaatatgtacattacattttgcttattttcatataaaaggtaagacagagtttgcaaagcatttgtggctttttgtagtttacttaagccaaaatgtgtttttttccccttgatagcttcgctaatattttaaacagtcctgtaaaaaaccaaaaaggactttttgtatagaaagcactaccctaagccatgaagaactccatgctttgctaaccaagataactgttttctctttgtagaagttttgtttttgaaatgtgtatttctaattatataaaatattaagaatcttttaaaaaaatctgtgaaattaacatgcttgtgtatagctttctaatatatataatattatggtaatagcagaagttttgttatcttaatagcgggaggggggtatatttgtgcagttgcacatttgagtaactattttctttctgttttcttttactctgcttacattttataagtttaaggtcagctgtcaaaaggataacctgtggggttagaacatatcacattgcaacaccctaaattgtttttaatacattagcaatctattgggtcaactgacatccattgtatatactagtttctttcatgctatttttattttgttttttgcatttttatcaaatgcagggcccctttctgatctcaccatttcaccatgcatcttggaattcagtaagtgcatatcctaacttgcccatattctaaatcatctggttggttttcagcctagaatttgatacgctttttagaaatatgcccagaatagaaaagctatgttggggcacatgtcctgcaaatatggccctagaaacaagtgatatggaatttacttggtgaataagttataaattcccacagaagaaaaatgtgaaagactgggtgctagacaagaaggaagcaggtaaagggatagttgctttgtcatccgtttttaattattttaactgacccttgacaatcttgtcagcaatataggactgttgaacaatcccggtgtgtcaggacccccaaatgtcacttctgcataaagcatgtatgtcatctattttttcttcaataaagagatttaatagccatttcaagaaatcccataaagaacctctctatgtccctttttttaatttaaaaaaaatgactcttgtctaatattcgtctataagggattaattttcagaccctttaataagtgagtgccataagaaagtcaatatatattgtttaaaagatatttcagtctaggaaagattttccttctcttggaatgtgaagatctgtcgattcatctccaatcatatgcattgacatacacagcaaagaagatataggcagtaatatcaacactgctatatcatgtgtaggacatttcttatccattttttctcttttacttgcatagttgctatgtgtttctcattgtaaaaggctgccgctgggtggcagaagccaagagaccttattaactaggctatatttttcttaacttgatctgaaatccacaattagaccacaatgcacctttggttgtatccataaaggatgctagcctgccttgtactaatgttttatatattaaaaaaaaaaaa

SEQ ID NO: 156597 - DNA, 7561 bp, Homo sapiens
  Payload ID: 10701
  Gene Symbol: MEF2C
  Gene Name: myocyte enhancer factor 2C
  Uniprot ID: Q06413
  ENST ID: ENST00000504921
  CDS Start-End: 653-2074
gctgttctccttttcccattcgtcttctgtcacttccttcctggacgcagttttctggacgagtctggttacttttaatccgaccggccgctgagagccactttctcctcctcctcctcctcctccttctcttcctcctccttcttcctcctcctcctcctcttccgagcggcctcggcgcgcgcgaatgcgcggccccgcgccccccccctcgcgcgcgctcccctcgcgcgcgcgcacacacgcacacatcgtctccagctctctgctcgctctgctcgcagtcacagacacttgagcacacgcgtacacccagacatcttcgggctgctattggattgactttgaaggttctgtgtgggtcgccgtggctgcatgtttgaatcaggtggagaagcacttcaacgctggacgaagtaaagattattgttgttattttttttttctctctctctctctcttaagaaaggaaaatatcccaaggactaatctgatcgggtcttccttcatcaggaacgaatgcaggaatttgggaactgagctgtgcaagtgctgaagaaggagatttgtttggaggaaacaggaaagagaaagaaaaggaaggaaaaaatacataatttcagggacgagagagagaagaaaaacggggactatggggagaaaaaagattcagattacgaggattatggatgaacgtaacagacaggtgacatttacaaagaggaaatttgggttgatgaagaaggcttatgagctgagcgtgctgtgtgactgtgagattgcgctgatcatcttcaacagcaccaacaagctgttccagtatgccagcaccgacatggacaaagtgcttctcaagtacacggagtacaacgagccgcatgagagccggacaaactcagacatcgtggagacgttgagaaagaagggccttaatggctgtgacagcccagaccccgatgcggacgattccgtaggtcacagccctgagtctgaggacaagtacaggaaaattaacgaagatattgatctaatgatcagcaggcaaagattgtgtgctgttccacctcccaacttcgagatgccagtctccatcccagtgtccagccacaacagtttggtgtacagcaaccctgtcagctcactgggaaaccccaacctattgccactggctcacccttctctgcagaggaatagtatgtctcctggtgtaacacatcgacctccaagtgcaggtaacacaggtggtctgatgggtggagacctcacgtctggtgcaggcaccagtgcagggaacgggtatggcaatccccgaaactcaccaggtctgctggtctcacctggtaacttgaacaagaatatgcaagcaaaatctcctcccccaatgaatttaggaatgaataaccgtaaaccagatctccgagttcttattccaccaggcagcaagaatacgatgccatcagtgtctgaggatgtcgacctgcttttgaatcaaaggataaataactcccagtcggctcagtcattggctaccccagtggtttccgtagcaactcctactttaccaggacaaggaatgggaggatatccatcagccatttcaacaacatatggtaccgagtactctctgagtagtgcagacctgtcatctctgtctgggtttaacaccgccagcgctcttcaccttggttcagtaactggctggcaacagcaacacctacataacatgccaccatctgccctcagtcagttgggagcttgcactagcactcatttatctcagagttcaaatctctccctgccttctactcaaagcctcaacatcaagtcagaacctgtttctcctcctagagaccgtaccaccaccccttcgagatacccacaacacacgcgccacgaggcggggagatctcctgttgacagcttgagcagctgtagcagttcgtacgacgggagcgaccgagaggatcaccggaacgaattccactcccccattggactcaccagaccttcgccggacgaaagggaaagtccctcagtcaagcgcatgcgactttctgaaggatgggcaacatgatcagattattacttactagtttttttttttttcttgcagtgtgtgtgtgtgctataccttaatggggaaggggggtcgatatgcattatatgtgccgtgtgtggaaaaaaaaaaagtcaggtactctgttttgtaaaagtacttttaaattgcctcagtgatacagtataaagataaacagaaatgctgagataagcttagcacttgagttgtacaacagaacacttgtacaaaatagattttaaggctaacttcttttcactgttgtgctcctttgcaaaatgtatgttacaatagatagtgtcatgttgcaggttcaacgttatttacatgtaaatagacaaaaggaaacatttgccaaaagcggcagatctttactgaaagagagagcagctgttatgcaacatatagaaaaatgtatagatgcttggacagacccggtaatgggtggccattggtaaatgttaggaacacaccaggtcacctgacatcccaagaatgctcacaaacctgcaggcatatcattggcgtatggcactcattaaaaaggatcagagaccattaaaagaggaccatacctattaaaaaaaaatgtggagttggagggctaacatatttaattaaataaataaataaatctgggtctgcatctcttattaaataaaaatataaaaatatgtacattacattttgcttattttcatataaaaggtaagacagagtttgcaaagcatttgtggctttttgtagtttacttaagccaaaatgtgtttttttccccttgatagcttcgctaatattttaaacagtcctgtaaaaaaccaaaaaggactttttgtatagaaagcactaccctaagccatgaagaactccatgctttgctaaccaagataactgttttctctttgtagaagttttgtttttgaaatgtgtatttctaattatataaaatattaagaatcttttaaaaaaatctgtgaaattaacatgcttgtgtatagctttctaatatatataatattatggtaatagcagaagttttgttatcttaatagcgggaggggggtatatttgtgcagttgcacatttgagtaactattttctttctgttttcttttactctgcttacattttataagtttaaggtcagctgtcaaaaggataacctgtggggttagaacatatcacattgcaacaccctaaattgtttttaatacattagcaatctattgggtcaactgacatccattgtatatactagtttctttcatgctatttttattttgttttttgcatttttatcaaatgcagggcccctttctgatctcaccatttcaccatgcatcttggaattcagtaagtgcatatcctaacttgcccatattctaaatcatctggttggttttcagcctagaatttgatacgctttttagaaatatgcccagaatagaaaagctatgttggggcacatgtcctgcaaatatggccctagaaacaagtgatatggaatttacttggtgaataagttataaattcccacagaagaaaaatgtgaaagactgggtgctagacaagaaggaagcaggtaaagggatagttgctttgtcatccgtttttaattattttaactgacccttgacaatcttgtcagcaatataggactgttgaacaatcccggtgtgtcaggacccccaaatgtcacttctgcataaagcatgtatgtcatctattttttcttcaataaagagatttaatagccatttcaagaaatcccataaagaacctctctatgtccctttttttaatttaaaaaaaatgactcttgtctaatattcgtctataagggattaattttcagaccctttaataagtgagtgccataagaaagtcaatatatattgtttaaaagatatttcagtctaggaaagattttccttctcttggaatgtgaagatctgtcgattcatctccaatcatatgcattgacatacacagcaaagaagatataggcagtaatatcaacactgctatatcatgtgtaggacatttcttatccattttttctcttttacttgcatagttgctatgtgtttctcattgtaaaaggctgccgctgggtggcagaagccaagagaccttattaactaggctatatttttcttaacttgatctgaaatccacaattagaccacaatgcacctttggttgtatccataaaggatgctagcctgccttgtactaatgttttatatattaaaaaaaaaaaatctatcaaccatttcatatatatcccactactcaaggtatccatggaacatgaaagaataacatttatgcagaggaaaaacaaaaacatccctgaaaatatacacactcatacacacacacgcacaggggaataaaataagaaaatcattttcctcaccatagacttgatcccatccttacaacccatccttctaacttgatgtgtataaaatatgcaaacatttcacaaatgttctttgtcatttcaaaatactttagtatatcaatatcagtagataccagtgggtgggaaagggtcattacatgaaaatatgaagaaatagccatattagttttttaacctgcaatttgcctcagcaacaaagaaaaagtgaatttttaatgctgaagataaagtaagctaaagtaccagcagaagccttggctatttatagcagttctgacaatagttttataagaacatgaagagaacagaatcacttgaaaatggatgccagtcatctcttgttcccactactgaattcttataaagtggtggcaagatagggaagggataatctgagaatttttaaaagatgatttaatgagaagaagcacaattttgattttgatgagtcactttctgtaaacaatcttggtctatctttacccttataccttatctgtaatttaccatttattgtatttgcaaagctagtatggtttttaatcacagtaaatcctttgtattccagactttagggcagagccctgagggagtattattttacataacccgtcctagagtaacattttaggcaacattcttcattgcaagtaaaagatccataagtggcattttacacggctgcgagtattgttatatctaatcctattttaaaagatttttggtaatatgaagcttgaatactggtaacagtgatgcaatatacgcaagctgcacaacctgtatattgtatgcattgctgcgtggaggctgtttatttcaacctttttaaaaattgtgttttttagtaaaatggcttattttttcccaaaggtggaatttagcattttgtaatgatgaatataaaaatacctgtcatccccagatcatttaaaagttaactaaagtgagaatgaaaaaacaaaattccaagacactttttaaaagaatgtctgccctcacacacttttatggatttgtttttcttacatacccatcttttaacttagagatagcattttttgccctctttattttgttgtttgtttctccagagagtaaacgctttgtagttctttctttaaaaaacattttttttaaagaagaagaagccacttgaaccctcaataaaggctgttgcctaagcatggcatacttcatctgttctcatttgtgccatctgccgtgatgtcgtcacttttatggcgttaatttcctgccactacagatcttttgaagattgctggaatactggtgtctgttagaatgcttcagactacagatgtaattaaaggcttttcttaatatgttttaaccaaagatgtggagcaatccaagccacatatcttctacatcaaatttttccattttggttattttcataatctggtattgcattttgccttccctgttcatacctcaaattgattcatacctcagtttaattcagagaggtcagttaagtgacggattctgttgtggtttgaatgcagtaccagtgttctcttcgagcaaagtagacctgggtcactgtaggcataggacttggattgcttcagatggtttgctgtatcatttttcttctttttcttttcctggggacttgtttccattaaatgagagtaattaaaatcgcttgtaaatgagggcatacaagcatttgcaacaaatattcaaatagaggctcacagcggcataagctggactttgtcgccactagatgacaagatgttataactaagttaaaccacatctgtgtatctcaagggacttaattcagctgtctgtagtgaataaaagtgggaaattttcaaaagtttctcctgctggaaataaggtataatttgtattttgcagacaattcagtaaagttactggctttcttagtgatgcagtgtccgtggtgcatttttttaaattaatgttttgctgtttaaatttattcaattttattgtgttttttaaaaagcagcttatgccacaagcacaaatgagctttctcagttttcaactcaaaatattatatgaaaagatggatatgtgtgtctgtgtgggaggggtgtgaattggatgacggttcttagggtattacagaattcagccagtggtggaagtctaaggttcttattgaatggttcaacttctttatcaaagaagttccatgaagatctttgataacctgtttaaatgtacagaatttttcaaaagccactgtgaaaagcagtaccataagttattttttaactaaaatctgtagaaagtgtttccaaaagagttccttttttcttcttcgaagtaatttctaaaagttgaaaacataggcttataaatctgaataaattagtgaattcatacattttagagactatcaaatatatccattattaacattcaataataatctctaaaggggaatgtccttaaaaagattgatagaaagattaatttaaaaactgaaaaggaaaacaagacaccaccagttagccagctggagaacttggacttttgcattagtagtgatatctgctccaaaaagaatgcagttcgaggaaatgttgcatgtggcttcaaaatagcagtgctttctgctttgttctcttgtattcattttcagcaaacatgtattaagcaattattatatgtaactcatgtggtgattccaggatgaatgaagttgtagccctttctcttaggaaacttataaactaataggagataaaaggcattctcagggaagtctacaaagtgctatgagggagccactttggccatcctggggcagagcagaccagaggctcagagcatggacacttcctcatccacccagcagaagcctttcacttgattttgaaggtgggcaggattgagaaaggcccagaaggggatgagttcaaagctgtttgtgggcatgtgacccctgcagtcacatatggccctagcttgtgtttcgtttagtgttctgctatcattatcctgataatatcctgataataaaattatccttaataatttta

SEQ ID NO: 156598 - DNA, 3446 bp, Homo sapiens
  Payload ID: 10701
  Gene Symbol: MEF2C
  Gene Name: myocyte enhancer factor 2C
  ENST ID: ENST00000510942
  CDS Start-End: 370-1671
gcagtcacagacacttgagcacacgcgtacacccagacatcttcgggctgctattggattgactttgaaggttctgtgtgggtcgccgtggctgcatgtttgaatcaggtggagaagcacttcaacgctggacgaagtaaagattattgttgttattttttttttctctctctctctctcttaagaaaggaaaatatcccaaggactaatctgatcgggtcttccttcatgaacgaatgcaggaatttgggaactgagctgtgcaagtgctgaagaaggagatttgtttggaggaaacaggaaagagaaagaaaaggaaggaaaaaatacataatttcagggacgagagagagaagaaaaacggggactatggggagaaaaaagattcagattacgaggattatggatgaacgtaacagacaggtgacatttacaaagaggaaatttgggttgatgaagaaggcttatgagctgagcgtgctgtgtgactgtgagattgcgctgatcatcttcaacagcaccaacaagctgttccagtatgccagcaccgacatggacaaagtgcttctcaagtacacggagtacaacgagccgcatgagagccggacaaactcagacatcgtggagacgttgagaaagaagggccttaatggctgtgacagcccagaccccgatgcggacgattccgtaggtcacagccctgagtctgaggacaagtacaggaaaattaacgaagatattgatctaatgatcagcaggcaaagattgtgtgctgttccacctcccaacttcgagatgccagtctccatcccagtgtccagccacaacagtttggtgtacagcaaccctgtcagctcactgggaaaccccaacctattgccactggctcacccttctctgcagaggaatagtatgtctcctggtgtaacacatcgacctccaagtgcaggtaacacaggtggtctgatgggtggagacctcacgtctggtgcaggcaccagtgcagggaacgggtatggcaatccccgaaactcaccaggtctgctggtctcacctggtaacttgaacaagaatatgcaagcaaaatctcctcccccaatgaatttaggaatgaataaccgtaaaccagatctccgagttcttattccaccaggcagcaagaatacgatgccatcagtgaatcaaaggataaataactcccagtcggctcagtcattggctaccccagtggtttccgtagcaactcctactttaccaggacaaggaatgggaggatatccatcagccatttcaacaacatatggtaccgagtactctctgagtagtgcagacctgtcatctctgtctgggtttaacaccgccagcgctcttcaccttggttcagtaactggctggcaacagcaacacctacataacatgccaccatctgccctcagtcagttgggagaccgtaccaccaccccttcgagatacccacaacacacgcgccacgaggcggggagatctcctgttgacagcttgagcagctgtagcagttcgtacgacgggagcgaccgagaggatcaccggaacgaattccactcccccattggactcaccagaccttcgccggacgaaagggaaagtccctcagtcaagcgcatgcgactttctgaaggatgggcaacatgatcagattattacttactagtttttttttttttcttgcagtgtgtgtgtgtgctataccttaatggggaaggggggtcgatatgcattatatgtgccgtgtgtggaaaaaaaaaaagtcaggtactctgttttgtaaaagtacttttaaattgcctcagtgatacagtataaagataaacagaaatgctgagataagcttagcacttgagttgtacaacagaacacttgtacaaaatagattttaaggctaacttcttttcactgttgtgctcctttgcaaaatgtatgttacaatagatagtgtcatgttgcaggttcaacgttatttacatgtaaatagacaaaaggaaacatttgccaaaagcggcagatctttactgaaagagagagcagctgttatgcaacatatagaaaaatgtatagatgcttggacagacccggtaatgggtggccattggtaaatgttaggaacacaccaggtcacctgacatcccaagaatgctcacaaacctgcaggcatatcattggcgtatggcactcattaaaaaggatcagagaccattaaaagaggaccatacctattaaaaaaaaatgtggagttggagggctaacatatttaattaaataaataaataaatctgggtctgcatctcttattaaataaaaatataaaaatatgtacattacattttgcttattttcatataaaaggtaagacagagtttgcaaagcatttgtggctttttgtagtttacttaagccaaaatgtgtttttttccccttgatagcttcgctaatattttaaacagtcctgtaaaaaaccaaaaaggactttttgtatagaaagcactaccctaagccatgaagaactccatgctttgctaaccaagataactgttttctctttgtagaagttttgtttttgaaatgtgtatttctaattatataaaatattaagaatcttttaaaaaaatctgtgaaattaacatgcttgtgtatagctttctaatatatataatattatggtaatagcagaagttttgttatcttaatagcgggaggggggtatatttgtgcagttgcacatttgagtaactattttctttctgttttcttttactctgcttacattttataagtttaaggtcagctgtcaaaaggataacctgtggggttagaacatatcacattgcaacaccctaaattgtttttaatacattagcaatctattgggtcaactgacatccattgtatatactagtttctttcatgctatttttattttgttttttgcatttttatcaaatgcagggcccctttctgatctcaccatttcaccatgcatcttggaattcagtaagtgcatatcctaacttgcccatattctaaatcatctggttggttttcagcctagaatttgatacgctttttagaaatatgcccagaatagaaaagctatgttggggcacatgtcctgcaaatatggccctagaaacaagtgatatggaatttacttggtgaataagttataaattcccacagaagaaaaatgtgaaagactgggtgctagacaagaaggaagcaggtaaagggatagttgctttgtcatccgtttttaattattttaactgacccttgacaatcttgtcagcaatataggactgttgaacaatcccggtgtgtcaggacccccaaatgtcacttctgcataaagcatgtatgtcatctattttttcttcaataaagagatttaatagccatttcaagaaatccca

SEQ ID NO: 156599 - DNA, 1882 bp, Homo sapiens
  Payload ID: 10701
  Gene Symbol: MEF2C
  Gene Name: myocyte enhancer factor 2C
  Uniprot ID: Q06413
  ENST ID: ENST00000508569
  CDS Start-End: 370-1767
gtcacagacacttgagcacacgcgtacacccagacatcttcgggctgctattggattgactttgaaggttctgtgtgggtcgccgtggctgcatgtttgaatcaggtggagaagcacttcaacgctggacgaagtaaagattattgttgttattttttttttctctctctctctctcttaagaaaggaaaatatcccaaggactaatctgatcgggtcttccttcatcaggaacgaatgcaggaatttgggaactgagctgtgcaagtgctgaagaaggagatttgtttggaggaaacaggaaagagaaagaaaaggaaggaaaaaatacataatttcagggacgagagagagaagaaaaacggggactatggggagaaaaaagattcagattacgaggattatggatgaacgtaacagacaggtgacatttacaaagaggaaatttgggttgatgaagaaggcttatgagctgagcgtgctgtgtgactgtgagattgcgctgatcatcttcaacagcaccaacaagctgttccagtatgccagcaccgacatggacaaagtgcttctcaagtacacggagtacaacgagccgcatgagagccggacaaactcagacatcgtggagacgttgagaaagaagggccttaatggctgtgacagcccagaccccgatgcggacgattccgtaggtcacagccctgagtctgaggacaagtacaggaaaattaacgaagatattgatctaatgatcagcaggcaaagattgtgtgctgttccacctcccaacttcgagatgccagtctccatcccagtgtccagccacaacagtttggtgtacagcaaccctgtcagctcactgggaaaccccaacctattgccactggctcacccttctctgcagaggaatagtatgtctcctggtgtaacacatcgacctccaagtgcaggtaacacaggtggtctgatgggtggagacctcacgtctggtgcaggcaccagtgcagggaacgggtatggcaatccccgaaactcaccaggtctgctggtctcacctggtaacttgaacaagaatatgcaagcaaaatctcctcccccaatgaatttaggaatgaataaccgtaaaccagatctccgagttcttattccaccaggcagcaagaatacgatgccatcagtgaatcaaaggataaataactcccagtcggctcagtcattggctaccccagtggtttccgtagcaactcctactttaccaggacaaggaatgggaggatatccatcagccatttcaacaacatatggtaccgagtactctctgagtagtgcagacctgtcatctctgtctgggtttaacaccgccagcgctcttcaccttggttcagtaactggctggcaacagcaacacctacataacatgccaccatctgccctcagtcagttgggagcttgcactagcactcatttatctcagagttcaaatctctccctgccttctactcaaagcctcaacatcaagtcagaacctgtttctcctcctagagaccgtaccaccaccccttcgagatacccacaacacacgcgccacgaggcggggagatctcctgttgacagcttgagcagctgtagcagttcgtacgacgggagcgaccgagaggatcaccggaacgaattccactcccccattggactcaccagaccttcgccggacgaaagggaaagtccctcagtcaagcgcatgcgactttctgaaggatgggcaacatgatcagattattacttactagtttttttttttttcttgcagtgtgtgtgtgtgctataccttaatggggaaggggggtcgatatgcattatatgtgccgtgtgtggaaaaaaaaaaa

SEQ ID NO: 156600 - DNA, 854 bp, Homo sapiens
  Payload ID: 10701
  Gene Symbol: MEF2C
  Gene Name: myocyte enhancer factor 2C
  ENST ID: ENST00000506716
  CDS Start-End: 174-854
atgaattagctgccctacttagcatacacagcaggaacgaatgcaggaatttgggaactgagctgtgcaagtgctgaagaaggagatttgtttggaggaaacaggaaagagaaagaaaaggaaggaaaaaatacataatttcagggacgagagagagaagaaaaacggggactatggggagaaaaaagattcagattacgaggattatggatgaacgtaacagacaggtgacatttacaaagaggaaatttgggttgatgaagaaggcttatgagctgagcgtgctgtgtgactgtgagattgcgctgatcatcttcaacagcaccaacaagctgttccagtatgccagcaccgacatggacaaagtgcttctcaagtacacggagtacaacgagccgcatgagagccggacaaactcagacatcgtggaggcattgaacaagaaagaaaacaaaggctgtgaaagccccgatcccgactcctcttatgcactcaccccacgcactgaagaaaaatacaaaaaaattaatgaagaatttgataatatgatcaagagtcataaaattcctgctgttccacctcccaacttcgagatgccagtctccatcccagtgtccagccacaacagtttggtgtacagcaaccctgtcagctcactgggaaaccccaacctattgccactggctcacccttctctgcagaggaatagtatgtctcctggtgtaacacatcgacctccaagtgcaggtaacacaggtggtctgatgggtggagacctcacgtctggtgcaggcaccagtgcagggaacgggtatggcaatccccgaaactcaccaggtctgctggtctcacct

SEQ ID NO: 156601 - DNA, 1063 bp, Homo sapiens
  Payload ID: 10701
  Gene Symbol: MEF2C
  Gene Name: myocyte enhancer factor 2C
  ENST ID: ENST00000513252
  CDS Start-End: 336-1063
catcttcgggctgctattggattgactttgaaggttctgtgtgggtcgccgtggctgcatgtttgaatcaggtggagaagcacttcaacgctggacgaagtaaagattattgttgttattttttttttctctctctctctctcttaagaaaggaaaatatcccaaggactaatctgatcgggtcttccttcatcaggaacgaatgcaggaatttgggaactgagctgtgcaagtgctgaagaaggagatttgtttggaggaaacaggaaagagaaagaaaaggaaggaaaaaatacataatttcagggacgagagagagaagaaaaacggggactatggggagaaaaaagattcagattacgaggattatggatgaacgtaacagacaggtgacatttacaaagaggaaatttgggttgatgaagaaggcttatgagctgagcgtgctgtgtgactgtgagattgcgctgatcatcttcaacagcaccaacaagctgttccagtatgccagcaccgacatggacaaagtgcttctcaagtacacggagtacaacgagccgcatgagagccggacaaactcagacatcgtggaggcattgaacaagaaagaaaacaaaggctgtgaaagccccgatcccgactcctcttatgcactcaccccacgcactgaagaaaaatacaaaaaaattaatgaagaatttgataatatgatcaagagtcataaaattcctgctgttccacctcccaacttcgagatgccagtctccatcccagtgtccagccacaacagtttggtgtacagcaaccctgtcagctcactgggaaaccccaacctattgccactggctcacccttctctgcagaggaatagtatgtctcctggtgtaacacatcgacctccaagtgcaggtaacacaggtggtctgatgggtggagacctcacgtctggtgcaggcaccagtgcagggaacgggtatggcaatccccgaaactcaccaggtctgctggtctcacctggtaacttgaacaagaatatgcaagcaaaatctcctcccccaatgaa

SEQ ID NO: 156602 - DNA, 623 bp, Homo sapiens
  Payload ID: 10701
  Gene Symbol: MEF2C
  Gene Name: myocyte enhancer factor 2C
  ENST ID: ENST00000507984
  CDS Start-End: 263-623
ctttagcatctgtccagaagaaattcttctcgacttgggtctcaaaccactttgccttcatctgcctgcttatgccaaactcaaaatgagcagaagcctgccataatgaagttcccctttttagaacgaatgcaggaatttgggaactgagctgtgcaagtgctgaagaaggagatttgtttggaggaaacaggaaagagaaagaaaaggaaggaaaaaatacataatttcagggacgagagagagaagaaaaacggggactatggggagaaaaaagattcagattacgaggattatggatgaacgtaacagacaggtgacatttacaaagaggaaatttgggttgatgaagaaggcttatgagctgagcgtgctgtgtgactgtgagattgcgctgatcatcttcaacagcaccaacaagctgttccagtatgccagcaccgacatggacaaagtgcttctcaagtacacggagtacaacgagccgcatgagagccggacaaactcagacatcgtggaggcattgaacaagaaagaaaacaaaggctgtgaaagccccgatcccgactcctcttatgcactcaccccacgcactgaagaaaaatacaaaaaaattaatgaag

SEQ ID NO: 156603 - DNA, 2772 bp, Homo sapiens
  Payload ID: 10701
  Gene Symbol: MEF2C
  Gene Name: myocyte enhancer factor 2C
  Uniprot ID: Q06413
  ENST ID: ENST00000514015
  CDS Start-End: 413-1738
acacgcacacatcgtctccagctctctgctcgctctgctcgcagtcacagacacttgagcacacgcgtacacccagacatcttcgggctgctattggattgactttgaaggttctgtgtgggtcgccgtggctgcatgtttgaatcaggtggagaagcacttcaacgctggacgaagtaaagattattgttgttattttttttttctctctctctctctcttaagaaaggaaaatatcccaaggactaatctgatcgggtcttccttcatcaggaacgaatgcaggaatttgggaactgagctgtgcaagtgctgaagaaggagatttgtttggaggaaacaggaaagagaaagaaaaggaaggaaaaaatacataatttcagggacgagagagagaagaaaaacggggactatggggagaaaaaagattcagattacgaggattatggatgaacgtaacagacaggtgacatttacaaagaggaaatttgggttgatgaagaaggcttatgagctgagcgtgctgtgtgactgtgagattgcgctgatcatcttcaacagcaccaacaagctgttccagtatgccagcaccgacatggacaaagtgcttctcaagtacacggagtacaacgagccgcatgagagccggacaaactcagacatcgtggagacgttgagaaagaagggccttaatggctgtgacagcccagaccccgatgcggacgattccgtaggtcacagccctgagtctgaggacaagtacaggaaaattaacgaagatattgatctaatgatcagcaggcaaagattgtgtgctgttccacctcccaacttcgagatgccagtctccatcccagtgtccagccacaacagtttggtgtacagcaaccctgtcagctcactgggaaaccccaacctattgccactggctcacccttctctgcagaggaatagtatgtctcctggtgtaacacatcgacctccaagtgcaggtaacacaggtggtctgatgggtggagacctcacgtctggtgcaggcaccagtgcagggaacgggtatggcaatccccgaaactcaccaggtctgctggtctcacctggtaacttgaacaagaatatgcaagcaaaatctcctcccccaatgaatttaggaatgaataaccgtaaaccagatctccgagttcttattccaccaggcagcaagaatacgatgccatcagtgtctgaggatgtcgacctgcttttgaatcaaaggataaataactcccagtcggctcagtcattggctaccccagtggtttccgtagcaactcctactttaccaggacaaggaatgggaggatatccatcagccatttcaacaacatatggtaccgagtactctctgagtagtgcagacctgtcatctctgtctgggtttaacaccgccagcgctcttcaccttggttcagtaactggctggcaacagcaacacctacataacatgccaccatctgccctcagtcagttgggagaccgtaccaccaccccttcgagatacccacaacacacgcgccacgaggcggggagatctcctgttgacagcttgagcagctgtagcagttcgtacgacgggagcgaccgagaggatcaccggaacgaattccactcccccattggactcaccagaccttcgccggacgaaagggaaagtccctcagtcaagcgcatgcgactttctgaaggatgggcaacatgatcagattattacttactagtttttttttttttcttgcagtgtgtgtgtgtgctataccttaatggggaaggggggtcgatatgcattatatgtgccgtgtgtggaaaaaaaaaaagtcaggtactctgttttgtaaaagtacttttaaattgcctcagtgatacagtataaagataaacagaaatgctgagataagcttagcacttgagttgtacaacagaacacttgtacaaaatagattttaaggctaacttcttttcactgttgtgctcctttgcaaaatgtatgttacaatagatagtgtcatgttgcaggttcaacgttatttacatgtaaatagacaaaaggaaacatttgccaaaagcggcagatctttactgaaagagagagcagctgttatgcaacatatagaaaaatgtatagatgcttggacagacccggtaatgggtggccattggtaaatgttaggaacacaccaggtcacctgacatcccaagaatgctcacaaacctgcaggcatatcattggcgtatggcactcattaaaaaggatcagagaccattaaaagaggaccatacctattaaaaaaaaatgtggagttggagggctaacatatttaattaaataaataaataaatctgggtctgcatctcttattaaataaaaatataaaaatatgtacattacattttgcttattttcatataaaaggtaagacagagtttgcaaagcatttgtggctttttgtagtttacttaagccaaaatgtgtttttttccccttgatagcttcgctaatattttaaacagtcctgtaaaaaaccaaaaaggactttttgtatagaaagcactaccctaagccatgaagaactccatgctttgctaaccaagataactgttttctctttgtagaagttttgtttttgaaatgtgtatttctaattatataaaatattaagaatcttttaaaaaaatctgtgaaattaacatgcttgtgtatagctttctaatatatataatattatggtaatagca

SEQ ID NO: 156604 - DNA, 3469 bp, Homo sapiens
  Payload ID: 10701
  Gene Symbol: MEF2C
  Gene Name: myocyte enhancer factor 2C
  ENST ID: ENST00000506554
  CDS Start-End: 361-1560
acttgagcacacgcgtacacccagacatcttcgggctgctattggattgactttgaaggttctgtgtgggtcgccgtggctgcatgtttgaatcaggtggagaagcacttcaacgctggacgaagtaaagattattgttgttattttttttttctctctctctctctcttaagaaaggaaaatatcccaaggactaatctgatcgggtcttccttcatcaggaacgaatgcaggaatttgggaactgagctgtgcaagtgctgaagaaggagatttgtttggaggaaacaggaaagagaaagaaaaggaaggaaaaaatacataatttcagggacgagagagagaagaaaaacggggactatggggagaaaaaagattcagattacgaggattatggatgaacgtaacagacaggtgacatttacaaagaggaaatttgggttgatgaagaaggcttatgagctgagcgtgctgtgtgactgtgagattgcgctgatcatcttcaacagcaccaacaagctgttccagtatgccagcaccgacatggacaaagtgcttctcaagtacacggagtacaacgagccgcatgagagccggacaaactcagacatcgtggagacgttgagaaagaagggccttaatggctgtgacagcccagaccccgatgcggacgattccgtaggtcacagccctgagtctgaggacaagtacaggaaaattaacgaagatattgatctaatgatcagcaggcaaagattgtgtgctgttccacctcccaacttcgagatgccagtctccatcccagtgtccagccacaacagtttggtgtacagcaaccctgtcagctcactgggaaaccccaacctattgccactggctcacccttctctgcagaggaatagtatgtctcctggtgtaacacatcgacctccaagtgcaggtaacacaggtggtctgatgggtggagacctcacgtctggtgcaggcaccagtgcagggaacgggtatggcaatccccgaaactcaccaggtctgctggtctcacctggtaacttgaacaagaatatgcaagcaaaatctcctcccccaatgaatttaggaatgaataaccgtaaaccagatctccgagttcttattccaccaggcagcaagaatacgatgccatcagtgtctgaggatgtcgacctgcttttgaatcaaaggataaataactcccagtcggctcagtcattggctaccccagtggtttccgtagcaactcctactttaccaggacaaggaatgggaggatatccatcagccatttcaacaacatatggtaccgagtactctctgagtagtgcagacctgtcatctctgtctgggtttaacaccgccagcgctcttcaccttggttcagtaactggctggcaacagcaacacctacataacatgccaccatctgccctcagtcagttgggtcagaacctgtttctcctcctagagaccgtaccaccaccccttcgagatacccacaacacacgcgccacgaggcggggagatctcctgttgacagcttgagcagctgtagcagttcgtacgacgggagcgaccgagaggatcaccggaacgaattccactcccccattggactcaccagaccttcgccggacgaaagggaaagtccctcagtcaagcgcatgcgactttctgaaggatgggcaacatgatcagattattacttactagtttttttttttttcttgcagtgtgtgtgtgtgctataccttaatggggaaggggggtcgatatgcattatatgtgccgtgtgtggaaaaaaaaaaagtcaggtactctgttttgtaaaagtacttttaaattgcctcagtgatacagtataaagataaacagaaatgctgagataagcttagcacttgagttgtacaacagaacacttgtacaaaatagattttaaggctaacttcttttcactgttgtgctcctttgcaaaatgtatgttacaatagatagtgtcatgttgcaggttcaacgttatttacatgtaaatagacaaaaggaaacatttgccaaaagcggcagatctttactgaaagagagagcagctgttatgcaacatatagaaaaatgtatagatgcttggacagacccggtaatgggtggccattggtaaatgttaggaacacaccaggtcacctgacatcccaagaatgctcacaaacctgcaggcatatcattggcgtatggcactcattaaaaaggatcagagaccattaaaagaggaccatacctattaaaaaaaaatgtggagttggagggctaacatatttaattaaataaataaataaatctgggtctgcatctcttattaaataaaaatataaaaatatgtacattacattttgcttattttcatataaaaggtaagacagagtttgcaaagcatttgtggctttttgtagtttacttaagccaaaatgtgtttttttccccttgatagcttcgctaatattttaaacagtcctgtaaaaaaccaaaaaggactttttgtatagaaagcactaccctaagccatgaagaactccatgctttgctaaccaagataactgttttctctttgtagaagttttgtttttgaaatgtgtatttctaattatataaaatattaagaatcttttaaaaaaatctgtgaaattaacatgcttgtgtatagctttctaatatatataatattatggtaatagcagaagttttgttatcttaatagcgggaggggggtatatttgtgcagttgcacatttgagtaactattttctttctgttttcttttactctgcttacattttataagtttaaggtcagctgtcaaaaggataacctgtggggttagaacatatcacattgcaacaccctaaattgtttttaatacattagcaatctattgggtcaactgacatccattgtatatactagtttctttcatgctatttttattttgttttttgcatttttatcaaatgcagggcccctttctgatctcaccatttcaccatgcatcttggaattcagtaagtgcatatcctaacttgcccatattctaaatcatctggttggttttcagcctagaatttgatacgctttttagaaatatgcccagaatagaaaagctatgttggggcacatgtcctgcaaatatggccctagaaacaagtgatatggaatttacttggtgaataagttataaattcccacagaagaaaaatgtgaaagactgggtgctagacaagaaggaagcaggtaaagggatagttgctttgtcatccgtttttaattattttaactgacccttgacaatcttgtcagcaatataggactgttgaacaatcccggtgtgtcaggacccccaaatgtcacttctgcataaagcatgtatgtcatctattttttcttcaataaagagatttaatagcca

SEQ ID NO: 156605 - DNA, 557 bp, Homo sapiens
  Payload ID: 10701
  Gene Symbol: MEF2C
  Gene Name: myocyte enhancer factor 2C
  ENST ID: ENST00000508610
  CDS Start-End: 180-557
acatttcttcccttggagaattgaagcaaatatgcagtacgaacgaatgcaggaatttgggaactgagctgtgcaagtgctgaagaaggagatttgtttggaggaaacaggaaagagaaagaaaaggaaggaaaaaatacataatttcagggacgagagagagaagaaaaacggggactatggggagaaaaaagattcagattacgaggattatggatgaacgtaacagacaggtgacatttacaaagaggaaatttgggttgatgaagaaggcttatgagctgagcgtgctgtgtgactgtgagattgcgctgatcatcttcaacagcaccaacaagctgttccagtatgccagcaccgacatggacaaagtgcttctcaagtacacggagtacaacgagccgcatgagagccggacaaactcagacatcgtggagacgttgagaaagaagggccttaatggctgtgacagcccagaccccgatgcggacgattccgtaggtcacagccctgagtctgaggacaagtacaggaaaattaacgaagatattgatcta

SEQ ID NO: 156606 - DNA, 773 bp, Homo sapiens
  Payload ID: 10701
  Gene Symbol: MEF2C
  Gene Name: myocyte enhancer factor 2C
  ENST ID: ENST00000503075
  CDS Start-End: 512-773
cacacacgcacacatcgtctccagctctctgctcgctctgctcgcagtcacagacacttgagcacacgcgtacacccagacatcttcgggctgctattggattgactttgaaggttctgtgtgggtcgccgtggctgcatgtttgaatcaggtggagaagcacttcaacgctggacgaagtaaagattattgttgttattttttttttctctctctctctctcttaagaaaggaaaatatcccaaggactaatctgatcgggtcttccttcatacttcttaggaaaggcagcattttacttcattcattaattgcaccatttacgtcctgattgctgtgcatgtggaatatattgaaagataatattaaagtgaacgaatgcaggaatttgggaactgagctgtgcaagtgctgaagaaggagatttgtttggaggaaacaggaaagagaaagaaaaggaaggaaaaaatacataatttcagggacgagagagagaagaaaaacggggactatggggagaaaaaagattcagattacgaggattatggatgaacgtaacagacaggtgacatttacaaagaggaaatttgggttgatgaagaaggcttatgagctgagcgtgctgtgtgactgtgagattgcgctgatcatcttcaacagcaccaacaagctgttccagtatgccagcaccgacatggacaaagtgcttctcaagtacacggagtacaacgagccgcatgagagccggacaaactcagacatcgtggagacgt

SEQ ID NO: 156607 - DNA, 3393 bp, Homo sapiens
  Payload ID: 10701
  Gene Symbol: MEF2C
  Gene Name: myocyte enhancer factor 2C
  Uniprot ID: Q06413
  ENST ID: ENST00000514028
  CDS Start-End: 289-1614
gctaaatgaaaggaaaggaaattgtcctatatgcatttgctgtggattcatggattggctttctgtgatagagaaagcttgtttgtatctttggggtcttaaacgtgcatgggaaataccattctaacacactgcttgcttctaagcaggaacgaatgcaggaatttgggaactgagctgtgcaagtgctgaagaaggagatttgtttggaggaaacaggaaagagaaagaaaaggaaggaaaaaatacataatttcagggacgagagagagaagaaaaacggggactatggggagaaaaaagattcagattacgaggattatggatgaacgtaacagacaggtgacatttacaaagaggaaatttgggttgatgaagaaggcttatgagctgagcgtgctgtgtgactgtgagattgcgctgatcatcttcaacagcaccaacaagctgttccagtatgccagcaccgacatggacaaagtgcttctcaagtacacggagtacaacgagccgcatgagagccggacaaactcagacatcgtggagacgttgagaaagaagggccttaatggctgtgacagcccagaccccgatgcggacgattccgtaggtcacagccctgagtctgaggacaagtacaggaaaattaacgaagatattgatctaatgatcagcaggcaaagattgtgtgctgttccacctcccaacttcgagatgccagtctccatcccagtgtccagccacaacagtttggtgtacagcaaccctgtcagctcactgggaaaccccaacctattgccactggctcacccttctctgcagaggaatagtatgtctcctggtgtaacacatcgacctccaagtgcaggtaacacaggtggtctgatgggtggagacctcacgtctggtgcaggcaccagtgcagggaacgggtatggcaatccccgaaactcaccaggtctgctggtctcacctggtaacttgaacaagaatatgcaagcaaaatctcctcccccaatgaatttaggaatgaataaccgtaaaccagatctccgagttcttattccaccaggcagcaagaatacgatgccatcagtgtctgaggatgtcgacctgcttttgaatcaaaggataaataactcccagtcggctcagtcattggctaccccagtggtttccgtagcaactcctactttaccaggacaaggaatgggaggatatccatcagccatttcaacaacatatggtaccgagtactctctgagtagtgcagacctgtcatctctgtctgggtttaacaccgccagcgctcttcaccttggttcagtaactggctggcaacagcaacacctacataacatgccaccatctgccctcagtcagttgggagaccgtaccaccaccccttcgagatacccacaacacacgcgccacgaggcggggagatctcctgttgacagcttgagcagctgtagcagttcgtacgacgggagcgaccgagaggatcaccggaacgaattccactcccccattggactcaccagaccttcgccggacgaaagggaaagtccctcagtcaagcgcatgcgactttctgaaggatgggcaacatgatcagattattacttactagtttttttttttttcttgcagtgtgtgtgtgtgctataccttaatggggaaggggggtcgatatgcattatatgtgccgtgtgtggaaaaaaaaaaagtcaggtactctgttttgtaaaagtacttttaaattgcctcagtgatacagtataaagataaacagaaatgctgagataagcttagcacttgagttgtacaacagaacacttgtacaaaatagattttaaggctaacttcttttcactgttgtgctcctttgcaaaatgtatgttacaatagatagtgtcatgttgcaggttcaacgttatttacatgtaaatagacaaaaggaaacatttgccaaaagcggcagatctttactgaaagagagagcagctgttatgcaacatatagaaaaatgtatagatgcttggacagacccggtaatgggtggccattggtaaatgttaggaacacaccaggtcacctgacatcccaagaatgctcacaaacctgcaggcatatcattggcgtatggcactcattaaaaaggatcagagaccattaaaagaggaccatacctattaaaaaaaaatgtggagttggagggctaacatatttaattaaataaataaataaatctgggtctgcatctcttattaaataaaaatataaaaatatgtacattacattttgcttattttcatataaaaggtaagacagagtttgcaaagcatttgtggctttttgtagtttacttaagccaaaatgtgtttttttccccttgatagcttcgctaatattttaaacagtcctgtaaaaaaccaaaaaggactttttgtatagaaagcactaccctaagccatgaagaactccatgctttgctaaccaagataactgttttctctttgtagaagttttgtttttgaaatgtgtatttctaattatataaaatattaagaatcttttaaaaaaatctgtgaaattaacatgcttgtgtatagctttctaatatatataatattatggtaatagcagaagttttgttatcttaatagcgggaggggggtatatttgtgcagttgcacatttgagtaactattttctttctgttttcttttactctgcttacattttataagtttaaggtcagctgtcaaaaggataacctgtggggttagaacatatcacattgcaacaccctaaattgtttttaatacattagcaatctattgggtcaactgacatccattgtatatactagtttctttcatgctatttttattttgttttttgcatttttatcaaatgcagggcccctttctgatctcaccatttcaccatgcatcttggaattcagtaagtgcatatcctaacttgcccatattctaaatcatctggttggttttcagcctagaatttgatacgctttttagaaatatgcccagaatagaaaagctatgttggggcacatgtcctgcaaatatggccctagaaacaagtgatatggaatttacttggtgaataagttataaattcccacagaagaaaaatgtgaaagactgggtgctagacaagaaggaagcaggtaaagggatagttgctttgtcatccgtttttaattattttaactgacccttgacaatcttgtcagcaatataggactgttgaacaatcccggtgtgtcaggacccccaaatgtcacttctgcataaagcatgtatgtcatctattttttcttcaataaagagatttaatagccatttcaagaaatcccataaa

SEQ ID NO: 156608 - DNA, 609 bp, Homo sapiens
  Payload ID: 10701
  Gene Symbol: MEF2C
  Gene Name: myocyte enhancer factor 2C
  ENST ID: ENST00000502983
  CDS Start-End: 223-609
gaagctgcttcctcggtaaatatttccaaactgattagaaagttcatggccccgcgatgaagtcgagatctcaaatactgcaggaacgaatgcaggaatttgggaactgagctgtgcaagtgctgaagaaggagatttgtttggaggaaacaggaaagagaaagaaaaggaaggaaaaaatacataatttcagggacgagagagagaagaaaaacggggactatggggagaaaaaagattcagattacgaggattatggatgaacgtaacagacaggtgacatttacaaagaggaaatttgggttgatgaagaaggcttatgagctgagcgtgctgtgtgactgtgagattgcgctgatcatcttcaacagcaccaacaagctgttccagtatgccagcaccgacatggacaaagtgcttctcaagtacacggagtacaacgagccgcatgagagccggacaaactcagacatcgtggagacgttgagaaagaagggccttaatggctgtgacagcccagaccccgatgcggacgattccgtaggtcacagccctgagtctgaggacaagtacaggaaaattaacgaagatattgatctaatgatcagc

SEQ ID NO: 156609 - DNA, 851 bp, Homo sapiens
  Payload ID: 10701
  Gene Symbol: MEF2C
  Gene Name: myocyte enhancer factor 2C
  ENST ID: ENST00000502831
  CDS Start-End: 268-851
aaattgtcctatatgcatttgctgtggattcatggattggctttctgtgatagagaaagcttgtttgtatctttggggtcttaaacgtgcatgggaaataccattctaacacactgcttgcttctaaggaacgaatgcaggaatttgggaactgagctgtgcaagtgctgaagaaggagatttgtttggaggaaacaggaaagagaaagaaaaggaaggaaaaaatacataatttcagggacgagagagagaagaaaaacggggactatggggagaaaaaagattcagattacgaggattatggatgaacgtaacagacaggtgacatttacaaagaggaaatttgggttgatgaagaaggcttatgagctgagcgtgctgtgtgactgtgagattgcgctgatcatcttcaacagcaccaacaagctgttccagtatgccagcaccgacatggacaaagtgcttctcaagtacacggagtacaacgagccgcatgagagccggacaaactcagacatcgtggagacgttgagaaagaagggccttaatggctgtgacagcccagaccccgatgcggacgattccgtaggtcacagccctgagtctgaggacaagtacaggaaaattaacgaagatattgatctaatgatcagcaggcaaagattgtgtgctgttccacctcccaacttcgagatgccagtctccatcccagtgtccagccacaacagtttggtgtacagcaaccctgtcagctcactgggaaaccccaacctattgccactggctcacccttctctgcagaggaatagtatgtctcctggtgtaacacatcgacctccaagtgcaggtaa

SEQ ID NO: 156610 - DNA, 573 bp, Homo sapiens
  Payload ID: 10701
  Gene Symbol: MEF2C
  Gene Name: myocyte enhancer factor 2C
  ENST ID: ENST00000509373
  CDS Start-End: 488-573
aatttttcataacgggtgaaattgtcacctaatttcattaaaaagattaggaaactttttacaaaaaaaaatacatttcaagtgttagtctttaaaaaagcatagtttgcatcatttaaatgacttgttaaattacttatgagatcattttaattgttaaaaaataaaactacttgatctgctcctgtctgtgatataccatatatttttaacaaaaaagttatttttattcattttattgctttagctccatatagtttatttccttgataaaattagaatatgatagttcttatgaaactgacttgctgttagagtggtatttaatttttcttttttgttcagcaggaacgaatgcaggaatttgggaactgagctgtgcaagtgctgaagaaggagatttgtttggaggaaacaggaaagagaaagaaaaggaaggaaaaaatacataatttcagggacgagagagagaagaaaaacggggactatggggagaaaaaagattcagattacgaggattatggatgaacgtaacagacaggtgacatttacaaagaggaaatttgggttgat

SEQ ID NO: 156611 - DNA, 914 bp, Homo sapiens
  Payload ID: 10701
  Gene Symbol: MEF2C
  Gene Name: myocyte enhancer factor 2C
  ENST ID: ENST00000631026
  CDS Start-End: 300-914
gtttgtaaatgagatagcccagtgggagaatgatctttagcatctgtccagaagaaattcttctcgacttgggtctcaaaccactttgccttcatctgcctgcttatgccaaactcaaaatgagcagaagcctgccataatgaagttcccctttttacaggaacgaatgcaggaatttgggaactgagctgtgcaagtgctgaagaaggagatttgtttggaggaaacaggaaagagaaagaaaaggaaggaaaaaatacataatttcagggacgagagagagaagaaaaacggggactatggggagaaaaaagattcagattacgaggattatggatgaacgtaacagacaggtgacatttacaaagaggaaatttgggttgatgaagaaggcttatgagctgagcgtgctgtgtgactgtgagattgcgctgatcatcttcaacagcaccaacaagctgttccagtatgccagcaccgacatggacaaagtgcttctcaagtacacggagtacaacgagccgcatgagagccggacaaactcagacatcgtggaggcattgaacaagaaagaaaacaaaggctgtgaaagccccgatcccgactcctcttatgcactcaccccacgcactgaagaaaaatacaaaaaaattaatgaagaatttgataatatgatcaagagtcataaaattcctgctgttccacctcccaacttcgagatgccagtctccatcccagtgtccagccacaacagtttggtgtacagcaaccctgtcagctcactgggaaaccccaacctattgccactggctcacccttctctgcagaggaatagtatgtctcctggtgtaacacatcgacctccaagtgcaggtaacacaggtggtctgatgggtggagacctcacgtctggt

SEQ ID NO: 156612 - DNA, 2393 bp, Homo sapiens
  Payload ID: 10701
  Gene Symbol: MEF2C
  Gene Name: myocyte enhancer factor 2C
  ENST ID: ENST00000627659
  CDS Start-End: 419-1714
aaagcctcggtcttcatagaaaaggagaggaggcaaacgcagcccaaactggggggtttctcttcaaagccagctggtctggctttattctgcaggaatttttttacctgtcagggtttggacaacaaagccctcagcaggtgctgacgggtacaacttcctggagaagcagaaaggcactggtgccaaagaagagttgcaaactgtgaagtaacttctatgaagagatgaagtaaagaacggaaggcaaatgattgtggcagtaaagaagtgtatgtggaacgaatgcaggaatttgggaactgagctgtgcaagtgctgaagaaggagatttgtttggaggaaacaggaaagagaaagaaaaggaaggaaaaaatacataatttcagggacgagagagagaagaaaaacggggactatggggagaaaaaagattcagattacgaggattatggatgaacgtaacagacaggtgacatttacaaagaggaaatttgggttgatgaagaaggcttatgagctgagcgtgctgtgtgactgtgagattgcgctgatcatcttcaacagcaccaacaagctgttccagtatgccagcaccgacatggacaaagtgcttctcaagtacacggagtacaacgagccgcatgagagccggacaaactcagacatcgtggaggcattgaacaagaaagaaaacaaaggctgtgaaagccccgatcccgactcctcttatgcactcaccccacgcactgaagaaaaatacaaaaaaattaatgaagaatttgataatatgatcaagagtcataaaattcctgctgttccacctcccaacttcgagatgccagtctccatcccagtgtccagccacaacagtttggtgtacagcaaccctgtcagctcactgggaaaccccaacctattgccactggctcacccttctctgcagaggaatagtatgtctcctggtgtaacacatcgacctccaagtgcaggtaacacaggtggtctgatgggtggagacctcacgtctggtgcaggcaccagtgcagggaacgggtatggcaatccccgaaactcaccaggtctgctggtctcacctggtaacttgaacaagaatatgcaagcaaaatctcctcccccaatgaatttaggaatgaataaccgtaaaccagatctccgagttcttattccaccaggcagcaagaatacgatgccatcagtgaatcaaaggataaataactcccagtcggctcagtcattggctaccccagtggtttccgtagcaactcctactttaccaggacaaggaatgggaggatatccatcagccatttcaacaacatatggtaccgagtactctctgagtagtgcagacctgtcatctctgtctgggtttaacaccgccagcgctcttcaccttggttcagtaactggctggcaacagcaacacctacataacatgccaccatctgccctcagtcagttgggagaccgtaccaccaccccttcgagatacccacaacacacgcgccacgaggcggggagatctcctgttgacagcttgagcagctgtagcagttcgtacgacgggagcgaccgagaggatcaccggaacgaattccactcccccattggactcaccagaccttcgccggacgaaagggaaagtccctcagtcaagcgcatgcgactttctgaaggatgggcaacatgatcagattattacttactagtttttttttttttcttgcagtgtgtgtgtgtgctataccttaatggggaaggggggtcgatatgcattatatgtgccgtgtgtggaaaaaaaaaaagtcaggtactctgttttgtaaaagtacttttaaattgcctcagtgatacagtataaagataaacagaaatgctgagataagcttagcacttgagttgtacaacagaacacttgtacaaaatagattttaaggctaacttcttttcactgttgtgctcctttgcaaaatgtatgttacaatagatagtgtcatgttgcaggttcaacgttatttacatgtaaatagacaaaaggaaacatttgccaaaagcggcagatctttactgaaagagagagcagctgttatgcaacatatagaaaaatgtatagatgcttggacagacccggtaatgggtggccattggtaaatgttaggaacacaccaggtcacctgacatcccaagaatgctcacaaacctgcaggcatatcattggcgtatggcactcattaaaaaggatcagagaccattaaaagaggaccatacctattaaaaaaaaatgtggagttggagggctaacatatttaattaaataaataaataaatctgggtctgcatctcttattaaataaaaatataaaaatatg

SEQ ID NO: 156613 - DNA, 2851 bp, Homo sapiens
  Payload ID: 10701
  Gene Symbol: MEF2C
  Gene Name: myocyte enhancer factor 2C
  Uniprot ID: Q06413
  ENST ID: ENST00000629612
  CDS Start-End: 427-1824
aagggggcaaagcctcggtcttcatagaaaaggagaggaggcaaacgcagcccaaactggggggtttctcttcaaagccagctggtctggctttattctgcaggaatttttttacctgtcagggtttggacaacaaagccctcagcaggtgctgacgggtacaacttcctggagaagcagaaaggcactggtgccaaagaagagttgcaaactgtgaagtaacttctatgaagagatgaagtaaagaacggaaggcaaatgattgtggcagtaaagaagtgtatgtggaacgaatgcaggaatttgggaactgagctgtgcaagtgctgaagaaggagatttgtttggaggaaacaggaaagagaaagaaaaggaaggaaaaaatacataatttcagggacgagagagagaagaaaaacggggactatggggagaaaaaagattcagattacgaggattatggatgaacgtaacagacaggtgacatttacaaagaggaaatttgggttgatgaagaaggcttatgagctgagcgtgctgtgtgactgtgagattgcgctgatcatcttcaacagcaccaacaagctgttccagtatgccagcaccgacatggacaaagtgcttctcaagtacacggagtacaacgagccgcatgagagccggacaaactcagacatcgtggagacgttgagaaagaagggccttaatggctgtgacagcccagaccccgatgcggacgattccgtaggtcacagccctgagtctgaggacaagtacaggaaaattaacgaagatattgatctaatgatcagcaggcaaagattgtgtgctgttccacctcccaacttcgagatgccagtctccatcccagtgtccagccacaacagtttggtgtacagcaaccctgtcagctcactgggaaaccccaacctattgccactggctcacccttctctgcagaggaatagtatgtctcctggtgtaacacatcgacctccaagtgcaggtaacacaggtggtctgatgggtggagacctcacgtctggtgcaggcaccagtgcagggaacgggtatggcaatccccgaaactcaccaggtctgctggtctcacctggtaacttgaacaagaatatgcaagcaaaatctcctcccccaatgaatttaggaatgaataaccgtaaaccagatctccgagttcttattccaccaggcagcaagaatacgatgccatcagtgaatcaaaggataaataactcccagtcggctcagtcattggctaccccagtggtttccgtagcaactcctactttaccaggacaaggaatgggaggatatccatcagccatttcaacaacatatggtaccgagtactctctgagtagtgcagacctgtcatctctgtctgggtttaacaccgccagcgctcttcaccttggttcagtaactggctggcaacagcaacacctacataacatgccaccatctgccctcagtcagttgggagcttgcactagcactcatttatctcagagttcaaatctctccctgccttctactcaaagcctcaacatcaagtcagaacctgtttctcctcctagagaccgtaccaccaccccttcgagatacccacaacacacgcgccacgaggcggggagatctcctgttgacagcttgagcagctgtagcagttcgtacgacgggagcgaccgagaggatcaccggaacgaattccactcccccattggactcaccagaccttcgccggacgaaagggaaagtccctcagtcaagcgcatgcgactttctgaaggatgggcaacatgatcagattattacttactagtttttttttttttcttgcagtgtgtgtgtgtgctataccttaatggggaaggggggtcgatatgcattatatgtgccgtgtgtggaaaaaaaaaaagtcaggtactctgttttgtaaaagtacttttaaattgcctcagtgatacagtataaagataaacagaaatgctgagataagcttagcacttgagttgtacaacagaacacttgtacaaaatagattttaaggctaacttcttttcactgttgtgctcctttgcaaaatgtatgttacaatagatagtgtcatgttgcaggttcaacgttatttacatgtaaatagacaaaaggaaacatttgccaaaagcggcagatctttactgaaagagagagcagctgttatgcaacatatagaaaaatgtatagatgcttggacagacccggtaatgggtggccattggtaaatgttaggaacacaccaggtcacctgacatcccaagaatgctcacaaacctgcaggcatatcattggcgtatggcactcattaaaaaggatcagagaccattaaaagaggaccatacctattaaaaaaaaatgtggagttggagggctaacatatttaattaaataaataaataaatctgggtctgcatctcttattaaataaaaatataaaaatatgtacattacattttgcttattttcatataaaaggtaagacagagtttgcaaagcatttgtggctttttgtagtttacttaagccaaaatgtgtttttttccccttgatagcttcgctaatattttaaacagtcctgtaaaaaaccaaaaaggactttttgtatagaaagcactaccctaagccatgaagaactccatgctttgctaaccaagataactgttttctctttgtagaagttttgtttttgaaatgtgtatttctaattatataaaatattaagaatcttttaaaaaaatctgtgaaattaacatgcttgtgtatagctttctaatatatataatattatggt

SEQ ID NO: 156614 - DNA, 815 bp, Homo sapiens
  Payload ID: 10701
  Gene Symbol: MEF2C
  Gene Name: myocyte enhancer factor 2C
  ENST ID: ENST00000627717
  CDS Start-End: 1-552
ggtctgatgggtggagacctcacgtctggtgcaggcaccagtgcagggaacgggtatggcaatccccgaaactcaccaggtctgctggtctcacctggtaacttgaacaagaatatgcaagcaaaatctcctcccccaatgaatttaggaatgaataaccgtaaaccagatctccgagttcttattccaccaggcagcaagaatacgatgccatcagtgaatcaaaggataaataactcccagtcggctcagtcattggctaccccagtggtttccgtagcaactcctactttaccaggacaaggaatgggaggatatccatcagccatttcaacaacatatggtaccgagtactctctgagtagtgcagacctgtcatctctgtctgggtttaacaccgccagcgctcttcaccttggttcagtaactggctggcaacagcaacacctacataacatgccaccatctgccctcagtcagttgggaccgtaccaccaccccttcgagatacccacaacacacgcgccacgaggcggggagatctcctgttgacagcttgagcagctgtagcagttcgtacgacgggagcgaccgagaggatcaccggaacgaattccactcccccattggactcaccagaccttcgccggacgaaagggaaagtccctcagtcaagcgcatgcgactttctgaaggatgggcaacatgatcagattattacttactagtttttttttttttcttgcagtgtgtgtgtgtgctataccttaatggggaaggggggtcgatatgcattatatgtgccgtgtgtggaa

SEQ ID NO: 156615 - DNA, 722 bp, Homo sapiens
  Payload ID: 10701
  Gene Symbol: MEF2C
  Gene Name: myocyte enhancer factor 2C
  ENST ID: ENST00000627170
  CDS Start-End: 1-456
gcaaaatctcctcccccaatgaatttaggaatgaataaccgtaaaccagatctccgagttcttattccaccaggcagcaagaatacgatgccatcagtgtctgaggatgtcgacctgcttttgaatcaaaggataaataactcccagtcggctcagtcattggctaccccagtggtttccgtagcaactcctactttaccaggacaaggaatgggaggatatccatcagccatttcaacaacatatggtaccgagtactctctgagtagtgcagacctgtcatctctgtctgggtttaacaccgccagcgctcttcaccttggttcagtaactggctggcaacagcaacacctacataacatgccaccatctgccctcagtcagttgggaccgtaccaccaccccttcgagatacccacaacacacgcgccacgaggcggggagatctcctgttgacagcttgagcagctgtagcagttcgtacgacgggagcgaccgagaggatcaccggaacgaattccactcccccattggactcaccagaccttcgccggacgaaagggaaagtccctcagtcaagcgcatgcgactttctgaaggatgggcaacatgatcagattattacttactagtttttttttttttcttgcagtgtgtgtgtgtgctataccttaatggggaaggggggtcgatatgcattatatgtgccgtgtgtggaaaaa

SEQ ID NO: 156616 - DNA, 1182 bp, Homo sapiens
  Payload ID: 10701
  Gene Symbol: MEF2C
  Gene Name: myocyte enhancer factor 2C
  ENST ID: ENST00000626391
  CDS Start-End: 1-1182
atggggagaaaaaagattcagattacgaggattatggatgaacgtaacagacaggtgacatttacaaagaggaaatttgggttgatgaagaaggcttatgagctgagcgtgctgtgtgactgtgagattgcgctgatcatcttcaacagcaccaacaagctgttccagtatgccagcaccgacatggacaaagtgcttctcaagtacacggagtacaacgagccgcatgagagccggacaaactcagacatcgtggaggctgttccacctcccaacttcgagatgccagtctccatcccagtgtccagccacaacagtttggtgtacagcaaccctgtcagctcactgggaaaccccaacctattgccactggctcacccttctctgcagaggaatagtatgtctcctggtgtaacacatcgacctccaagtgcaggtaacacaggtggtctgatgggtggagacctcacgtctggtgcaggcaccagtgcagggaacgggtatggcaatccccgaaactcaccaggtctgctggtctcacctggtaacttgaacaagaatatgcaagcaaaatctcctcccccaatgaatttaggaatgaataaccgtaaaccagatctccgagttcttattccaccaggcagcaagaatacgatgccatcagtgtctgaggatgtcgacctgcttttgaatcaaaggataaataactcccagtcggctcagtcattggctaccccagtggtttccgtagcaactcctactttaccaggacaaggaatgggaggatatccatcagccatttcaacaacatatggtaccgagtactctctgagtagtgcagacctgtcatctctgtctgggtttaacaccgccagcgctcttcaccttggttcagtaactggctggcaacagcaacacctacataacatgccaccatctgccctcagtcagttgggagaccgtaccaccaccccttcgagatacccacaacacacgcgccacgaggcggggagatctcctgttgacagcttgagcagctgtagcagttcgtacgacgggagcgaccgagaggatcaccggaacgaattccactcccccattggactcaccagaccttcgccggacgaaagggaaagtccctcagtcaagcgcatgcgactttctgaaggatgggcaacatga

SEQ ID NO: 156617 - DNA, 1254 bp, Homo sapiens
  Payload ID: 10701
  Gene Symbol: MEF2C
  Gene Name: myocyte enhancer factor 2C
  Uniprot ID: Q06413
  ENST ID: ENST00000628656
  CDS Start-End: 1-1254
atggggagaaaaaagattcagattacgaggattatggatgaacgtaacagacaggtgacatttacaaagaggaaatttgggttgatgaagaaggcttatgagctgagcgtgctgtgtgactgtgagattgcgctgatcatcttcaacagcaccaacaagctgttccagtatgccagcaccgacatggacaaagtgcttctcaagtacacggagtacaacgagccgcatgagagccggacaaactcagacatcgtggaggctgttccacctcccaacttcgagatgccagtctccatcccagtgtccagccacaacagtttggtgtacagcaaccctgtcagctcactgggaaaccccaacctattgccactggctcacccttctctgcagaggaatagtatgtctcctggtgtaacacatcgacctccaagtgcaggtaacacaggtggtctgatgggtggagacctcacgtctggtgcaggcaccagtgcagggaacgggtatggcaatccccgaaactcaccaggtctgctggtctcacctggtaacttgaacaagaatatgcaagcaaaatctcctcccccaatgaatttaggaatgaataaccgtaaaccagatctccgagttcttattccaccaggcagcaagaatacgatgccatcagtgaatcaaaggataaataactcccagtcggctcagtcattggctaccccagtggtttccgtagcaactcctactttaccaggacaaggaatgggaggatatccatcagccatttcaacaacatatggtaccgagtactctctgagtagtgcagacctgtcatctctgtctgggtttaacaccgccagcgctcttcaccttggttcagtaactggctggcaacagcaacacctacataacatgccaccatctgccctcagtcagttgggagcttgcactagcactcatttatctcagagttcaaatctctccctgccttctactcaaagcctcaacatcaagtcagaacctgtttctcctcctagagaccgtaccaccaccccttcgagatacccacaacacacgcgccacgaggcggggagatctcctgttgacagcttgagcagctgtagcagttcgtacgacgggagcgaccgagaggatcaccggaacgaattccactcccccattggactcaccagaccttcgccggacgaaagggaaagtccctcagtcaagcgcatgcgactttctgaaggatgggcaacatga

SEQ ID NO: 156618 - DNA, 4343 bp, Homo sapiens
  Payload ID: 10701
  Gene Symbol: MEF2C
  Gene Name: myocyte enhancer factor 2C
  Uniprot ID: Q06413
  ENST ID: ENST00000625674
  CDS Start-End: 374-1765
aaactggggggtttctcttcaaagccagctggtctggctttattctgcaggaatttttttacctgtcagggtttggacaacaaagccctcagcaggtgctgacgggtacaacttcctggagaagcagaaaggcactggtgccaaagaagagttgcaaactgtgaagtaacttctatgaagagatgaagtaaagaacggaaggcaaatgattgtggcagtaaagaagtgtatgtggaacgaatgcaggaatttgggaactgagctgtgcaagtgctgaagaaggagatttgtttggaggaaacaggaaagagaaagaaaaggaaggaaaaaatacataatttcagggacgagagagagaagaaaaacggggactatggggagaaaaaagattcagattacgaggattatggatgaacgtaacagacaggtgacatttacaaagaggaaatttgggttgatgaagaaggcttatgagctgagcgtgctgtgtgactgtgagattgcgctgatcatcttcaacagcaccaacaagctgttccagtatgccagcaccgacatggacaaagtgcttctcaagtacacggagtacaacgagccgcatgagagccggacaaactcagacatcgtggaggcattgaacaagaaagaaaacaaaggctgtgaaagccccgatcccgactcctcttatgcactcaccccacgcactgaagaaaaatacaaaaaaattaatgaagaatttgataatatgatcaagagtcataaaattcctgctgttccacctcccaacttcgagatgccagtctccatcccagtgtccagccacaacagtttggtgtacagcaaccctgtcagctcactgggaaaccccaacctattgccactggctcacccttctctgcagaggaatagtatgtctcctggtgtaacacatcgacctccaagtgcaggtaacacaggtggtctgatgggtggagacctcacgtctggtgcaggcaccagtgcagggaacgggtatggcaatccccgaaactcaccaggtctgctggtctcacctggtaacttgaacaagaatatgcaagcaaaatctcctcccccaatgaatttaggaatgaataaccgtaaaccagatctccgagttcttattccaccaggcagcaagaatacgatgccatcagtgaatcaaaggataaataactcccagtcggctcagtcattggctaccccagtggtttccgtagcaactcctactttaccaggacaaggaatgggaggatatccatcagccatttcaacaacatatggtaccgagtactctctgagtagtgcagacctgtcatctctgtctgggtttaacaccgccagcgctcttcaccttggttcagtaactggctggcaacagcaacacctacataacatgccaccatctgccctcagtcagttgggagcttgcactagcactcatttatctcagagttcaaatctctccctgccttctactcaaagcctcaacatcaagtcagaacctgtttctcctcctagagaccgtaccaccaccccttcgagatacccacaacacacgcgccacgaggcggggagatctcctgttgacagcttgagcagctgtagcagttcgtacgacgggagcgaccgagaggatcaccggaacgaattccactcccccattggactcaccagaccttcgccggacgaaagggaaagtccctcagtcaagcgcatgcgactttctgaaggatgggcaacatgatcagattattacttactagtttttttttttttcttgcagtgtgtgtgtgtgctataccttaatggggaaggggggtcgatatgcattatatgtgccgtgtgtggaaaaaaaaaaagtcaggtactctgttttgtaaaagtacttttaaattgcctcagtgatacagtataaagataaacagaaatgctgagataagcttagcacttgagttgtacaacagaacacttgtacaaaatagattttaaggctaacttcttttcactgttgtgctcctttgcaaaatgtatgttacaatagatagtgtcatgttgcaggttcaacgttatttacatgtaaatagacaaaaggaaacatttgccaaaagcggcagatctttactgaaagagagagcagctgttatgcaacatatagaaaaatgtatagatgcttggacagacccggtaatgggtggccattggtaaatgttaggaacacaccaggtcacctgacatcccaagaatgctcacaaacctgcaggcatatcattggcgtatggcactcattaaaaaggatcagagaccattaaaagaggaccatacctattaaaaaaaaatgtggagttggagggctaacatatttaattaaataaataaataaatctgggtctgcatctcttattaaataaaaatataaaaatatgtacattacattttgcttattttcatataaaaggtaagacagagtttgcaaagcatttgtggctttttgtagtttacttaagccaaaatgtgtttttttccccttgatagcttcgctaatattttaaacagtcctgtaaaaaaccaaaaaggactttttgtatagaaagcactaccctaagccatgaagaactccatgctttgctaaccaagataactgttttctctttgtagaagttttgtttttgaaatgtgtatttctaattatataaaatattaagaatcttttaaaaaaatctgtgaaattaacatgcttgtgtatagctttctaatatatataatattatggtaatagcagaagttttgttatcttaatagcgggaggggggtatatttgtgcagttgcacatttgagtaactattttctttctgttttcttttactctgcttacattttataagtttaaggtcagctgtcaaaaggataacctgtggggttagaacatatcacattgcaacaccctaaattgtttttaatacattagcaatctattgggtcaactgacatccattgtatatactagtttctttcatgctatttttattttgttttttgcatttttatcaaatgcagggcccctttctgatctcaccatttcaccatgcatcttggaattcagtaagtgcatatcctaacttgcccatattctaaatcatctggttggttttcagcctagaatttgatacgctttttagaaatatgcccagaatagaaaagctatgttggggcacatgtcctgcaaatatggccctagaaacaagtgatatggaatttacttggtgaataagttataaattcccacagaagaaaaatgtgaaagactgggtgctagacaagaaggaagcaggtaaagggatagttgctttgtcatccgtttttaattattttaactgacccttgacaatcttgtcagcaatataggactgttgaacaatcccggtgtgtcaggacccccaaatgtcacttctgcataaagcatgtatgtcatctattttttcttcaataaagagatttaatagccatttcaagaaatcccataaagaacctctctatgtccctttttttaatttaaaaaaaatgactcttgtctaatattcgtctataagggattaattttcagaccctttaataagtgagtgccataagaaagtcaatatatattgtttaaaagatatttcagtctaggaaagattttccttctcttggaatgtgaagatctgtcgattcatctccaatcatatgcattgacatacacagcaaagaagatataggcagtaatatcaacactgctatatcatgtgtaggacatttcttatccattttttctcttttacttgcatagttgctatgtgtttctcattgtaaaaggctgccgctgggtggcagaagccaagagaccttattaactaggctatatttttcttaacttgatctgaaatccacaattagaccacaatgcacctttggttgtatccataaaggatgctagcctgccttgtactaatgttttatatattaaaaaaaaaaaatctatcaaccatttcatatatatcccactactcaaggtatccatggaacatgaaagaataacatttatgcagaggaaaaacaaaaacatccctgaaaatatacacactcatacacacacacgcacaggggaataaaataagaaaatcattttcctcaccatagacttgatcccatccttacaacccatccttctaacttgatgtgtataaaatatgcaaacatttcacaaatgttctttgtcatttcaaaatactttagtatatcaatatcagtagataccagtgggtgggaaagggtcattacatgaaaa

SEQ ID NO: 156619 - DNA, 632 bp, Homo sapiens
  Payload ID: 10701
  Gene Symbol: MEF2C
  Gene Name: myocyte enhancer factor 2C
  ENST ID: ENST00000503554
  CDS Start-End: 325-632
attttagtttagctccctgagacatgaaattctcttgttcagtctgtatccccttaacatgccaacatttagtctctttcttaaaattattattttcactcaagcagatttttacttttaatctttaaaatgatgtagaaactactttgaaaaatagcatttctggagtaggatggcttttagtttcaacaaatggaattctgaacgttgagaaagaagggccttaatggctgtgacagcccagaccccgatgcggacgattccgtaggtcacagccctgagtctgaggacaagtacaggaaaattaacgaagatattgatctaatgatcagcaggcaaagattgtgtgctgttccacctcccaacttcgagatgccagtctccatcccagtgtccagccacaacagtttggtgtacagcaaccctgtcagctcactgggaaaccccaacctattgccactggctcacccttctctgcagaggaatagtatgtctcctggtgtaacacatcgacctccaagtgcaggtaacacaggtggtctgatgggtggagacctcacgtctggtgcaggcaccagtgcagggaacgggtatggcaatccccgaaactcaccaggtctgctggtctcacc

SEQ ID NO: 156620 - DNA, 3467 bp, Homo sapiens
  Payload ID: 10701
  Gene Symbol: MEF2C
  Gene Name: myocyte enhancer factor 2C
  ENST ID: ENST00000625585
  CDS Start-End: 273-1688
ggaaattgtcctatatgcatttgctgtggattcatggattggctttctgtgatagagaaagcttgtttgtatctttggggtcttaaacgtgcatgggaaataccattctaacacactgcttgcttctaagcaggaacgaatgcaggaatttgggaactgagctgtgcaagtgctgaagaaggagatttgtttggaggaaacaggaaagagaaagaaaaggaaggaaaaaatacataatttcagggacgagagagagaagaaaaacggggactatggggagaaaaaagattcagattacgaggattatggatgaacgtaacagacaggtgacatttacaaagaggaaatttgggttgatgaagaaggcttatgagctgagcgtgctgtgtgactgtgagattgcgctgatcatcttcaacagcaccaacaagctgttccagtatgccagcaccgacatggacaaagtgcttctcaagtacacggagtacaacgagccgcatgagagccggacaaactcagacatcgtggaggcattgaacaagaaagaaaacaaaggctgtgaaagccccgatcccgactcctcttatgcactcaccccacgcactgaagaaaaatacaaaaaaattaatgaagaatttgataatatgatcaagagtcataaaattcctgctgttccacctcccaacttcgagatgccagtctccatcccagtgtccagccacaacagtttggtgtacagcaaccctgtcagctcactgggaaaccccaacctattgccactggctcacccttctctgcagaggaatagtatgtctcctggtgtaacacatcgacctccaagtgcaggtaacacaggtggtctgatgggtggagacctcacgtctggtgcaggcaccagtgcagggaacgggtatggcaatccccgaaactcaccaggtctgctggtctcacctggtaacttgaacaagaatatgcaagcaaaatctcctcccccaatgaatttaggaatgaataaccgtaaaccagatctccgagttcttattccaccaggcagcaagaatacgatgccatcagtgtctgaggatgtcgacctgcttttgaatcaaaggataaataactcccagtcggctcagtcattggctaccccagtggtttccgtagcaactcctactttaccaggacaaggaatgggaggatatccatcagccatttcaacaacatatggtaccgagtactctctgagtagtgcagacctgtcatctctgtctgggtttaacaccgccagcgctcttcaccttggttcagtaactggctggcaacagcaacacctacataacatgccaccatctgccctcagtcagttgggagcttgcactagcactcatttatctcagagttcaaatctctccctgccttctactcaaagcctcaacatcaagtcagaacctgtttctcctcctagagaccgtaccaccaccccttcgagatacccacaacacacgcgccacgaggcggggagatctcctgttgacagcttgagcagctgtagcagttcgtacgacgggagcgaccgagaggatcaccggaacgaattccactcccccattggactcaccagaccttcgccggacgaaagggaaagtccctcagtcaagcgcatgcgactttctgaaggatgggcaacatgatcagattattacttactagtttttttttttttcttgcagtgtgtgtgtgtgctataccttaatggggaaggggggtcgatatgcattatatgtgccgtgtgtggaaaaaaaaaaagtcaggtactctgttttgtaaaagtacttttaaattgcctcagtgatacagtataaagataaacagaaatgctgagataagcttagcacttgagttgtacaacagaacacttgtacaaaatagattttaaggctaacttcttttcactgttgtgctcctttgcaaaatgtatgttacaatagatagtgtcatgttgcaggttcaacgttatttacatgtaaatagacaaaaggaaacatttgccaaaagcggcagatctttactgaaagagagagcagctgttatgcaacatatagaaaaatgtatagatgcttggacagacccggtaatgggtggccattggtaaatgttaggaacacaccaggtcacctgacatcccaagaatgctcacaaacctgcaggcatatcattggcgtatggcactcattaaaaaggatcagagaccattaaaagaggaccatacctattaaaaaaaaatgtggagttggagggctaacatatttaattaaataaataaataaatctgggtctgcatctcttattaaataaaaatataaaaatatgtacattacattttgcttattttcatataaaaggtaagacagagtttgcaaagcatttgtggctttttgtagtttacttaagccaaaatgtgtttttttccccttgatagcttcgctaatattttaaacagtcctgtaaaaaaccaaaaaggactttttgtatagaaagcactaccctaagccatgaagaactccatgctttgctaaccaagataactgttttctctttgtagaagttttgtttttgaaatgtgtatttctaattatataaaatattaagaatcttttaaaaaaatctgtgaaattaacatgcttgtgtatagctttctaatatatataatattatggtaatagcagaagttttgttatcttaatagcgggaggggggtatatttgtgcagttgcacatttgagtaactattttctttctgttttcttttactctgcttacattttataagtttaaggtcagctgtcaaaaggataacctgtggggttagaacatatcacattgcaacaccctaaattgtttttaatacattagcaatctattgggtcaactgacatccattgtatatactagtttctttcatgctatttttattttgttttttgcatttttatcaaatgcagggcccctttctgatctcaccatttcaccatgcatcttggaattcagtaagtgcatatcctaacttgcccatattctaaatcatctggttggttttcagcctagaatttgatacgctttttagaaatatgcccagaatagaaaagctatgttggggcacatgtcctgcaaatatggccctagaaacaagtgatatggaatttacttggtgaataagttataaattcccacagaagaaaaatgtgaaagactgggtgctagacaagaaggaagcaggtaaagggatagttgctttgtcatccgtttttaattattttaactgacccttgacaatcttgtcagcaatataggactgttgaacaatcccggtgtgtcaggacccccaaatgtcacttctgcataaagcatgtatgtcatctattttttcttcaataaagagatttaatagccatttcaagaaatcccataaa

SEQ ID NO: 156621 - DNA, 5965 bp, Homo sapiens
  Payload ID: 10702
  Gene Symbol: MEF2D
  Gene Name: myocyte enhancer factor 2D
  Uniprot ID: Q14814
  ENST ID: ENST00000348159
  CDS Start-End: 482-2047
ctcaagctaggctgagctgtgcctacgtcggcctcgactcccgggggctggaggagttacctttggagcccgaaaggaggaaggaagcaaaatatcaacaacagccgaggcggctcaggcgctcggccccggttccccgcttgcctgccgcccgcctgctggcccccgcgcccacgacgggggcccaggcctcacggcgccgcccagggcccgcgcggacgccggcctcatttattattctccccgcccggagctgcggcttcccggtgttgaagatcccccggaccaggggcgagggctacccgctctttgccgtgacaacaccgttcccccagccgggctggaggctgtgcagaaggtatcctgcagaccatgaactgagcactgttcccagaccgttcatgagcacagtgtaaggtgtgccgagacccaccacccagcgagcccctcccctccgtagcactgaggacccccggagaagatggggaggaaaaagattcagatccagcgaatcaccgacgagcggaaccgacaggtgactttcaccaagcggaagtttggcctgatgaagaaggcgtatgagctgagcgtgctatgtgactgcgagatcgcactcatcatcttcaaccactccaacaagctgttccagtacgccagcaccgacatggacaaggtgctgctcaagtacacggagtacaatgagccacacgagagccgcaccaacgccgacatcatcgagaccctgaggaagaagggcttcaacggctgcgacagccccgagcccgacggggaggactcgctggaacagagccccctgctggaggacaagtaccgacgcgccagcgaggagctcgacgggctcttccggcgctatgggtcaactgtcccggcccccaactttgccatgcctgtcacggtgcccgtgtccaatcagagctcactgcagttcagcaatcccagcggctccctggtcaccccttccctggtgacatcatccctcacggacccgcggctcctgtccccccagcagccagcactacagaggaacagtgtgtctcctggcctgccccagcggccagctagtgcgggggccatgctggggggtgacctgaacagtgctaacggagcctgccccagccctgttgggaatggctacgtcagtgctcgggcttcccctggcctcctccctgtggccaatggcaacagcctaaacaaggtcatccctgccaagtctccacccccacctacccacagcacccagcttggagcccccagccgcaagcccgacctgcgagtcatcacttcccaggcaggaaaggggttaatgcatcacttgactgaggaccatttagatctgaacaatgcccagcgccttggggtctcccagtctactcattcgctcaccaccccagtggtttctgtggcaacgccgagtttactcagccagggcctccccttctcttccatgcccactgcctacaacacagattaccagttgaccagtgcagagctctcctccttaccagcctttagttcacctggggggctgtcgctaggcaatgtcactgcctggcaacagccacagcagccccagcagccgcagcagccacagcctccacagcagcagccaccgcagccacagcagccacagccacagcagcctcagcagccgcaacagccacctcagcaacagtcccacctggtccctgtatctctcagcaacctcatcccgggcagccccctgccccacgtgggtgctgccctcacagtcaccacccacccccacatcagcatcaagtcagaaccggtgtccccaagccgtgagcgcagccctgcgcctccccctccagctgtgttcccagctgcccgccctgagcctggcgatggtctcagcagcccagccgggggatcctatgagacgggagaccgggatgacggacggggggacttcgggcccacactgggcctgctgcgcccagccccagagcctgaggctgagggctcagctgtgaagaggatgcggcttgatacctggacattaaagtgacgattcccactcccctcctctcagcctccctgatgaagagttgacaatctcaccgcccgcccttccctgccccgggctcctcccgctcgacccccacttcctttcttgtgcttcgtgtcctgttgacggttacatttgtgtataattattatattattattattattattatattttttttaatttggattctcgctttggagagggggatgctctcatcccctctttctgtaccccccaccattttcactggctggggggctctctttttcgcgggaaggggggacactttgcacgttgtacacatatgctgcaggaagggggtggggggcccaataaggcctttgggaaaggacaggtgccgagccctgcatgtggagccctcccaccccacccccagatagagggaaataaccaaaaaactaccaaacaacagaaacccacactctagactgaaaccccaaagtgggcttgatgggtgggtttgtgtttcaaggggaaagtgaggcagaggttctgaaaagggtctctgtttttgtgttcatgtagccataggcacatggagcagaatacttaagcctggcccccaaatgcccctgcacacacacgtgccacacctgcgctgattcttgtgtgtgctgcacccccaaggtgtgtgggtgctggctgagctttgggccgggaaggcagcctgggaatctgaggctggagacaggggtttgaggtgggggcctctctggaagcacatttggagggaaagacaagagagccatgaggagagggctgaggagggcagaagggctaggcagggggcaaattgagcccctcccttccccagtttttctctaagatatacagtgcaatagctccccacccctcagttgacgccagccctgtaaagctggccacagtgtgcagggagaatggggagagggtcttcagtgaggtggctggggcgagagtcggcctggacttccctggggtgctccaggccagagctctttcattggggcgagtgtggtgaggggacgtccttggtcttgcacgcacactacctgggggagtcaacactgggatggtctgtggggtgggagggcctacggatgggtccgtagaggtcccacctccctcattcctccttggcccctctccctagcttctcctgttagctccttctgctcctgaccccacctccttgctcttggcgcccctattgtctctggctacctccttgtcccaccacctccaggctgcatcccaccttccctcttggctactgtaattgtaaatagcgacctttggaaaacgttagcggtgtaacagtccaggaaactgtttttttttgttgttgttgtattgatatgaaatgagattctatttttgtcaaagtatattgtaataataatgactcaaacggcccgtactgtacagacgagattcttctgctgttgttcttgctcccctcccctcctctgagtccgcccctccctgctgcctcctcagtggggcagtgggcaaggggcccaggggcagccgaagcacggggtcctgagacctcaggcaggattggagatcaaaccagagggggcaggcccccagcctgctctctaggatcaccccccgccctaaggggcctggcctggggtgacgtggccaggcagactgtctgccccactccttcacacaagcccagctcctctgcccaaggggtgcggcgcccccttggggtttcctcccagttggagagtagagttaagacaaggcccagttttgtgttagccgaccgtctttgcccacctctatgacccagcctcttgcagtattcccatacttgatgcagggaaggaaccagaagcagaggggcctctacgcaggtacacacgtgtacctgagtgtgttcatgagggcatctggtgtttatgtgtctgagtgtagctttgtatttatgtgtgtgtgtgtgtgtatgtctgattgcacgggtgtacttttgtatttatgtgtgtgtgtggttgcacgggtgtgcctctgtgtgtctctgaccctggctgggtgtgtgtgcaaatctgtgtgactggagctctaggggcatctctgtgtctgagtgtgcctggtgtgtgtttacaaagggagagttggctgctccagctccacagccctgggaccccaactcctgtcttccctgctcctttccctgtgttcaccctcagctctgacacattgaactgcagttggggggattggcagttagccctctgtgcttctccctgcagccctacctctgccaaggtctctccctccagggacctctgcttccacccacatatgtccacttagtcacccacacttgacacagttcctggagtaccctcttcccccaaccccagacctgctttcagagcaaaactcaagtccctcttcctccgtgaagcttctccctcagctgagcagtgatcacttactcactcttaaccccaatccgctgactgggtggggacagcacgtccagccttcccacctctcctgcaggcttctagacggagtttcaaaaactgatgagcctcgatccagggcttgaaagaagccagggtgtaatcttgttcatgcatgcgtccccagagcctcgcccagtgcctggcacatagtaggcactcaataaatgctgaatgggtgaatagttgaatgataggtgctcaataaatgaatgaatggccttcccttctcaggctattcccaccattagtctgcccacctttctaggctgggcttggccaccattaaacacggggtgggggtgagggcccctgcaattcacggtgcaatattcaccagttttgccctctgcctcataaaggcaaacctggcttttgattaccatgtgtggatgtttcagtgtcctttcttctctgtccctggggatggggtggtctgtgaatatgtgacatttctgcagttcagtatccgaaggtttctcttgggggtaggggctcctgggcggccagatgaatgggtccctgggaacccagacctcagatgaggacttaatgtcttcttcctctcaagccaaattcgcctccacccactccctctgaagaactgggcatttgccaaagtaaccactggagtcatctaatggccctccccctccccaggtttcccacagctttcagggacagtgggcaagaggacacccccccccaccacctcagtggaacacaccattctccccccctcaacagcacactcagtgcagcaagactgacccctgaccccctcccagccctccctaccttggacaggaaggaagtaatgcaccttctcttgctgattatttatttgtttggagagacagaaatgtaaaagtgtatctagaaatatctatatctctatatatttttaactgactctttggaatcccctggggtggggtgaggggtaagtttaggctttcgcggaggggaggagacatggagcctgggaactccttgttctcccctctgctgcctctccccaccccttaaagcagttggtagaaggaatggtatttgtatggggggagggaggctggaatggagaatctggattctctcctcttccccattctccagagggagggaggtggtgaggaagaggaagggaggggcaggatgggccatggaggtgccccacccccacacctgacaatcacccacactcctggggctcttcctgggtcctggggcagggcgagtccaagtgtgaggctgttgatttgttttcaatatttcttttcgtgctgtatggtgatgctttcttagtattctacacaataagaaaagacaaagtcctcgagattcttatgagttttgtttgaaaactctttcactatatttgttgtaaagaggtttactattaaaagaaaaagaatacacgtttctgata

SEQ ID NO: 156622 - DNA, 3194 bp, Homo sapiens
  Payload ID: 10702
  Gene Symbol: MEF2D
  Gene Name: myocyte enhancer factor 2D
  Uniprot ID: Q14814
  ENST ID: ENST00000360595
  CDS Start-End: 215-1759
ggggcctgagaccacccctgccctaggcccagctttcctggactgcctgcccccacaaaccaacagcccgcccccaggtccccagtcgaaggtatcctgcagaccatgaactgagcactgttcccagaccgttcatgagcacagtgtaaggtgtgccgagacccaccacccagcgagcccctcccctccgtagcactgaggacccccggagaagatggggaggaaaaagattcagatccagcgaatcaccgacgagcggaaccgacaggtgactttcaccaagcggaagtttggcctgatgaagaaggcgtatgagctgagcgtgctatgtgactgcgagatcgcactcatcatcttcaaccactccaacaagctgttccagtacgccagcaccgacatggacaaggtgctgctcaagtacacggagtacaatgagccacacgagagccgcaccaacgccgacatcatcgagaccctgaggaagaagggcttcaacggctgcgacagccccgagcccgacggggaggactcgctggaacagagccccctgctggaggacaagtaccgacgcgccagcgaggagctcgacgggctcttccggcgctatgggtcaactgtcccggcccccaactttgccatgcctgtcacggtgcccgtgtccaatcagagctcactgcagttcagcaatcccagcggctccctggtcaccccttccctggtgacatcatccctcacggacccgcggctcctgtccccccagcagccagcactacagaggaacagtgtgtctcctggcctgccccagcggccagctagtgcgggggccatgctggggggtgacctgaacagtgctaacggagcctgccccagccctgttgggaatggctacgtcagtgctcgggcttcccctggcctcctccctgtggccaatggcaacagcctaaacaaggtcatccctgccaagtctccacccccacctacccacagcacccagcttggagcccccagccgcaagcccgacctgcgagtcatcacttcccaggcaggaaaggggttaatgcatcacttgaacaatgcccagcgccttggggtctcccagtctactcattcgctcaccaccccagtggtttctgtggcaacgccgagtttactcagccagggcctccccttctcttccatgcccactgcctacaacacagattaccagttgaccagtgcagagctctcctccttaccagcctttagttcacctggggggctgtcgctaggcaatgtcactgcctggcaacagccacagcagccccagcagccgcagcagccacagcctccacagcagcagccaccgcagccacagcagccacagccacagcagcctcagcagccgcaacagccacctcagcaacagtcccacctggtccctgtatctctcagcaacctcatcccgggcagccccctgccccacgtgggtgctgccctcacagtcaccacccacccccacatcagcatcaagtcagaaccggtgtccccaagccgtgagcgcagccctgcgcctccccctccagctgtgttcccagctgcccgccctgagcctggcgatggtctcagcagcccagccgggggatcctatgagacgggagaccgggatgacggacggggggacttcgggcccacactgggcctgctgcgcccagccccagagcctgaggctgagggctcagctgtgaagaggatgcggcttgatacctggacattaaagtgacgattcccactcccctcctctcagcctccctgatgaagagttgacaatctcaccgcccgcccttccctgccccgggctcctcccgctcgacccccacttcctttcttgtgcttcgtgtcctgttgacggttacatttgtgtataattattatattattattattattattatattttttttaatttggattctcgctttggagagggggatgctctcatcccctctttctgtaccccccaccattttcactggctggggggctctctttttcgcgggaaggggggacactttgcacgttgtacacatatgctgcaggaagggggtggggggcccaataaggcctttgggaaaggacaggtgccgagccctgcatgtggagccctcccaccccacccccagatagagggaaataaccaaaaaactaccaaacaacagaaacccacactctagactgaaaccccaaagtgggcttgatgggtgggtttgtgtttcaaggggaaagtgaggcagaggttctgaaaagggtctctgtttttgtgttcatgtagccataggcacatggagcagaatacttaagcctggcccccaaatgcccctgcacacacacgtgccacacctgcgctgattcttgtgtgtgctgcacccccaaggtgtgtgggtgctggctgagctttgggccgggaaggcagcctgggaatctgaggctggagacaggggtttgaggtgggggcctctctggaagcacatttggagggaaagacaagagagccatgaggagagggctgaggagggcagaagggctaggcagggggcaaattgagcccctcccttccccagtttttctctaagatatacagtgcaatagctccccacccctcagttgacgccagccctgtaaagctggccacagtgtgcagggagaatggggagagggtcttcagtgaggtggctggggcgagagtcggcctggacttccctggggtgctccaggccagagctctttcattggggcgagtgtggtgaggggacgtccttggtcttgcacgcacactacctgggggagtcaacactgggatggtctgtggggtgggagggcctacggatgggtccgtagaggtcccacctccctcattcctccttggcccctctccctagcttctcctgttagctccttctgctcctgaccccacctccttgctcttggcgcccctattgtctctggctacctccttgtcccaccacctccaggctgcatcccaccttccctcttggctactgtaattgtaaatagcgacctttggaaaacgttagcggtgtaacagtccaggaaactgtttttttttgttgttgttgtattgatatgaaatgagattctatttttgtcaaagtatattgtaataataatgactcaaacggcccgtactgtacagacga

SEQ ID NO: 156623 - DNA, 1905 bp, Homo sapiens
  Payload ID: 10702
  Gene Symbol: MEF2D
  Gene Name: myocyte enhancer factor 2D
  ENST ID: ENST00000368240
  CDS Start-End: 407-826
ggaggaaggaagcaaaatatcaacaacagccgaggcggctcaggcgctcggccccggttccccgcttgcctgccgcccgcctgctggcccccgcgcccacgacgggggcccaggcctcacggcgccgcccagggcccgcgcggacgccggcctcatttattattctccccgcccggagctgcggcttcccggtgttgaagatcccccggaccaggggcgagggctacccgctctttgccgtgacaacaccgttcccccagccgggctggaggctgtgcagaaggtatcctgcagaccatgaactgagcactgttcccagaccgttcatgagcacagtgtaaggtgtgccgagacccaccacccagcgagcccctcccctccgtagcactgaggacccccggagaagatggggaggaaaaagattcagatccagcgaatcaccgacgagcggaaccgacaggtgactttcaccaagcggaagtttggcctgatgaagaaggcgtatgagctgagcgtgctatgtgactgcgagatcgcactcatcatcttcaaccactccaacaagctgttccagtacgccagcaccgacatggacaaggtgctgctcaagtacacggagtacaatgagccacacgagagccgcaccaacgccgacatcatcgagaccctgaggaagaagggcttcaacggctgcgacagccccgagcccgacggggaggactcgctggaacagagccccctgctggaggacaagtaccgacgcgccagcgaggagctcgacgggctcttccggcgctatggggggccatgctggggggtgacctgaacagtgctaacggagcctgccccagccctgttgggaatggctacgtcagtgctcgggcttcccctggcctcctccctgtggccaatggcaacagcctaaacaaggtcatccctgccaagtctccacccccacctacccacagcacccagcttggagcccccagccgcaagcccgacctgcgagtcatcacttcccaggcaggaaaggggttaatgcatcacttgattaccagttgaccagtgcagagctctcctccttaccagcctttagttcacctggggggctgtcgctaggcaatgtcactgcctggcaacagccacagcagccccagcagccgcagcagccacagcctccacagcagcagccaccgcagccacagcagccacagccacagcagcctcagcagccgcaacagccacctcagcaacagtcccacctggtccctgtatctctcagcaacctcatcccgggcagccccctgccccacgtgggtgctgccctcacagtcaccacccacccccacatcagcatcaagtcagaaccggtgtccccaagccgtgagcgcagccctgcgcctccccctccagctgtgttcccagctgcccgccctgagcctggcgatggtctcagcagcccagccgggggatcctatgagacgggagaccgggatgacggacggggggacttcgggcccacactgggcctgctgcgcccagccccagagcctgaggctgagggctcagctgtgaagaggatgcggcttgatacctggacattaaagtgacgattcccactcccctctccctagcttctcctgttagctccttctgctcctgaccccacctccttgctcttggcgcccctattgtctctggctacctccttgtcccaccacctccaggctgcatcccaccttccctcttggctactgtaattgtaaatagcgacctttggaaaacgttagcggtgtaacagtccaggaaactgtttttttttgttgttgttgtattgatatgaaatgagattctatttttgtcaaagtatattgtaataataatgactcaaacggcccgtactgt

SEQ ID NO: 156624 - DNA, 5598 bp, Homo sapiens
  Payload ID: 10702
  Gene Symbol: MEF2D
  Gene Name: myocyte enhancer factor 2D
  Uniprot ID: Q14814
  ENST ID: ENST00000464356
  CDS Start-End: 139-1680
gaggctgtgcagaaggtatcctgcagaccatgaactgagcactgttcccagaccgttcatgagcacagtgtaaggtgtgccgagacccaccacccagcgagcccctcccctccgtagcactgaggacccccggagaagatggggaggaaaaagattcagatccagcgaatcaccgacgagcggaaccgacaggtgactttcaccaagcggaagtttggcctgatgaagaaggcgtatgagctgagcgtgctatgtgactgcgagatcgcactcatcatcttcaaccactccaacaagctgttccagtacgccagcaccgacatggacaaggtgctgctcaagtacacggagtacaatgagccacacgagagccgcaccaacgccgacatcatcgaggcgctgcacaagaagcacagggaatgtgagagccctgaggtggacgaggtgtttgccctgaccccccagacggaagagaaatataaaaagatagacgaggagtttgataaaatgatgcagagttatagactggcctcaactgtcccggcccccaactttgccatgcctgtcacggtgcccgtgtccaatcagagctcactgcagttcagcaatcccagcggctccctggtcaccccttccctggtgacatcatccctcacggacccgcggctcctgtccccccagcagccagcactacagaggaacagtgtgtctcctggcctgccccagcggccagctagtgcgggggccatgctggggggtgacctgaacagtgctaacggagcctgccccagccctgttgggaatggctacgtcagtgctcgggcttcccctggcctcctccctgtggccaatggcaacagcctaaacaaggtcatccctgccaagtctccacccccacctacccacagcacccagcttggagcccccagccgcaagcccgacctgcgagtcatcacttcccaggcaggaaaggggttaatgcatcacttgaacaatgcccagcgccttggggtctcccagtctactcattcgctcaccaccccagtggtttctgtggcaacgccgagtttactcagccagggcctccccttctcttccatgcccactgcctacaacacagattaccagttgaccagtgcagagctctcctccttaccagcctttagttcacctggggggctgtcgctaggcaatgtcactgcctggcaacagccacagcagccccagcagccgcagcagccacagcctccacagcagcagccaccgcagccacagcagccacagccacagcagcctcagcagccgcaacagccacctcagcaacagtcccacctggtccctgtatctctcagcaacctcatcccgggcagccccctgccccacgtgggtgctgccctcacagtcaccacccacccccacatcagcatcaagtcagaaccggtgtccccaagccgtgagcgcagccctgcgcctccccctccagctgtgttcccagctgcccgccctgagcctggcgatggtctcagcagcccagccgggggatcctatgagacgggagaccgggatgacggacggggggacttcgggcccacactgggcctgctgcgcccagccccagagcctgaggctgagggctcagctgtgaagaggatgcggcttgatacctggacattaaagtgacgattcccactcccctcctctcagcctccctgatgaagagttgacaatctcaccgcccgcccttccctgccccgggctcctcccgctcgacccccacttcctttcttgtgcttcgtgtcctgttgacggttacatttgtgtataattattatattattattattattattatattttttttaatttggattctcgctttggagagggggatgctctcatcccctctttctgtaccccccaccattttcactggctggggggctctctttttcgcgggaaggggggacactttgcacgttgtacacatatgctgcaggaagggggtggggggcccaataaggcctttgggaaaggacaggtgccgagccctgcatgtggagccctcccaccccacccccagatagagggaaataaccaaaaaactaccaaacaacagaaacccacactctagactgaaaccccaaagtgggcttgatgggtgggtttgtgtttcaaggggaaagtgaggcagaggttctgaaaagggtctctgtttttgtgttcatgtagccataggcacatggagcagaatacttaagcctggcccccaaatgcccctgcacacacacgtgccacacctgcgctgattcttgtgtgtgctgcacccccaaggtgtgtgggtgctggctgagctttgggccgggaaggcagcctgggaatctgaggctggagacaggggtttgaggtgggggcctctctggaagcacatttggagggaaagacaagagagccatgaggagagggctgaggagggcagaagggctaggcagggggcaaattgagcccctcccttccccagtttttctctaagatatacagtgcaatagctccccacccctcagttgacgccagccctgtaaagctggccacagtgtgcagggagaatggggagagggtcttcagtgaggtggctggggcgagagtcggcctggacttccctggggtgctccaggccagagctctttcattggggcgagtgtggtgaggggacgtccttggtcttgcacgcacactacctgggggagtcaacactgggatggtctgtggggtgggagggcctacggatgggtccgtagaggtcccacctccctcattcctccttggcccctctccctagcttctcctgttagctccttctgctcctgaccccacctccttgctcttggcgcccctattgtctctggctacctccttgtcccaccacctccaggctgcatcccaccttccctcttggctactgtaattgtaaatagcgacctttggaaaacgttagcggtgtaacagtccaggaaactgtttttttttgttgttgttgtattgatatgaaatgagattctatttttgtcaaagtatattgtaataataatgactcaaacggcccgtactgtacagacgagattcttctgctgttgttcttgctcccctcccctcctctgagtccgcccctccctgctgcctcctcagtggggcagtgggcaaggggcccaggggcagccgaagcacggggtcctgagacctcaggcaggattggagatcaaaccagagggggcaggcccccagcctgctctctaggatcaccccccgccctaaggggcctggcctggggtgacgtggccaggcagactgtctgccccactccttcacacaagcccagctcctctgcccaaggggtgcggcgcccccttggggtttcctcccagttggagagtagagttaagacaaggcccagttttgtgttagccgaccgtctttgcccacctctatgacccagcctcttgcagtattcccatacttgatgcagggaaggaaccagaagcagaggggcctctacgcaggtacacacgtgtacctgagtgtgttcatgagggcatctggtgtttatgtgtctgagtgtagctttgtatttatgtgtgtgtgtgtgtgtatgtctgattgcacgggtgtacttttgtatttatgtgtgtgtgtggttgcacgggtgtgcctctgtgtgtctctgaccctggctgggtgtgtgtgcaaatctgtgtgactggagctctaggggcatctctgtgtctgagtgtgcctggtgtgtgtttacaaagggagagttggctgctccagctccacagccctgggaccccaactcctgtcttccctgctcctttccctgtgttcaccctcagctctgacacattgaactgcagttggggggattggcagttagccctctgtgcttctccctgcagccctacctctgccaaggtctctccctccagggacctctgcttccacccacatatgtccacttagtcacccacacttgacacagttcctggagtaccctcttcccccaaccccagacctgctttcagagcaaaactcaagtccctcttcctccgtgaagcttctccctcagctgagcagtgatcacttactcactcttaaccccaatccgctgactgggtggggacagcacgtccagccttcccacctctcctgcaggcttctagacggagtttcaaaaactgatgagcctcgatccagggcttgaaagaagccagggtgtaatcttgttcatgcatgcgtccccagagcctcgcccagtgcctggcacatagtaggcactcaataaatgctgaatgggtgaatagttgaatgataggtgctcaataaatgaatgaatggccttcccttctcaggctattcccaccattagtctgcccacctttctaggctgggcttggccaccattaaacacggggtgggggtgagggcccctgcaattcacggtgcaatattcaccagttttgccctctgcctcataaaggcaaacctggcttttgattaccatgtgtggatgtttcagtgtcctttcttctctgtccctggggatggggtggtctgtgaatatgtgacatttctgcagttcagtatccgaaggtttctcttgggggtaggggctcctgggcggccagatgaatgggtccctgggaacccagacctcagatgaggacttaatgtcttcttcctctcaagccaaattcgcctccacccactccctctgaagaactgggcatttgccaaagtaaccactggagtcatctaatggccctccccctccccaggtttcccacagctttcagggacagtgggcaagaggacacccccccccaccacctcagtggaacacaccattctccccccctcaacagcacactcagtgcagcaagactgacccctgaccccctcccagccctccctaccttggacaggaaggaagtaatgcaccttctcttgctgattatttatttgtttggagagacagaaatgtaaaagtgtatctagaaatatctatatctctatatatttttaactgactctttggaatcccctggggtggggtgaggggtaagtttaggctttcgcggaggggaggagacatggagcctgggaactccttgttctcccctctgctgcctctccccaccccttaaagcagttggtagaaggaatggtatttgtatggggggagggaggctggaatggagaatctggattctctcctcttccccattctccagagggagggaggtggtgaggaagaggaagggaggggcaggatgggccatggaggtgccccacccccacacctgacaatcacccacactcctggggctcttcctgggtcctggggcagggcgagtccaagtgtgaggctgttgatttgttttcaatatttcttttcgtgctgtatggtgatgctttcttagtattctacacaataagaaaagacaaagtcctcgagattcttatgagttttgtttgaaaactctttcactatatttgttgtaaagaggtttactattaaaagaaaaagaatacacgtttctgata

SEQ ID NO: 156625 - DNA, 593 bp, Homo sapiens
  Payload ID: 10702
  Gene Symbol: MEF2D
  Gene Name: myocyte enhancer factor 2D
  ENST ID: ENST00000489057
  CDS Start-End: 562-593
ggaggagttacctttggagcccgaaaggaggaaggaagcaaaatatcaacaacagccgaggcggctcaggcgctcggccccggttccccgcttgcctgccgcccgcctgctggcccccgcgcccacgacgggggcccaggcctcacggcgccgcccagggcccgcgcggacgccggcctcatttattattctccccgcccggagctgcggcttcccggtgttgaagatcccccggaccaggggcgagggctacccgctctttgccgtgacaacaccgttcccccagccgggctggttcgggtcttagggggatggggaaaggggccccctccccctagtgaatcacgctgtcctctcagcagccttccgaggactcctcctgaaaggaaggcactctagaagccaccgaccgggttatcccaggaggctgtgcagaaggtatcctgcagaccatgaactgagcactgttcccagaccgttcatgagcacagtgtaaggtgtgccgagacccaccacccagcgagcccctcccctccgtagcactgaggacccccggagaagatggggaggaaaaagattcagatccagcgaat

SEQ ID NO: 156626 - DNA, 1627 bp, Homo sapiens
  Payload ID: 10702
  Gene Symbol: MEF2D
  Gene Name: myocyte enhancer factor 2D
  ENST ID: ENST00000475587
  CDS Start-End: 407-826
ggaggaaggaagcaaaatatcaacaacagccgaggcggctcaggcgctcggccccggttccccgcttgcctgccgcccgcctgctggcccccgcgcccacgacgggggcccaggcctcacggcgccgcccagggcccgcgcggacgccggcctcatttattattctccccgcccggagctgcggcttcccggtgttgaagatcccccggaccaggggcgagggctacccgctctttgccgtgacaacaccgttcccccagccgggctggaggctgtgcagaaggtatcctgcagaccatgaactgagcactgttcccagaccgttcatgagcacagtgtaaggtgtgccgagacccaccacccagcgagcccctcccctccgtagcactgaggacccccggagaagatggggaggaaaaagattcagatccagcgaatcaccgacgagcggaaccgacaggtgactttcaccaagcggaagtttggcctgatgaagaaggcgtatgagctgagcgtgctatgtgactgcgagatcgcactcatcatcttcaaccactccaacaagctgttccagtacgccagcaccgacatggacaaggtgctgctcaagtacacggagtacaatgagccacacgagagccgcaccaacgccgacatcatcgagaccctgaggaagaagggcttcaacggctgcgacagccccgagcccgacggggaggactcgctggaacagagccccctgctggaggacaagtaccgacgcgccagcgaggagctcgacgggctcttccggcgctatggggggccatgctggggggtgacctgaacagtgctaacggagcctgccccagccctgttgggaatggctacgtcagtgctcgggcttcccctggcctcctccctgtggccaatggcaacagcctaaacaaggtcatccctgccaagtctccacccccacctacccacagcacccagcttggagcccccagccgcaagcccgacctgcgagtcatcacttcccaggcaggaaaggggttaatgcatcacttgattaccagttgaccagtgcagagctctcctccttaccagcctttagttcacctggggggctgtcgctaggcaatgtcactgcctggcaacagccacagcagccccagcagccgcagcagccacagcctccacagcagcagccaccgcagccacagcagccacagccacagcagcctcagcagccgcaacagccacctcagcaacagtcccacctggtccctgtatctctcagcaacctcatcccgggcagccccctgccccacgtgggtgctgccctcacagtcaccacccacccccacatcagcatcaagtcagaaccggtgtccccaagccgtgagcgcagccctgcgcctccccctccagctgtgttcccagctgcccgccctgagcctggcgatggtctcagcagcccagccgggggatcctatgagacgggagaccgggatgacggacggggggacttcgggcccacactgggcctgctgcgcccagccccagagcctgaggctgagggctcagctgtgaagaggatgcggcttgatacctggacattaaagtgacgattcccactcccctc

SEQ ID NO: 156627 - DNA, 1629 bp, Homo sapiens
  Payload ID: 10703
  Gene Symbol: MDFI
  Gene Name: MyoD family inhibitor
  Uniprot ID: Q99750
  ENST ID: ENST00000230321
  CDS Start-End: 218-958
ggggctggagggagagaaggaagaaggaaggggcgaacggcgtgagctggcgccgaaatgggagaaagcagcgagtgagaggggaaggggcgccaggcgagcacccgggagccagcgggacctgggcaggggcgcccggagcaggcgcgcatggcgggccccgcgcggggatccggctggaagagagcgtagcacggctcgcacgagtccggggccgatgtaccaggtgagcggccagcgcccctctggctgcgacgcgccctatggagcccccagcgcagccccgggcccagcccagaccctatccctccttcctgggctggaggtagtaacaggatccactcaccctgcggaggcagcaccagaggagggctccctggaggaggcggcaacccccatgccccaaggcaatggccctggcatcccccagggcctggacagcactgacctcgacgtccccacagaagctgtgacatgccagcctcaggggaaccccttgggctgcaccccacttctgccgaatgactctggccacccctcagagctgggcggcaccagacgggcggggaatggtgccctgggtggccccaaggcccaccggaagttgcagacacacccatctctcgccagccagggcagcaagaagagtaagagcagcagcaaatccaccacctcccagatccccctccaggcacaggaagactgctgtgtccactgcatcctgtcctgcctgttctgcgagttcctgacgctgtgcaacatcgtcctggactgcgccacctgtggctcctgcagctcggaggactcgtgcctctgctgctgctgctgtggctctggcgagtgtgccgactgcgacctgccctgcgacctggactgcggcatcctggatgcctgctgcgagtccgcggactgcctggagatctgcatggagtgctgtgggctctgcttctcctcctgagcctctgtcgggggctaagccagcctggcgcccctgcagattccagcagggtccctctgagtggggccaggcccaggactgtcacacaaggcttgagaagccccctctccctggtcctctcctacccacccatgtcctctcagaaccccagccttgaaaatagtggggggcactcagaggggccacctcctcagccgtgggtggtgggcccatggcagagaagcctgaactctttactgggttaccaggttcatacattgctgaggacctgacaggacaacctaggggcagggctggggtggggaccgcagggggcagccagggctggggaacactgtgaaagttacttggggagggtgggccggtggggccgtagctctctacctctccctgctcctggtgcctgcctctctcctccaccccaggcttagaggacagaaaaatgtgaagagacgccccacccaccctcagccagccctctccagtctcctttcctaggcttttttgggggcctaacccacgcagtgaccccagagggcagggctaggcgagagcctggggtggggcgggagggggaacagtatggaaaagactggaaggggaaaggaagggaagggagggagggtctgttctatctgttgctgtaaataaagatatttgtccatctcaga

SEQ ID NO: 156628 - DNA, 809 bp, Homo sapiens
  Payload ID: 10703
  Gene Symbol: MDFI
  Gene Name: MyoD family inhibitor
  ENST ID: ENST00000373050
  CDS Start-End: 188-745
gggcgaacggcgtgagctggcgccgaaatgggagaaagcagcgagtgagaggggaaggggcgccaggcgagcacccgggagccagcgggacctgggcaggggcgcccggagcaggcgcgcatggcgggccccgcgcggggatccggctggaagagagcgtagcacggctcgcacgagtccggggccgatgtaccaggtgagcggccagcgcccctctggctgcgacgcgccctatggagcccccagcgcagccccgggcccaggccagcctcaggggaaccccttgggctgcaccccacttctgccgaatgactctggccacccctcagagctgggcggcaccagacgggcggggaatggtgccctgggtggccccaaggcccaccggaagttgcagacacacccatctctcgccagccagggcagcaagaagagtaagagcagcagcaaatccaccacctcccagatccccctccaggcacaggaagactgctgtgtccactgcatcctgtcctgcctgttctgcgagttcctgacgctgtgcaacatcgtcctggactgcgccacctgtggctcctgcagctcggaggactcgtgcctctgctgctgctgctgtggctctggcgagtgtgccgactgcgacctgccctgcgacctggactgcggcatcctggatgcctgctgcgagtccgcggactgcctggagatctgcatggagtgctgtgggctctgcttctcctcctgagcctctgtcgggggctaagccagcctggcgcccctgcagattccagcagggtccctctgagtgg

SEQ ID NO: 156629 - DNA, 1622 bp, Homo sapiens
  Payload ID: 10703
  Gene Symbol: MDFI
  Gene Name: MyoD family inhibitor
  Uniprot ID: Q99750
  ENST ID: ENST00000373051
  CDS Start-End: 218-958
ctcctggggcactaggacagacccccgcggctagcagcccggcctggggggcggaacactctcttcttgtcccgccccaccttcctccgggccgcaaccaccccagcccatcgctgggacgtggccgcgggtgccgagagcgctgccggcgccgtgggggccatcccggtcctggccccgacggcgccccaggacctgcgatagccgtccggggccgatgtaccaggtgagcggccagcgcccctctggctgcgacgcgccctatggagcccccagcgcagccccgggcccagcccagaccctatccctccttcctgggctggaggtagtaacaggatccactcaccctgcggaggcagcaccagaggagggctccctggaggaggcggcaacccccatgccccaaggcaatggccctggcatcccccagggcctggacagcactgacctcgacgtccccacagaagctgtgacatgccagcctcaggggaaccccttgggctgcaccccacttctgccgaatgactctggccacccctcagagctgggcggcaccagacgggcggggaatggtgccctgggtggccccaaggcccaccggaagttgcagacacacccatctctcgccagccagggcagcaagaagagtaagagcagcagcaaatccaccacctcccagatccccctccaggcacaggaagactgctgtgtccactgcatcctgtcctgcctgttctgcgagttcctgacgctgtgcaacatcgtcctggactgcgccacctgtggctcctgcagctcggaggactcgtgcctctgctgctgctgctgtggctctggcgagtgtgccgactgcgacctgccctgcgacctggactgcggcatcctggatgcctgctgcgagtccgcggactgcctggagatctgcatggagtgctgtgggctctgcttctcctcctgagcctctgtcgggggctaagccagcctggcgcccctgcagattccagcagggtccctctgagtggggccaggcccaggactgtcacacaaggcttgagaagccccctctccctggtcctctcctacccacccatgtcctctcagaaccccagccttgaaaatagtggggggcactcagaggggccacctcctcagccgtgggtggtgggcccatggcagagaagcctgaactctttactgggttaccaggttcatacattgctgaggacctgacaggacaacctaggggcagggctggggtggggaccgcagggggcagccagggctggggaacactgtgaaagttacttggggagggtgggccggtggggccgtagctctctacctctccctgctcctggtgcctgcctctctcctccaccccaggcttagaggacagaaaaatgtgaagagacgccccacccaccctcagccagccctctccagtctcctttcctaggcttttttgggggcctaacccacgcagtgaccccagagggcagggctaggcgagagcctggggtggggcgggagggggaacagtatggaaaagactggaaggggaaaggaagggaagggagggagggtctgttctatctgttgctgtaaataaagatatttgtcca

SEQ ID NO: 156630 - DNA, 1183 bp, Homo sapiens
  Payload ID: 10703
  Gene Symbol: MDFI
  Gene Name: MyoD family inhibitor
  ENST ID: ENST00000419164
  CDS Start-End: 490-1183
tccagagctcccggacagcagccggatcccggccggctcctggggcactaggacagacccccgcggctagcagcccggcctggggggcggaacactctcttcttgtcccgccccaccttcctccgggccgcaaccaccccagcccatcgctgggacgtggccgcgggtgccgagagcgctgccggcgccgtgggggccatcccggtcctggccccgacggcgccccaggacctgcgatagccaaacttttgcagagtttggacaggcaaaggaaaacgtgcagcccgcggatctccgggcctcagagagcagggagtcggggagactgaggccccgctccgagagcgcggaggaagcgcgcccagccggcttcctgtgggggctcgggcctcgggcgccccgcggacagacgtgtccggctcctggctgggccaagcccggcgcgggggaggggacccgcagaggggcgactgagaaggtccggggccgatgtaccaggtgagcggccagcgcccctctggctgcgacgcgccctatggagcccccagcgcagccccgggcccagcccagaccctatccctccttcctgggctggaggtagtaacaggatccactcaccctgcggaggcagcaccagaggagggctccctggaggaggcggcaacccccatgccccaaggcaatggccctggcatcccccagggcctggacagcactgacctcgacgtccccacagaagctgtgacatgccagcctcaggggaaccccttgggctgcaccccacttctgccgaatgactctggccacccctcagagctgggcggcaccagacgggcggggaatggtgccctgggtggccccaaggcccaccggaagttgcagacacacccatctctcgccagccagggcagcaagaagagtaagagcagcagcaaatccaccacctcccagatccccctccaggcacaggaagactgctgtgtccactgcatcctgtcctgcctgttctgcgagttcctgacgctgtgcaacatcgtcctggactgcgccacctgtggctcctgcagctcggaggactcgtgcctctgctgctgctgctgtggctctggcgagtgtgccgactgcgacctgccctgcgacctggactgcggcatcctggatgcctgctgcgagtccgcggact

SEQ ID NO: 156631 - DNA, 650 bp, Homo sapiens
  Payload ID: 10703
  Gene Symbol: MDFI
  Gene Name: MyoD family inhibitor
  ENST ID: ENST00000435476
  CDS Start-End: 224-650
ggggaaggggcgccaggcgagcacccgggagccagcgggacctgggcaggggcgcccggagcaggcgcgcatggcgggccccgcgcggggatccggctggaagagagcgtagcacggctcgcacgagtgagtggacgtgggaggcgcgcatctgcgggggaatcgccccttgcccgcctccggcgccgcccgctgagccctgttttccgcaggtccggggccgatgtaccaggtgagcggccagcgcccctctggctgcgacgcgccctatggagcccccagcgcagccccgggcccaggccagcctcaggggaaccccttgggctgcaccccacttctgccgaatgactctggccacccctcagagctgggcggcaccagacgggcggggaatggtgccctgggtggccccaaggcccaccggaagttgcagacacacccatctctcgccagccagggcagcaagaagagtaagagcagcagcaaatccaccacctcccagatccccctccaggcacaggaagactgctgtgtccactgcatcctgtcctgcctgttctgcgagttcctgacgctgtgcaacatcgtcctggactgcgccacctgtggctcctgcagctcggaggactcgtgcctctgctgctgctgct

SEQ ID NO: 156632 - DNA, 353 bp, Homo sapiens
  Payload ID: 10703
  Gene Symbol: MDFI
  Gene Name: MyoD family inhibitor
  ENST ID: ENST00000441667
  CDS Start-End: 60-353
ggagcgaggggggctggagggagagaaggaagaaggaaggggcgaacggtccggggccgatgtaccaggtgagcggccagcgcccctctggctgcgacgcgccctatggagcccccagcgcagccccgggcccagcccagaccctatccctccttcctgggctggaggtagtaacaggatccactcaccctgcggaggcagcaccagaggagggctccctggaggaggcggcaacccccatgccccaaggcaatggccctggcatcccccagggcctggacagcactgacctcgacgtccccacagaagctgtgacatgccagcctcaggggaaccccttgggctgcacccca

SEQ ID NO: 156633 - DNA, 635 bp, Homo sapiens
  Payload ID: 10703
  Gene Symbol: MDFI
  Gene Name: MyoD family inhibitor
  ENST ID: ENST00000446650
  CDS Start-End: 252-635
ccgaaatgggagaaagcagcgagtgagaggggaaggggcgccaggcgagcacccgggagccagcgggacctgggcaggggcgcccggagcaggcgcgcatggcgggccccgcgcggggatccggctggaagagagcgtagcacggctcgcacgagtgagtggacgtgggaggcgcgcatctgcgggggaatcgccccttgcccgcctccggcgccgcccgctgagccctgttttccgcaggtccggggccgatgtaccaggtgagcggccagcgcccctctggctgcgacgcgccctatggagcccccagcgcagccccgggcccagcccagaccctatccctccttcctgggctggaggtagtaacaggatccactcaccctgcggaggcagcaccagaggagggctccctggaggaggcggcaacccccatgccccaaggcaatggccctggcatcccccagggcctggacagcactgacctcgacgtccccacagaagctgtgacatgccagcctcaggggaaccccttgggctgcaccccacttctgccgaatgactctggccacccctcagagctgggcggcaccagacgggcggggaatggtgccctgggtggccccaaggcccaccgg

SEQ ID NO: 156634 - DNA, 703 bp, Homo sapiens
  Payload ID: 10703
  Gene Symbol: MDFI
  Gene Name: MyoD family inhibitor
  ENST ID: ENST00000432027
  CDS Start-End: 64-703
agacggtgaggattgccttcggaggtgggtgaggcccagcgtgcgcgcccaggtccggggccgatgtaccaggtgagcggccagcgcccctctggctgcgacgcgccctatggagcccccagcgcagccccgggcccagcccagaccctatccctccttcctgggctggaggtagtaacaggatccactcaccctgcggaggcagcaccagaggagggctccctggaggaggcggcaacccccatgccccaaggcaatggccctggcatcccccagggcctggacagcactgacctcgacgtccccacagaagctgtgacatgccagcctcaggggaaccccttgggctgcaccccacttctgccgaatgactctggccacccctcagagctgggcggcaccagacgggcggggaatggtgccctgggtggccccaaggcccaccggaagttgcagacacacccatctctcgccagccagggcagcaagaagagtaagagcagcagcaaatccaccacctcccagatccccctccaggcacaggaagactgctgtgtccactgcatcctgtcctgcctgttctgcgagttcctgacgctgtgcaacatcgtcctggactgcgccacctgtggctcctgcagctcggaggactcgtgcctctgctgctgctgctgtggctctggcgagtgtgccgactgcgacc

SEQ ID NO: 156635 - DNA, 4598 bp, Homo sapiens
  Payload ID: 10704
  Gene Symbol: MDFIC
  Gene Name: MyoD family inhibitor domain containing
  ENST ID: ENST00000257724
  CDS Start-End: 264-1331
cccaggccggctctggcctcctgacccagacagcgcagggcgcgagggatcgcgcggccgagcccgggtcgcgccgctcccagcatcggggccgctagccaagagttcgaggccttcccgatccggatgtgatgaaaaagagcaacagagggagaagtgtttcaggattgtaggagtggaagaggggaaagagaggcagagagggggaaggccccctcgcaggggagccggctggagtgagctggctggaaagagggggcggagtgcgcggagtcagagccgccaccgctgccgcagttgccgccactgcggcgtctgggctgagccggagggaggcgggaggacgcgcaggggcggccgccgccgtcgtcaggccaccggggcgaaaatgcggccgctgccggaggctcgctaactttccggggcggaagaggaggaggaggaggaggaaggggcttggagcgactacggggggatgcggagaagcagtcagttccctgcacccagcacctcacagcccttcctccgtgcgccctgccgggcggcgagctaggcggcagcggcgcggcgcgggctcggcggagcggcccatgtccggcgcgggcgaagccctcgctcccgggcccgtggggccgcagcgcgtggccgaggcgggcggcggccagctgggctccacagcccagggaaaatgtgataaagacaatactgagaaagatataactcaagctaccaatagccacttcacacatggagagatgcaagaccagtccatttggggaaatccttcggatggtgaactcattagaacccaacctcagcgcttgcctcagcttcagacttcagcccaggtgccaagtggtgaggaaataggcaagataaagaacggccacacaggtctgagcaatggaaatggaattcaccacggggccaaacacggatccgcagataatcgcaaactttcagcacctgtttctcaaaaaatgcatagaaaaattcagtccagcttgtctgtaaacagcgatatcagtaagaagagcaaagtaaatgctgtcttttcccaaaagacaggctcttcacctgaagattgttgtgtccactgtatcctggcttgcttgttctgcgaattcctgaccctttgcaacattgtcctgggacaagcgtcatgtggcatctgcacctcagaagcctgctgctgttgctgtggtgacgagatgggggatgattgtaactgcccttgtgatatggactgtggcatcatggatgcctgttgtgaatcatcagactgcttggaaatctgtatggaatgctgtggaatttgttttccttcataaatatttatcttttgtttgtgttaaaactggagagtgtttaaaaatttccttttggggggaagaaaagcacattgtaagattctcatgaaacaacatggaatttgcactgttaactcattattgtaagtaatctctgaaagcctttttactttaaccaaatctacatggtttaatatgtgaaattttaactactttaactagttttataaatttcttaatatgttacaataacttagggacattttgacaccccccttcccaaatgttaaatgccttctcctttttaccgatatttctgtttcttttaaccgttctcaggagcactttgctccaaatatattatttttcagtgtgtatttaaacgaggcagtttattttgatatgtatctattcatgattgaaaggaagcagtcttggccaggcacggtggcttacacctgtaaccctggcattttgggaggccaaggtgggcagattgcctgagctcaggagttcgagaccagccagggcaacatggtgaaaccccatctctactaaaatacaaaaagttagctgggcttggcggtgtgcgcctgtagtcccagctactcaggaggctgaggcaggagaattgcttgaacccgagaggcggaagttgcagtgagccgagattgtgccactgaactccaacctgcactccagcctgggcaacagagcgagactccatctctaaataaataaataaataaataaataaataaataaataaataaacaaaccagtctttattttaaaagaaactttaggaaacaaacccacataatagttgggaaccagtgttgatctctctcccttaccttctccacttgttcaacagactctgaatgccgactgtgtggactctcttcctcagactgtggggacagatacaattccactcctgtccacaggaacatgagatttagcagactaaggagatctgtaaagaatgaaccataccacaaggcatactgaagtgaggattataagagaaataaactcaaaatgctgttggaatatgcagagaattgctaccagaatattcagtaaggtttcagggagaatgtggcatttgaggactctcttagaatgagtgattcacctgctatttaaatgaattatttagatttttgacaaagatttaggtggacaccctaaactgtgtgtgcctttaaccagttaaaagaacagtgccttcagcatacttttttattagttgtaggaatacagctttttgaaaaagctataaagtttaaattaactaaaaatatgcattttcttacacataatttaaatgttatcatacttttttgatgaaaacataatgccttagtaaaatagctctatttaataaagaagattgagtactctgacacatttcatttaaattaggaaatttttaatattaaaatcccagtgttctgagttattgaaaggctttcttttattttgagagctttaggtctttttgggatgagaacattttagttgtttagtttgtttcttaagcagtgctattttttgtaaacacagataaatggaaaccattcttttcaatgcagaagaaatctagatatcccctactgtgaccaaatttctgtattacgattttatgttaaattaaactaatatggcaggttataatgatccttaagtgtaaagaaatcagtcaattacaagagtaattgtatagttattgagacctatagtgtgtggcttagatgaaagggagagtaaattttcataccatgctctctcctactcagtttgatctctctaaaattgtagtttggtttgatttaatataattcttagtagaaattttgaaagtatgctttgggattaataattatttttaatttttctggctgaatatcaaattgatagtaacaacagaagcataattttaggaaggctttcgcaaacctagccttttaagagaggtttttaacctgaagcatgagaatatatcacctgtggtttttcctttgagatgaaacgtagtttctagttatatcattacttaaagggcttaaaaagaaaaaacttagcaaacttttgaatctttcttttattgctatttacacatacatacacacatacaaaacctttaaattttgggatctgaatataattctggtaaacagctgtcttcatttttctcctctaaagaacttaattcatttgttacataaaatataaggaaatctttatactattttacagtaaccacaatctaaatatttacatatacccaaaattaacttatgctcatatattaggatgtgagaatatcatctgtttatggacacatgaaacctcctaatgacctggaattgttagaatatttgactttttatatgcaaagtttttcaaccaagtggtttgtctaatatttaaacatgtactggcacaatttgtgatgaaaatattagcacatttgcaataatgtttctccataacagagaatgttaatggataccagaattttatttttgtatttatgttcatagtacttttcctcttgtctactccagacagttattccataaagcatttgtataattaaaaggaaaacagaaaaaggaaaagtaggcaaatgtgaaaatagtttcaatatatcttatgatttcttaatgtaaaatgttttgttgaagtatatggctatcatgactaagtgctagaatttatagttacaggcggtgtccttttaaatgtggaaaggcttttaaaatattttaaaactggacctgtattatcctgaatacactattttgaaaatttttaaaaatgacttctttattttgctttaccgtatgtttatatctaattgacatattgactaatgtttgaaagaattcaaccataagttaaaatctgaaggttatctttatcatgtttcatccctgtctgaagatttcctagtcttcttatgtaaatcacatgactcatgtccgtaaatgaactatgaaagatatcgatcagtttatgatcattgacatgtgatttcaaaacacagtgttcttttaaaaatctataatatgtcaaaatacaagttttttttttttacatcgttttagtaagttaatttcatttatttactttggagctatatttccacttagaaaaactaaggtaattttacaatatatgctgagattaaaaaccaaggtaaaaatgatcaaacatatatgaaattgagtcttagatttaatgaatttcactcgaaaataaatgatcagaagaatt

SEQ ID NO: 156636 - DNA, 4393 bp, Homo sapiens
  Payload ID: 10704
  Gene Symbol: MDFIC
  Gene Name: MyoD family inhibitor domain containing
  Uniprot ID: Q9P1T7
  ENST ID: ENST00000393486
  CDS Start-End: 386-1126
ggaaggccccctcgcaggggagccggctggagtgagctggctggaaagagggggcggagtgcgcggagtcagagccgccaccgctgccgcagttgccgccactgcggcgtctgggctgagccggagggaggcgggaggacgcgcaggggcggccgccgccgtcgtcaggccaccggggcgaaaatgcggccgctgccggaggctcgctaactttccggggcggaagaggaggaggaggaggaggaaggggcttggagcgactacggggggatgcggagaagcagtcagttccctgcacccagcacctcacagcccttcctccgtgcgccctgccgggcggcgagctaggcggcagcggcgcggcgcgggctcggcggagcggcccatgtccggcgcgggcgaagccctcgctcccgggcccgtggggccgcagcgcgtggccgaggcgggcggcggccagctgggctccacagcccagggaaaatgtgataaagacaatactgagaaagatataactcaagctaccaatagccacttcacacatggagagatgcaagaccagtccatttggggaaatccttcggatggtgaactcattagaacccaacctcagcgcttgcctcagcttcagacttcagcccaggtgccaagtggtgaggaaataggcaagataaagaacggccacacaggtctgagcaatggaaatggaattcaccacggggccaaacacggatccgcagataatcgcaaactttcagcacctgtttctcaaaaaatgcatagaaaaattcagtccagcttgtctgtaaacagcgatatcagtaagaagagcaaagtaaatgctgtcttttcccaaaagacaggctcttcacctgaagattgttgtgtccactgtatcctggcttgcttgttctgcgaattcctgaccctttgcaacattgtcctgggacaagcgtcatgtggcatctgcacctcagaagcctgctgctgttgctgtggtgacgagatgggggatgattgtaactgcccttgtgatatggactgtggcatcatggatgcctgttgtgaatcatcagactgcttggaaatctgtatggaatgctgtggaatttgttttccttcataaatatttatcttttgtttgtgttaaaactggagagtgtttaaaaatttccttttggggggaagaaaagcacattgtaagattctcatgaaacaacatggaatttgcactgttaactcattattgtaagtaatctctgaaagcctttttactttaaccaaatctacatggtttaatatgtgaaattttaactactttaactagttttataaatttcttaatatgttacaataacttagggacattttgacaccccccttcccaaatgttaaatgccttctcctttttaccgatatttctgtttcttttaaccgttctcaggagcactttgctccaaatatattatttttcagtgtgtatttaaacgaggcagtttattttgatatgtatctattcatgattgaaaggaagcagtcttggccaggcacggtggcttacacctgtaaccctggcattttgggaggccaaggtgggcagattgcctgagctcaggagttcgagaccagccagggcaacatggtgaaaccccatctctactaaaatacaaaaagttagctgggcttggcggtgtgcgcctgtagtcccagctactcaggaggctgaggcaggagaattgcttgaacccgagaggcggaagttgcagtgagccgagattgtgccactgaactccaacctgcactccagcctgggcaacagagcgagactccatctctaaataaataaataaataaataaataaataaataaataaataaacaaaccagtctttattttaaaagaaactttaggaaacaaacccacataatagttgggaaccagtgttgatctctctcccttaccttctccacttgttcaacagactctgaatgccgactgtgtggactctcttcctcagactgtggggacagatacaattccactcctgtccacaggaacatgagatttagcagactaaggagatctgtaaagaatgaaccataccacaaggcatactgaagtgaggattataagagaaataaactcaaaatgctgttggaatatgcagagaattgctaccagaatattcagtaaggtttcagggagaatgtggcatttgaggactctcttagaatgagtgattcacctgctatttaaatgaattatttagatttttgacaaagatttaggtggacaccctaaactgtgtgtgcctttaaccagttaaaagaacagtgccttcagcatacttttttattagttgtaggaatacagctttttgaaaaagctataaagtttaaattaactaaaaatatgcattttcttacacataatttaaatgttatcatacttttttgatgaaaacataatgccttagtaaaatagctctatttaataaagaagattgagtactctgacacatttcatttaaattaggaaatttttaatattaaaatcccagtgttctgagttattgaaaggctttcttttattttgagagctttaggtctttttgggatgagaacattttagttgtttagtttgtttcttaagcagtgctattttttgtaaacacagataaatggaaaccattcttttcaatgcagaagaaatctagatatcccctactgtgaccaaatttctgtattacgattttatgttaaattaaactaatatggcaggttataatgatccttaagtgtaaagaaatcagtcaattacaagagtaattgtatagttattgagacctatagtgtgtggcttagatgaaagggagagtaaattttcataccatgctctctcctactcagtttgatctctctaaaattgtagtttggtttgatttaatataattcttagtagaaattttgaaagtatgctttgggattaataattatttttaatttttctggctgaatatcaaattgatagtaacaacagaagcataattttaggaaggctttcgcaaacctagccttttaagagaggtttttaacctgaagcatgagaatatatcacctgtggtttttcctttgagatgaaacgtagtttctagttatatcattacttaaagggcttaaaaagaaaaaacttagcaaacttttgaatctttcttttattgctatttacacatacatacacacatacaaaacctttaaattttgggatctgaatataattctggtaaacagctgtcttcatttttctcctctaaagaacttaattcatttgttacataaaatataaggaaatctttatactattttacagtaaccacaatctaaatatttacatatacccaaaattaacttatgctcatatattaggatgtgagaatatcatctgtttatggacacatgaaacctcctaatgacctggaattgttagaatatttgactttttatatgcaaagtttttcaaccaagtggtttgtctaatatttaaacatgtactggcacaatttgtgatgaaaatattagcacatttgcaataatgtttctccataacagagaatgttaatggataccagaattttatttttgtatttatgttcatagtacttttcctcttgtctactccagacagttattccataaagcatttgtataattaaaaggaaaacagaaaaaggaaaagtaggcaaatgtgaaaatagtttcaatatatcttatgatttcttaatgtaaaatgttttgttgaagtatatggctatcatgactaagtgctagaatttatagttacaggcggtgtccttttaaatgtggaaaggcttttaaaatattttaaaactggacctgtattatcctgaatacactattttgaaaatttttaaaaatgacttctttattttgctttaccgtatgtttatatctaattgacatattgactaatgtttgaaagaattcaaccataagttaaaatctgaaggttatctttatcatgtttcatccctgtctgaagatttcctagtcttcttatgtaaatcacatgactcatgtccgtaaatgaactatgaaagatatcgatcagtttatgatcattgacatgtgatttcaaaacacagtgttcttttaaaaatctataatatgtcaaaatacaagttttttttttttacatcgttttagtaagttaatttcatttatttactttggagctatatttccacttagaaaaactaaggtaattttacaatatatgctgagattaaaaaccaaggtaaaaatgatcaaacatatatgaaattgagtcttagatttaatgaatttcactcgaaaataaatgatcagaagaatt

SEQ ID NO: 156637 - DNA, 647 bp, Homo sapiens
  Payload ID: 10704
  Gene Symbol: MDFIC
  Gene Name: MyoD family inhibitor domain containing
  ENST ID: ENST00000427207
  CDS Start-End: 1-471
ccgcagcgcgtggccgaggcgggcggcggccagctgggctccacagcccagggaaaatgtgataaagacaatactgagaaagatataactcaagctaccaatagccacttcacacatggagagatgcaagaccagtccatttggggaaatccttcggatggtgaactcattagaacccaacctcagcgcttgcctcagcttcagacttcagcccaggtgccaagtggtgaggaaataggcaagataaagaacggccacacaggtctgagcaatggaaatggaattcaccacggggccaaacacggatccgcagataatcgcaaactttcagcacctgtttctcaaaaaatgcatagaaaaattcagtccagcttgtctgtaaacagcgatatcagtaagaagagcaaagtaaatgctgtcttttcccaaaagacaggctcttcacctgaagacaaacaggaattttggtaaaatgcagattaactttcccaaaggaaagcacaagatagaaaaggaagcagtggcagctgacatcctgcttttagataatcgtcttctagagtgaatagtcattactttaaatataactgctatacttctttttttaatgccacatttaaaaatataaatacaacattttgatggca

SEQ ID NO: 156638 - DNA, 474 bp, Homo sapiens
  Payload ID: 10704
  Gene Symbol: MDFIC
  Gene Name: MyoD family inhibitor domain containing
  ENST ID: ENST00000423503
  CDS Start-End: 181-312
gaacgtcccgcaggggtggtgtgctcttctctaaaaacatttttttttttaattttgtatatttttccgccagaagcagtcagttccctgcacccagcacctcacagcccttcctccgtgcgccctgccgggcggcgagctaggcggcagcggcgcggcgcgggctcggcggagcggcccatgtccggcgcgggcgaagccctcgctcccgggcccgtggggccgcagcgcgtggccgaggcgggcggcggccagctgggctccacagcccagggtctcttcagcagatccaggactgccgcagctctctgaacaagcgtgcacttactccatttcatctttctgtttcttgttggctcctctaccacccggttgataattcaggtttctgtgaccagtagctttggaatggcttatgcttgttttcaataactggtttgttttgaaataaataaacaaggtttataagaaaca

SEQ ID NO: 156639 - DNA, 484 bp, Homo sapiens
  Payload ID: 10704
  Gene Symbol: MDFIC
  Gene Name: MyoD family inhibitor domain containing
  ENST ID: ENST00000448022
  CDS Start-End: 184-315
ctcgctaactttccggggcggaagaggaggaggaggaggaggaaggggcttggagcgactacggggggatgcggagaagcagtcagttccctgcacccagcacctcacagcccttcctccgtgcgccctgccgggcggcgagctaggcggcagcggcgcggcgcgggctcggcggagcggcccatgtccggcgcgggcgaagccctcgctcccgggcccgtggggccgcagcgcgtggccgaggcgggcggcggccagctgggctccacagcccagggtctcttcagcagatccaggactgccgcagctctctgaacaagcgtgcacttactccatttcatctttctgtttcttgttggctcctctaccacccggttgataattcaggtttctgtgaccagtagctttggaatggcttatgcttgttttcaataactggtttgttttgaaataaataaacaaggtttataagaaacactttcca

SEQ ID NO: 156640 - DNA, 808 bp, Homo sapiens
  Payload ID: 10704
  Gene Symbol: MDFIC
  Gene Name: MyoD family inhibitor domain containing
  ENST ID: ENST00000431629
  CDS Start-End: 1-471
gggcccgtggggccgcagcgcgtggccgaggcgggcggcggccagctgggctccacagcccagggaaaatgtgataaagacaatactgagaaagatataactcaagctaccaatagccacttcacacatggagagatgcaagaccagtccatttggggaaatccttcggatggtgaactcattagaacccaacctcagcgcttgcctcagcttcagacttcagcccaggtgccaagtggtgaggaaataggcaagataaagaacggccacacaggtctgagcaatggaaatggaattcaccacggggccaaacacggatccgcagataatcgcaaactttcagcacctgtttctcaaaaaatgcatagaaaaattcagtccagcttgtctgtaaacagcgatatcagtaagaagagcaaagtaaatgctgtcttttcccaaaagacaggctcttcacctgaagtttgctgacactccatcgaaggcacttaattttaatgccaaatacagaaacacaaaggacatgtgacaatgattgttgtgtccactgtatcctggcttgcttgttctgcgaattcctgaccctttgcaacattgtcctgggacaagcgtcatgtggcatctgcacctcagaagcctgctgctgttgctgtggtgacgagatgggggatgattgtaactgcccttgtgatatggactgtggcatcatggatgcctgttgtgaatcatcagactgcttggaaatctgtatggaatgctgtggaatttgttttccttcataaatatttatcttttgtttgtgttaaaa

SEQ ID NO: 156641 - DNA, 584 bp, Homo sapiens
  Payload ID: 10704
  Gene Symbol: MDFIC
  Gene Name: MyoD family inhibitor domain containing
  ENST ID: ENST00000498196
  CDS Start-End: 179-584
agtgaaaattttagggaagtagattttagccaaatgtgaggatggtccgaataattaaaactctgaaagtggaataagctattttctgaggctgtttctctatccctgaaaatgtgataaagacaatactgagaaagatataactcaagctaccaatagccacttcacacatggagagatgcaagaccagtccatttggggaaatccttcggatggtgaactcattagaacccaacctcagcgcttgcctcagcttcagacttcagcccaggtgccaagtggtgaggaaataggcaagataaagaacggccacacaggtctgagcaatggaaatggaattcaccacggggccaaacacggatccgcagataatcgcaaactttcagcacctgtttctcaaaaaatgcatagaaaaattcagtccagcttgtctgtaaacagcgatatcagtaagaagagcaaagtaaatgctgtcttttcccaaaagacaggctcttcacctgaagattgttgtgtccactgtatcctggcttgcttgttctgcgaattcctgaccctttgcaacattgtcctgggacaagcgt

SEQ ID NO: 156642 - DNA, 5312 bp, Homo sapiens
  Payload ID: 10704
  Gene Symbol: MDFIC
  Gene Name: MyoD family inhibitor domain containing
  ENST ID: ENST00000614186
  CDS Start-End: 264-1331
cccaggccggctctggcctcctgacccagacagcgcagggcgcgagggatcgcgcggccgagcccgggtcgcgccgctcccagcatcggggccgctagccaagagttcgaggccttcccgatccggatgtgatgaaaaagagcaacagagggagaagtgtttcaggattgtaggagtggaagaggggaaagagaggcagagagggggaaggccccctcgcaggggagccggctggagtgagctggctggaaagagggggcggagtgcgcggagtcagagccgccaccgctgccgcagttgccgccactgcggcgtctgggctgagccggagggaggcgggaggacgcgcaggggcggccgccgccgtcgtcaggccaccggggcgaaaatgcggccgctgccggaggctcgctaactttccggggcggaagaggaggaggaggaggaggaaggggcttggagcgactacggggggatgcggagaagcagtcagttccctgcacccagcacctcacagcccttcctccgtgcgccctgccgggcggcgagctaggcggcagcggcgcggcgcgggctcggcggagcggcccatgtccggcgcgggcgaagccctcgctcccgggcccgtggggccgcagcgcgtggccgaggcgggcggcggccagctgggctccacagcccagggaaaatgtgataaagacaatactgagaaagatataactcaagctaccaatagccacttcacacatggagagatgcaagaccagtccatttggggaaatccttcggatggtgaactcattagaacccaacctcagcgcttgcctcagcttcagacttcagcccaggtgccaagtggtgaggaaataggcaagataaagaacggccacacaggtctgagcaatggaaatggaattcaccacggggccaaacacggatccgcagataatcgcaaactttcagcacctgtttctcaaaaaatgcatagaaaaattcagtccagcttgtctgtaaacagcgatatcagtaagaagagcaaagtaaatgctgtcttttcccaaaagacaggctcttcacctgaagattgttgtgtccactgtatcctggcttgcttgttctgcgaattcctgaccctttgcaacattgtcctgggacaagcgtcatgtggcatctgcacctcagaagcctgctgctgttgctgtggtgacgagatgggggatgattgtaactgcccttgtgatatggactgtggcatcatggatgcctgttgtgaatcatcagactgcttggaaatctgtatggaatgctgtggaatttgttttccttcataaatatttatcttttgtttgtgttaaaactggagagtgtttaaaaatttccttttggggggaagaaaagcacattgtaagattctcatgaaacaacatggaatttgcactgttaactcattattgtaagtaatctctgaaagcctttttactttaaccaaatctacatggtttaatatgtgaaattttaactactttaactagttttataaatttcttaatatgttacaataacttagggacattttgacaccccccttcccaaatgttaaatgccttctcctttttaccgatatttctgtttcttttaaccgttctcaggagcactttgctccaaatatattatttttcagtgtgtatttaaacgaggcagtttattttgatatgtatctattcatgattgaaaggaagcagtcttggccaggcacggtggcttacacctgtaaccctggcattttgggaggccaaggtgggcagattgcctgagctcaggagttcgagaccagccagggcaacatggtgaaaccccatctctactaaaatacaaaaagttagctgggcttggcggtgtgcgcctgtagtcccagctactcaggaggctgaggcaggagaattgcttgaacccgagaggcggaagttgcagtgagccgagattgtgccactgaactccaacctgcactccagcctgggcaacagagcgagactccatctctaaataaataaataaataaataaataaataaataaataaataaacaaaccagtctttattttaaaagaaactttaggaaacaaacccacataatagttgggaaccagtgttgatctctctcccttaccttctccacttgttcaacagactctgaatgccgactgtgtggactctcttcctcagactgtggggacagatacaattccactcctgtccacaggaacatgagatttagcagactaaggagatctgtaaagaatgaaccataccacaaggcatactgaagtgaggattataagagaaataaactcaaaatgctgttggaatatgcagagaattgctaccagaatattcagtaaggtttcagggagaatgtggcatttgaggactctcttagaatgagtgattcacctgctatttaaatgaattatttagatttttgacaaagatttaggtggacaccctaaactgtgtgtgcctttaaccagttaaaagaacagtgccttcagcatacttttttattagttgtaggaatacagctttttgaaaaagctataaagtttaaattaactaaaaatatgcattttcttacacataatttaaatgttatcatacttttttgatgaaaacataatgccttagtaaaatagctctatttaataaagaagattgagtactctgacacatttcatttaaattaggaaatttttaatattaaaatcccagtgttctgagttattgaaaggctttcttttattttgagagctttaggtctttttgggatgagaacattttagttgtttagtttgtttcttaagcagtgctattttttgtaaacacagataaatggaaaccattcttttcaatgcagaagaaatctagatatcccctactgtgaccaaatttctgtattacgattttatgttaaattaaactaatatggcaggttataatgatccttaagtgtaaagaaatcagtcaattacaagagtaattgtatagttattgagacctatagtgtgtggcttagatgaaagggagagtaaattttcataccatgctctctcctactcagtttgatctctctaaaattgtagtttggtttgatttaatataattcttagtagaaattttgaaagtatgctttgggattaataattatttttaatttttctggctgaatatcaaattgatagtaacaacagaagcataattttaggaaggctttcgcaaacctagccttttaagagaggtttttaacctgaagcatgagaatatatcacctgtggtttttcctttgagatgaaacgtagtttctagttatatcattacttaaagggcttaaaaagaaaaaacttagcaaacttttgaatctttcttttattgctatttacacatacatacacacatacaaaacctttaaattttgggatctgaatataattctggtaaacagctgtcttcatttttctcctctaaagaacttaattcatttgttacataaaatataaggaaatctttatactattttacagtaaccacaatctaaatatttacatatacccaaaattaacttatgctcatatattaggatgtgagaatatcatctgtttatggacacatgaaacctcctaatgacctggaattgttagaatatttgactttttatatgcaaagtttttcaaccaagtggtttgtctaatatttaaacatgtactggcacaatttgtgatgaaaatattagcacatttgcaataatgtttctccataacagagaatgttaatggataccagaattttatttttgtatttatgttcatagtacttttcctcttgtctactccagacagttattccataaagcatttgtataattaaaaggaaaacagaaaaaggaaaagtaggcaaatgtgaaaatagtttcaatatatcttatgatttcttaatgtaaaatgttttgttgaagtatatggctatcatgactaagtgctagaatttatagttacaggcggtgtccttttaaatgtggaaaggcttttaaaatattttaaaactggacctgtattatcctgaatacactattttgaaaatttttaaaaatgacttctttattttgctttaccgtatgtttatatctaattgacatattgactaatgtttgaaagaattcaaccataagttaaaatctgaaggttatctttatcatgtttcatccctgtctgaagatttcctagtcttcttatgtaaatcacatgactcatgtccgtaaatgaactatgaaagatatcgatcagtttatgatcattgacatgtgatttcaaaacacagtgttcttttaaaaatctataatatgtcaaaatacaagttttttttttttacatcgttttagtaagttaatttcatttatttactttggagctatatttccacttagaaaaactaaggtaattttacaatatatgctgagattaaaaaccaaggtaaaaatgatcaaacatatatgaaattgagtcttagatttaatgaatttcactcgaaaataaatgatcagaagaattttcatctaaggcatagagtggcgaaatttttgtaaatgctcgcagttagcatctaactaaaacaatacagtatgactttatttaggagaaggctttttatttagaaaattattttttcatttttacagtgtatcaactgtatccattttcctcacctggatagtcaatgttatctgagcagttcaaggagtaaccaaggcaaccttatgtaataactttccattctttatccatacaaactctttcagtgccctagattctaatgttataaacgtcaaacatcactgcccaacataaataagactcgagacttattaacataaataagtatcttgccttcttgaatgctagttaaatgcttagatttacctaactgcctaatgaatcaggttatttgttaataagattatttttcaaattatttaagacctttatgccccttccaattacttgtgatttgtaggcctgtaggattgttgcatctaatctgactggcaacagaaaatgtcatcaaatactataatatccattttgttttcttttgcactaatacaacagaacatatcatttttgttttaaacaatggttaatatattaatagggtttgttccacacttactatttatagtttttataatcaagcattgggtattaaaagagaatcctttcaacccttcatcttcgtatgcttatacaataaattgcagtgagtgt

SEQ ID NO: 156643 - DNA, 6680 bp, Homo sapiens
  Payload ID: 10705
  Gene Symbol: MYOF
  Gene Name: myoferlin
  Uniprot ID: Q9NZM1
  ENST ID: ENST00000358334
  CDS Start-End: 1-6147
atgctgcgagtgattgtggaatctgccagcaatatccctaaaacgaaatttggcaagccggatcctattgtttctgtcatttttaaggatgagaaaaagaaaacaaagaaagttgataatgaattgaaccctgtctggaatgagattttggagtttgacttgaggggtataccactggacttttcatcttcccttgggattattgtgaaagattttgagacaattggacaaaataaattaattggcacggcgactgtagccctgaaggacctgactggtgaccagagcagatccctgccgtacaagctgatctccctgctaaatgaaaaagggcaagatactggggccaccattgacttggtgatcggctatgatccgccttctgctccacatccaaatgacctgagcgggcccagcgtgccaggcatgggaggagatggggaagaagatgaaggtgatgaagacaggttggacaatgcagtcaggggccctgggcccaaggggccagttgggacggtgtcggaagctcagcttgctcggaggctcaccaaagtaaagaacagccggcggatgctgtcaaataagccacaggacttccagatccgcgtccgagtgattgagggccgacagttaagtggtaacaacataaggcctgtggtcaaagttcacgtctgtggccagacacaccgaacaagaatcaagagaggaaacaaccctttttttgatgagttgtttttctacaatgtcaacatgaccccttctgaattgatggatgagatcatcagcatccgggtttataattctcactctctgcgggcagattgtctgatgggggaatttaagattgatgttggatttgtttatgatgaacctggccatgctgtcatgagaaagtggcttcttctcaatgacccggaagataccagttcaggttctaaaggttatatgaaagtcagcatgtttgtcctgggaaccggagatgagcctcctcctgagagacgagatcgtgataatgacagtgatgatgtggagagtaatttgttactccctgctggcattgccctccggtgggtgaccttcttgctgaaaatctaccgagctgaggacatcccccagatggatgatgccttctcacagacagtaaaggaaatatttggaggcaatgcagataagaaaaatctcgtggatccttttgtagaagtttcctttgctggaaaaaaggtttgtacaaacataattgagaaaaatgcaaacccagagtggaatcaggtcgtcaatcttcagatcaagtttccttcagtgtgtgaaaaaataaaactaacaatatatgactgggaccgtcttactaaaaatgatgtagttggaacaacatatctacacctctctaaaattgctgcctctggtggggaagtggaagtaaacacaggagaaacagaggtaggctttgttccaacgtttggaccttgttacctgaatctttatggaagccccagagagtacacgggattcccagacccctatgatgagctgaatactggaaagggggaaggagttgcctacagaggcaggatcttggttgaattagccacttttcttgagaagacaccaccagataaaaagcttgagcccatttcaaatgatgacctgctggttgttgagaaataccagcgaaggcggaagtacagcctgtctgccgtgtttcattcagccaccatgttgcaagatgttggtgaggccattcagtttgaagtcagcattgggaactatggcaacaagtttgacaccacctgtaagcctttggcatcaacaactcagtacagccgtgctgtatttgatggcaactactattattacttgccttgggcccacaccaagccagttgttaccctgacttcatactgggaggatattagtcatcgcctggatgcggtgaacactctcctagctatggcagaacggctgcaaacaaatatagaagctctaaaatcagggatacaaggtaaaattcctgcaaaccagctggctgaattgtggctgaagctgatagatgaagttatagaagacacgagatacacgttgcctctcacagaaggaaaagccaacgtcacagttctcgatactcagatccgaaagctgcggtccaggtctctctcccaaatacatgaggcggctgtgaggatgaggtcggaagccacagatgtgaagtccacactggcagaaattgaggactggcttgataaattaatgcagctgactgaagagccacagaacagcatgcctgacatcatcatctggatgatccggggagagaagagactggcctatgcacgaattcccgcacatcaggtcttgtactccaccagtggtgagaatgcatctggaaaatactgtgggaaaacccaaaccatctttctgaagtatccacaggagaaaaacaacgggccaaaggtgcctgtggagttgcgagtgaacatctggctaggcttaagtgctgtggagaagaagtttaacagcttcgcagaaggaactttcaccgtctttgctgaaatgtatgaaaatcaagctctcatgtttggaaaatggggtacttctggattagtaggacgtcataagttttctgatgtcacaggaaaaataaaactcaagagggaattttttctgcctccaaaaggctgggaatgggaaggagagtggatagttgatcctgaaagaagcttgctgactgaggcagatgcaggtcacacggagttcactgatgaagtctatcagaacgagagccgctaccccgggggcgactggaagccggccgaggacacctacacggatgcgaacggcgataaagcagcatcacccagcgagttgacttgtcctccaggttgggaatgggaagatgatgcatggtcttatgacataaatcgagcggtggatgagaaaggctgggaatatggaatcaccattcctcctgatcataagcccaaatcctgggttgcagcagagaaaatgtaccacactcatagacggcgaaggctggtccgaaaacgcaagaaagatttaacacagactgcttcaagcaccgcaagggccatggaggaattgcaagaccaagagggctgggaatatgcttctctaattggctggaaatttcactggaaacaacgtagttcagataccttccgccgcagacgctggaggagaaaaatggctccttcagaaacacatggtgcagctgccatctttaaacttgaaggtgcccttggggcagacactaccgaagatggggatgagaagagcctggagaaacagaagcacagtgccaccactgtgttcggagcaaacacccccattgtttcctgcaattttgacagagtctacatctaccatctgcgctgctatgtctatcaagccagaaacctcttggctttagataaggatagcttttcagatccatatgctcatatctgtttcctccatcggagcaaaaccactgagatcatccattcaaccctgaatcccacgtgggaccaaacaattatattcgatgaagttgaaatctatggggaaccccaaacagttctacagaatccacccaaagttatcatggaactttttgacaatgaccaagtgggcaaagatgaatttttaggacgaagcattttctctcctgtggtgaaactgaactcagaaatggacatcacacccaaacttctctggcacccagtaatgaatggagacaaagcctgcggggatgttcttgtaactgcagagctgattctgaggggcaaggatggctccaaccttcccattcttccccctcaaagggcgccaaatctatacatggtcccccaggggatcaggcctgtggtccagctcactgccattgagattctagcttggggcttaagaaatatgaaaaacttccagatggcttctatcacatcccccagtcttgttgtggagtgtggaggagaaagggtggaatcggtggtgatcaaaaaccttaagaagacacccaactttccaagttctgttctcttcatgaaagtgttcttgcccaaggaggaattgtacatgcccccactggtgatcaaggtcatcgaccacaggcagtttgggcggaagcctgtcgtcggccagtgcaccatcgagcgcctggaccgctttcgctgtgacccttatgcagggaaagaggacatcgtcccacagctcaaagcctcccttctgtctgccccaccatgccgggacatcgttatcgaaatggaagacaccaaaccattactggcttctaagctgacagaaaaggaggaagaaatcgtggactggtggagtaaattttatgcttcctcaggggaacatgaaaaatgcggacagtatattcagaaaggctattccaagctcaagatatataattgtgaactagaaaatgtagcagaatttgagggcctgacagacttctcagatacgttcaagttgtaccgaggcaagtcggatgaaaatgaagatccttctgtggttggagagtttaagggctcctttcggatctaccctctgccggatgaccccagcgtgccagcccctcccagacagtttcgggaattacctgacagcgtcccacaggaatgcacggttaggatttacattgttcgaggcttagagctccagccccaggacaacaatggcctgtgtgacccttacataaaaataacactgggcaaaaaagtcattgaagaccgagatcactacattcccaacactctcaacccagtctttggcaggatgtacgaactgagctgctacttacctcaagaaaaagacctgaaaatttctgtctatgattatgacacctttacccgggatgaaaaagtaggagaaacaattattgatctggaaaaccgattcctttcccgctttgggtcccactgcggcataccagaggagtactgtgtttctggagtcaatacctggcgagatcaactgagaccaacacagctgcttcaaaatgtcgccagattcaaaggcttcccacaacccatcctttccgaagatgggagtagaatcagatatggaggacgagactacagcttggatgaatttgaagccaacaaaatcctgcaccagcacctcggggcccctgaagagcggcttgctcttcacatcctcaggactcaggggctggtccctgagcacgtggaaacaaggactttgcacagcaccttccagcccaacatttcccagggaaaacttcagatgtgggtggatgttttccccaagagtttggggccaccaggccctcctttcaacatcacaccccggaaagccaagaaatactacctgcgtgtgatcatctggaacaccaaggacgttatcttggacgagaaaagcatcacaggagaggaaatgagtgacatctacgtcaaaggctggattcctggcaatgaagaaaacaaacagaaaacagatgtccattacagatctttggatggtgaagggaattttaactggcgatttgttttcccgtttgactaccttccagccgaacaactctgtatcgttgcgaaaaaagagcatttctggagtattgaccaaacggaatttcgaatcccacccaggctgatcattcagatatgggacaatgacaagttttctctggatgactacttgggtttcctagaacttgacttgcgtcacacgatcattcctgcaaaatcaccagagaaatgcagattggacatgattccggacctcaaagccatgaacccccttaaagccaagacagcctccctctttgagcagaagtccatgaaaggatggtggccatgctacgcagagaaagatggcgcccgcgtaatggctgggaaagtggagatgacattggaaatcctcaacgagaaggaggccgacgagaggccagccgggaaggggcgggacgaacccaacatgaaccccaagctggacttaccaaatcgaccagaaacctccttcctctggttcaccaacccatgcaagaccatgaagttcatcgtgtggcgccgctttaagtgggtcatcatcggcttgctgttcctgcttatcctgctgctcttcgtggccgtgctcctctactctttgccgaactatttgtcaatgaagattgtaaagccaaatgtgtaacaaaggcaaaggcttcatttcaagagtcatccagcaatgagagaatcctgcctctgtagaccaacatccagtgtgattttgtgtctgagaccacaccccagtagcaggttacgccatgtcaccgagccccattgattcccagagggtcttagtcctggaaagtcaggccaacaagcaacgtttgcatcatgttatctcttaagtattaaaagttttattttctaaagtttaaatcatgtttttcaaaatatttttcaaggtggctggttccatttaaaaatcatctttttatatgtgtcttcggttctagacttcagcttttggaaattgctaaatagaattcaaaaatctctgcatcctgaggtgatatacttcatatttgtaatcaactgaaagagctgtgcattataaaatcagttagaatagttagaacaattcttatttatgcccacaaccattgctatattttgtatggatgtcataaaagtctatttaacctctgtaatgaaactaaataaaaatgtttcaccttt

SEQ ID NO: 156644 - DNA, 6719 bp, Homo sapiens
  Payload ID: 10705
  Gene Symbol: MYOF
  Gene Name: myoferlin
  Uniprot ID: Q9NZM1
  ENST ID: ENST00000359263
  CDS Start-End: 1-6186
atgctgcgagtgattgtggaatctgccagcaatatccctaaaacgaaatttggcaagccggatcctattgtttctgtcatttttaaggatgagaaaaagaaaacaaagaaagttgataatgaattgaaccctgtctggaatgagattttggagtttgacttgaggggtataccactggacttttcatcttcccttgggattattgtgaaagattttgagacaattggacaaaataaattaattggcacggcgactgtagccctgaaggacctgactggtgaccagagcagatccctgccgtacaagctgatctccctgctaaatgaaaaagggcaagatactggggccaccattgacttggtgatcggctatgatccgccttctgctccacatccaaatgacctgagcgggcccagcgtgccaggcatgggaggagatggggaagaagatgaaggtgatgaagacaggttggacaatgcagtcaggggccctgggcccaaggggccagttgggacggtgtcggaagctcagcttgctcggaggctcaccaaagtaaagaacagccggcggatgctgtcaaataagccacaggacttccagatccgcgtccgagtgattgagggccgacagttaagtggtaacaacataaggcctgtggtcaaagttcacgtctgtggccagacacaccgaacaagaatcaagagaggaaacaaccctttttttgatgagttgtttttctacaatgtcaacatgaccccttctgaattgatggatgagatcatcagcatccgggtttataattctcactctctgcgggcagattgtctgatgggggaatttaagattgatgttggatttgtttatgatgaacctggccatgctgtcatgagaaagtggcttcttctcaatgacccggaagataccagttcaggttctaaaggttatatgaaagtcagcatgtttgtcctgggaaccggagatgagcctcctcctgagagacgagatcgtgataatgacagtgatgatgtggagagtaatttgttactccctgctggcattgccctccggtgggtgaccttcttgctgaaaatctaccgagctgaggacatcccccagatggatgatgccttctcacagacagtaaaggaaatatttggaggcaatgcagataagaaaaatctcgtggatccttttgtagaagtttcctttgctggaaaaaaggtttgtacaaacataattgagaaaaatgcaaacccagagtggaatcaggtcgtcaatcttcagatcaagtttccttcagtgtgtgaaaaaataaaactaacaatatatgactgggaccgtcttactaaaaatgatgtagttggaacaacatatctacacctctctaaaattgctgcctctggtggggaagtggaagatttctcatcttcgggaactggggctgcatcatatacagtaaacacaggagaaacagaggtaggctttgttccaacgtttggaccttgttacctgaatctttatggaagccccagagagtacacgggattcccagacccctatgatgagctgaatactggaaagggggaaggagttgcctacagaggcaggatcttggttgaattagccacttttcttgagaagacaccaccagataaaaagcttgagcccatttcaaatgatgacctgctggttgttgagaaataccagcgaaggcggaagtacagcctgtctgccgtgtttcattcagccaccatgttgcaagatgttggtgaggccattcagtttgaagtcagcattgggaactatggcaacaagtttgacaccacctgtaagcctttggcatcaacaactcagtacagccgtgctgtatttgatggcaactactattattacttgccttgggcccacaccaagccagttgttaccctgacttcatactgggaggatattagtcatcgcctggatgcggtgaacactctcctagctatggcagaacggctgcaaacaaatatagaagctctaaaatcagggatacaaggtaaaattcctgcaaaccagctggctgaattgtggctgaagctgatagatgaagttatagaagacacgagatacacgttgcctctcacagaaggaaaagccaacgtcacagttctcgatactcagatccgaaagctgcggtccaggtctctctcccaaatacatgaggcggctgtgaggatgaggtcggaagccacagatgtgaagtccacactggcagaaattgaggactggcttgataaattaatgcagctgactgaagagccacagaacagcatgcctgacatcatcatctggatgatccggggagagaagagactggcctatgcacgaattcccgcacatcaggtcttgtactccaccagtggtgagaatgcatctggaaaatactgtgggaaaacccaaaccatctttctgaagtatccacaggagaaaaacaacgggccaaaggtgcctgtggagttgcgagtgaacatctggctaggcttaagtgctgtggagaagaagtttaacagcttcgcagaaggaactttcaccgtctttgctgaaatgtatgaaaatcaagctctcatgtttggaaaatggggtacttctggattagtaggacgtcataagttttctgatgtcacaggaaaaataaaactcaagagggaattttttctgcctccaaaaggctgggaatgggaaggagagtggatagttgatcctgaaagaagcttgctgactgaggcagatgcaggtcacacggagttcactgatgaagtctatcagaacgagagccgctaccccgggggcgactggaagccggccgaggacacctacacggatgcgaacggcgataaagcagcatcacccagcgagttgacttgtcctccaggttgggaatgggaagatgatgcatggtcttatgacataaatcgagcggtggatgagaaaggctgggaatatggaatcaccattcctcctgatcataagcccaaatcctgggttgcagcagagaaaatgtaccacactcatagacggcgaaggctggtccgaaaacgcaagaaagatttaacacagactgcttcaagcaccgcaagggccatggaggaattgcaagaccaagagggctgggaatatgcttctctaattggctggaaatttcactggaaacaacgtagttcagataccttccgccgcagacgctggaggagaaaaatggctccttcagaaacacatggtgcagctgccatctttaaacttgaaggtgcccttggggcagacactaccgaagatggggatgagaagagcctggagaaacagaagcacagtgccaccactgtgttcggagcaaacacccccattgtttcctgcaattttgacagagtctacatctaccatctgcgctgctatgtctatcaagccagaaacctcttggctttagataaggatagcttttcagatccatatgctcatatctgtttcctccatcggagcaaaaccactgagatcatccattcaaccctgaatcccacgtgggaccaaacaattatattcgatgaagttgaaatctatggggaaccccaaacagttctacagaatccacccaaagttatcatggaactttttgacaatgaccaagtgggcaaagatgaatttttaggacgaagcattttctctcctgtggtgaaactgaactcagaaatggacatcacacccaaacttctctggcacccagtaatgaatggagacaaagcctgcggggatgttcttgtaactgcagagctgattctgaggggcaaggatggctccaaccttcccattcttccccctcaaagggcgccaaatctatacatggtcccccaggggatcaggcctgtggtccagctcactgccattgagattctagcttggggcttaagaaatatgaaaaacttccagatggcttctatcacatcccccagtcttgttgtggagtgtggaggagaaagggtggaatcggtggtgatcaaaaaccttaagaagacacccaactttccaagttctgttctcttcatgaaagtgttcttgcccaaggaggaattgtacatgcccccactggtgatcaaggtcatcgaccacaggcagtttgggcggaagcctgtcgtcggccagtgcaccatcgagcgcctggaccgctttcgctgtgacccttatgcagggaaagaggacatcgtcccacagctcaaagcctcccttctgtctgccccaccatgccgggacatcgttatcgaaatggaagacaccaaaccattactggcttctaagctgacagaaaaggaggaagaaatcgtggactggtggagtaaattttatgcttcctcaggggaacatgaaaaatgcggacagtatattcagaaaggctattccaagctcaagatatataattgtgaactagaaaatgtagcagaatttgagggcctgacagacttctcagatacgttcaagttgtaccgaggcaagtcggatgaaaatgaagatccttctgtggttggagagtttaagggctcctttcggatctaccctctgccggatgaccccagcgtgccagcccctcccagacagtttcgggaattacctgacagcgtcccacaggaatgcacggttaggatttacattgttcgaggcttagagctccagccccaggacaacaatggcctgtgtgacccttacataaaaataacactgggcaaaaaagtcattgaagaccgagatcactacattcccaacactctcaacccagtctttggcaggatgtacgaactgagctgctacttacctcaagaaaaagacctgaaaatttctgtctatgattatgacacctttacccgggatgaaaaagtaggagaaacaattattgatctggaaaaccgattcctttcccgctttgggtcccactgcggcataccagaggagtactgtgtttctggagtcaatacctggcgagatcaactgagaccaacacagctgcttcaaaatgtcgccagattcaaaggcttcccacaacccatcctttccgaagatgggagtagaatcagatatggaggacgagactacagcttggatgaatttgaagccaacaaaatcctgcaccagcacctcggggcccctgaagagcggcttgctcttcacatcctcaggactcaggggctggtccctgagcacgtggaaacaaggactttgcacagcaccttccagcccaacatttcccagggaaaacttcagatgtgggtggatgttttccccaagagtttggggccaccaggccctcctttcaacatcacaccccggaaagccaagaaatactacctgcgtgtgatcatctggaacaccaaggacgttatcttggacgagaaaagcatcacaggagaggaaatgagtgacatctacgtcaaaggctggattcctggcaatgaagaaaacaaacagaaaacagatgtccattacagatctttggatggtgaagggaattttaactggcgatttgttttcccgtttgactaccttccagccgaacaactctgtatcgttgcgaaaaaagagcatttctggagtattgaccaaacggaatttcgaatcccacccaggctgatcattcagatatgggacaatgacaagttttctctggatgactacttgggtttcctagaacttgacttgcgtcacacgatcattcctgcaaaatcaccagagaaatgcagattggacatgattccggacctcaaagccatgaacccccttaaagccaagacagcctccctctttgagcagaagtccatgaaaggatggtggccatgctacgcagagaaagatggcgcccgcgtaatggctgggaaagtggagatgacattggaaatcctcaacgagaaggaggccgacgagaggccagccgggaaggggcgggacgaacccaacatgaaccccaagctggacttaccaaatcgaccagaaacctccttcctctggttcaccaacccatgcaagaccatgaagttcatcgtgtggcgccgctttaagtgggtcatcatcggcttgctgttcctgcttatcctgctgctcttcgtggccgtgctcctctactctttgccgaactatttgtcaatgaagattgtaaagccaaatgtgtaacaaaggcaaaggcttcatttcaagagtcatccagcaatgagagaatcctgcctctgtagaccaacatccagtgtgattttgtgtctgagaccacaccccagtagcaggttacgccatgtcaccgagccccattgattcccagagggtcttagtcctggaaagtcaggccaacaagcaacgtttgcatcatgttatctcttaagtattaaaagttttattttctaaagtttaaatcatgtttttcaaaatatttttcaaggtggctggttccatttaaaaatcatctttttatatgtgtcttcggttctagacttcagcttttggaaattgctaaatagaattcaaaaatctctgcatcctgaggtgatatacttcatatttgtaatcaactgaaagagctgtgcattataaaatcagttagaatagttagaacaattcttatttatgcccacaaccattgctatattttgtatggatgtcataaaagtctatttaacctctgtaatgaaactaaataaaaatgtttcaccttt

SEQ ID NO: 156645 - DNA, 763 bp, Homo sapiens
  Payload ID: 10705
  Gene Symbol: MYOF
  Gene Name: myoferlin
  Uniprot ID: Q9NZM1
  ENST ID: ENST00000371488
  CDS Start-End: 1-483
atgctgcgagtgattgtggaatctgccagcaatatccctaaaacgaaatttggcaagccggatcctattgtttctgtcatttttaaggatgagaaaaagaaaacaaagaaagttgataatgaattgaaccctgtctggaatgagattttggagtttgacttgaggggtataccactggacttttcatcttcccttgggattattgtgaaagattttgagacaattggacaaaataaattaattggcacggcgactgtagccctgaaggacctgactggtgaccagagcagatccctgccgtacaagctgatctccctgctaaatgaaaaagggcaagatactggggccaccattgacttggtgatcggctatgatccgccttctgctccacatccaaatgacctgagcgggcccagcgtgccaggcatgggaggtaagctgacccttctgaaggcccagccacccccagggggaggctgctaaagacacacaggagagtgtctggagaaaccctgccattgatcacaagcctgtagctccctgcccacccagacaggggccccgagaggcaggtggggctgcctgaattgggacattgcaattgtttatgaaatgcccttcaaggtagaggggaagggtgaaccaaccctttactgaacaacctcacggtgagcacaaaaagcacatgccggctccagcagaatgtcccagggctttgcttcaggtttgtggcttccaccccatacagtgtctccaggctgtt

SEQ ID NO: 156646 - DNA, 1519 bp, Homo sapiens
  Payload ID: 10705
  Gene Symbol: MYOF
  Gene Name: myoferlin
  Uniprot ID: Q9NZM1
  ENST ID: ENST00000371489
  CDS Start-End: 124-1461
gccctgggagaaatcctcccttcactgggagagaacttctctcccagggcggtgcgacccggagctccagcgccctagtctccacttcgtttgctgaaacttgctttctaccagctaagaaccatgctgcgagtgattgtggaatctgccagcaatatccctaaaacgaaatttggcaagccggatcctattgtttctgtcatttttaaggatgagaaaaagaaaacaaagaaagttgataatgaattgaaccctgtctggaatgagattttggagtttgacttgaggggtataccactggacttttcatcttcccttgggattattgtgaaagattttgagacaattggacaaaataaattaattggcacggcgactgtagccctgaaggacctgactggtgaccagagcagatccctgccgtacaagctgatctccctgctaaatgaaaaagggcaagatactggggccaccattgacttggtgatcggctatgatccgccttctgctccacatccaaatgacctgagcgggcccagcgtgccaggcatgggaggagatggggaagaagatgaaggtgatgaagacaggttggacaatgcagtcaggggccctgggcccaaggggccagttgggacggtgtcggaagctcagcttgctcggaggctcaccaaagtaaagaacagccggcggatgctgtcaaataagccacaggacttccagatccgcgtccgagtgattgagggccgacagttaagtggtaacaacataaggcctgtggtcaaagttcacgtctgtggccagacacaccgaacaagaatcaagagaggaaacaaccctttttttgatgagttgtttttctacaatgtcaacatgaccccttctgaattgatggatgagatcatcagcatccgggtttataattctcactctctgcgggcagattgtctgatgggggaatttaagattgatgttggatttgtttatgatgaacctggccatgctgtcatgagaaagtggcttcttctcaatgacccggaagataccagttcaggttctaaaggttatatgaaagtcagcatgtttgtcctgggaaccggagatgagcctcctcctgagagacgagatcgtgataatgacagtgatgatgtggagagtaatttgttactccctgctggcattgccctccggtgggtgaccttcttgctgaaaatctaccgagctgaggacatcccccagatggatgatgccttctcacagacagtaaaggaaatatttggaggcaatgcagataagaaaaatctcgtggatccttttgtagaagtttcctttgctggaaaaaaggtttgtacaaacataattgagaaaaatgcaaacccagagtggaatcaggtcgtcaatcttcagatcaagtttccttcagtgtgtgaaaaaataaaactaacaatatatgactggtgagttgaaaatacgtatgtgtctaattcaacataaaataaacattggatattgtgaaaca

SEQ ID NO: 156647 - DNA, 4812 bp, Homo sapiens
  Payload ID: 10705
  Gene Symbol: MYOF
  Gene Name: myoferlin
  ENST ID: ENST00000463743
  CDS Start-End: 1-3533
gcaactactattattacttgccttgggcccacaccaagccagttgttaccctgacttcatactgggaggatattagtcatcgcctggatgcggtgaacactctcctagctatggcagaacggctgcaaacaaatatagaagctctaaaatcagggatacaaggtaaaattcctgcaaaccagctggctgaattgtggctgaagctgatagatgaagttatagaagacacgagatacacgttgcctctcacagaaggaaaagccaacgtcacagttctcgatactcagatccgaaagctgcggtccaggtctctctcccaaatacatgaggcggctgtgaggatgaggtcggaagccacagatgtgaagtccacactggcagaaattgaggactggcttgataaattaatgcagctgactgaagagccacagaacagcatgcctgacatcatcatctggatgatccggggagagaagagactggcctatgcacgaattcccgcacatcaggtcttgtactccaccagtggtgagaatgcatctggaaaatactgtgggaaaacccaaaccatctttctgaagtatccacaggagaaaaacaacgggccaaaggtgcctgtggagttgcgagtgaacatctggctaggcttaagtgctgtggagaagaagtttaacagcttcgcagaaggaactttcaccgtctttgctgaaatgtatgaaaatcaagctctcatgtttggaaaatggggtacttctggattagtaggacgtcataagttttctgatgtcacaggaaaaataaaactcaagagggaattttttctgcctccaaaaggctgggaatgggaaggagagtggatagttgatcctgaaagaagcttgctgactgaggcagatgcaggtcacacggagttcactgatgaagtctatcagaacgagagccgctaccccgggggcgactggaagccggccgaggacacctacacggatgcgaacggcgataaagcagcatcacccagcgagttgacttgtcctccaggttgggaatgggaagatgatgcatggtcttatgacataaatcgagcggtggatgagaaaggctgggaatatggaatcaccattcctcctgatcataagcccaaatcctgggttgcagcagagaaaatgtaccacactcatagacggcgaaggctggtccgaaaacgcaagaaagatttaacacagactgcttcaagcaccgcaagggccatggaggaattgcaagaccaagagggctgggaatatgcttctctaattggctggaaatttcactggaaacaacgtagttcagataccttccgccgcagacgctggaggagaaaaatggctccttcagaaacacatggtgcagctgccatctttaaacttgaaggtgcccttggggcagacactaccgaagatggggatgagaagagcctggagaaacagaagcacagtgccaccactgtgttcggagcaaacacccccattgtttcctgcaattttgacagagtctacatctaccatctgcgctgctatgtctatcaagccagaaacctcttggctttagataaggatagcttttcagatccatatgctcatatctgtttcctccatcggagcaaaaccactgagatcatccattcaaccctgaatcccacgtgggaccaaacaattatattcgatgaagttgaaatctatggggaaccccaaacagttctacagaatccacccaaagttatcatggaactttttgacaatgaccaagtgggcaaagatgaatttttaggacgaagcattttctctcctgtggtgaaactgaactcagaaatggacatcacacccaaacttctctggcacccagtaatgaatggagacaaagcctgcggggatgttcttgtaactgcagagctgattctgaggggcaaggatggctccaaccttcccattcttccccctcaaagggcgccaaatctatacatggtcccccaggggatcaggcctgtggtccagctcactgccattgagattctagcttggggcttaagaaatatgaaaaacttccagatggcttctatcacatcccccagtcttgttgtggagtgtggaggagaaagggtggaatcggtggtgatcaaaaaccttaagaagacacccaactttccaagttctgttctcttcatgaaagtgttcttgcccaaggaggaattgtacatgcccccactggtgatcaaggtcatcgaccacaggcagtttgggcggaagcctgtcgtcggccagtgcaccatcgagcgcctggaccgctttcgctgtgacccttatgcagggaaagaggacatcgtcccacagctcaaagcctcccttctgtctgccccaccatgccgggacatcgttatcgaaatggaagacaccaaaccattactggcttctaagtgcttaagcagtatgtcaacagcactcagcaaaatggcttctccagcgacagtgcatctgacagaaaaggaggaagaaatcgtggactggtggagtaaattttatgcttcctcaggggaacatgaaaaatgcggacagtatattcagaaaggctattccaagctcaagatatataattgtgaactagaaaatgtagcagaatttgagggcctgacagacttctcagatacgttcaagttgtaccgaggcaagtcggatgaaaatgaagatccttctgtggttggagagtttaagggctcctttcggatctaccctctgccggatgaccccagcgtgccagcccctcccagacagtttcgggaattacctgacagcgtcccacaggaatgcacggttaggatttacattgttcgaggcttagagctccagccccaggacaacaatggcctgtgtgacccttacataaaaataacactgggcaaaaaagtcattgaagaccgagatcactacattcccaacactctcaacccagtctttggcaggatgtacgaactgagctgctacttacctcaagaaaaagacctgaaaatttctgtctatgattatgacacctttacccgggatgaaaaagtaggagaaacaattattgatctggaaaaccgattcctttcccgctttgggtcccactgcggcataccagaggagtactgtgtttctggagtcaatacctggcgagatcaactgagaccaacacagctgcttcaaaatgtcgccagattcaaaggcttcccacaacccatcctttccgaagatgggagtagaatcagatatggaggacgagactacagcttggatgaatttgaagccaacaaaatcctgcaccagcacctcggggcccctgaagagcggcttgctcttcacatcctcaggactcaggggctggtccctgagcacgtggaaacaaggactttgcacagcaccttccagcccaacatttcccagatactacctgcgtgtgatcatctggaacaccaaggacgttatcttggacgagaaaagcatcacaggagaggaaatgagtgacatctacgtcaaaggctggattcctggcaatgaagaaaacaaacagaaaacagatgtccattacagatctttggatggtgaagggaattttaactggcgatttgttttcccgtttgactaccttccagccgaacaactctgtatcgttgcgaaaaaagagcatttctggagtattgaccaaacggaatttcgaatcccacccaggctgatcattcagatatgggacaatgacaagttttctctggatgactacttgggtttcctagaacttgacttgcgtcacacgatcattcctgcaaaatcaccagagaaatgcagattggacatgattccggacctcaaagccatgaacccccttaaagccaagacagcctccctctttgagcagaagtccatgaaaggatggtggccatgctacgcagagaaagatggcgcccgcgtaatggctgggaaagtggagatgacattggaaatcctcaacgagaaggaggccgacgagaggccagccgggaaggggcgggacgaacccaacatgaaccccaagctggacttaccaaatcgaccagaaacctccttcctctggttcaccaacccatgcaagaccatgaagttcatcgtgtggcgccgctttaagtgggtcatcatcggcttgctgttcctgcttatcctgctgctcttcgtggccgtgctcctctactctttgccgaactatttgtcaatgaagattgtaaagccaaatgtgtaacaaaggcaaaggcttcatttcaagagtcatccagcaatgagagaatcctgcctctgtagaccaacatccagtgtgattttgtgtctgagaccacaccccagtagcaggttacgccatgtcaccgagccccattgattcccagagggtcttagtcctggaaagtcaggccaacaagcaacgtttgcatcatgttatctcttaagtattaaaagttttattttctaaagtttaaatcatgtttttcaaaatatttttcaaggtggctggttccatttaaaaatcatctttttatatgtgtcttcggttctagacttcagcttttggaaattgctaaatagaattcaaaaatctctgcatcctgaggtgatatacttcatatttgtaatcaactgaaagagctgtgcattataaaatcagttagaatagttagaacaattcttatttatgcccacaaccattgctatattttgtatggatgtcataaaagtctatttaacctctgtaatgaaactaaataaaaatgtttcaccttta

SEQ ID NO: 156648 - DNA, 1801 bp, Homo sapiens
  Payload ID: 10706
  Gene Symbol: MYOD1
  Gene Name: myogenic differentiation 1
  Uniprot ID: P15172
  ENST ID: ENST00000250003
  CDS Start-End: 216-1178
gctaggggtgaggaagccctggggcgctgccgccgctttccttaaccacaaatcaggccggacaggagagggaggggtgggggacagtgggtgggcattcagactgccagcactttgctatctacagccggggctcccgagcggcagaaagttccggccactctctgccgcttgggttgggcgaagccaggaccgtgccgcgccaccgccaggatatggagctactgtcgccaccgctccgcgacgtagacctgacggcccccgacggctctctctgctcctttgccacaacggacgacttctatgacgacccgtgtttcgactccccggacctgcgcttcttcgaagacctggacccgcgcctgatgcacgtgggcgcgctcctgaaacccgaagagcactcgcacttccccgcggcggtgcacccggccccgggcgcacgtgaggacgagcatgtgcgcgcgcccagcgggcaccaccaggcgggccgctgcctactgtgggcctgcaaggcgtgcaagcgcaagaccaccaacgccgaccgccgcaaggccgccaccatgcgcgagcggcgccgcctgagcaaagtaaatgaggcctttgagacactcaagcgctgcacgtcgagcaatccaaaccagcggttgcccaaggtggagatcctgcgcaacgccatccgctatatcgagggcctgcaggctctgctgcgcgaccaggacgccgcgccccctggcgccgcagccgccttctatgcgccgggcccgctgcccccgggccgcggcggcgagcactacagcggcgactccgacgcgtccagcccgcgctccaactgctccgacggcatgatggactacagcggccccccgagcggcgcccggcggcggaactgctacgaaggcgcctactacaacgaggcgcccagcgaacccaggcccgggaagagtgcggcggtgtcgagcctagactgcctgtccagcatcgtggagcgcatctccaccgagagccctgcggcgcccgccctcctgctggcggacgtgccttctgagtcgcctccgcgcaggcaagaggctgccgcccccagcgagggagagagcagcggcgaccccacccagtcaccggacgccgccccgcagtgccctgcgggtgcgaaccccaacccgatataccaggtgctctgaggggatggtggccgcccacccgcccgagggatggtgcccctagggtccctcgcgcccaaaagattgaacttaaatgcccccctcccaacagcgctttaaaagcgacctctcttgaggtaggagaggcgggagaactgaagtttccgcccccgccccacagggcaaggacacagcgcggttttttccacgcagcacccttctcggagacccattgcgatggccgctccgtgttcctcggtgggccagagctgaaccttgaggggctaggttcagctttctcgcgccctcccccatgggggtgagaccctcgcagacctaagccctgccccgggatgcaccggttatttgggggggcgtgagacccagtgcactccggtcccaaatgtagcaggtgtaaccgtaacccacccccaacccgtttcccggttcaggaccactttttgtaatacttttgtaatctattcctgtaaataagagttgctttgccagagcaggagcccctggggctgtatttatctctgaggcatggtgtgtggtgctacagggaatttgtacgtttataccgcaggcgggcgagccgcgggcgctcgctcaggtgatcaaaataaaggcgctaatttata

SEQ ID NO: 156649 - DNA, 1542 bp, Homo sapiens
  Payload ID: 10707
  Gene Symbol: MYF5
  Gene Name: myogenic factor 5
  Uniprot ID: P13349
  ENST ID: ENST00000228644
  CDS Start-End: 153-920
acccaggccaacaggcgtctgcccttgttaattaccggagcgacagactagggagctccgcccgggatttgcccatcggcggaggcgccaggctcccgtttctccccatccctctcgctgccgtccaggtgcaccgcctgcctctcagcaggatggacgtgatggatggctgccagttctcaccttctgagtacttctacgacggctcctgcataccgtcccccgagggtgaatttggggacgagtttgtgccgcgagtggctgccttcggagcgcacaaagcagagctgcagggctcagatgaggacgagcacgtgcgagcgcctaccggccaccaccaggctggtcactgcctcatgtgggcctgcaaagcctgcaagaggaagtccaccaccatggatcggcggaaggcagccactatgcgcgagcggaggcgcctgaagaaggtcaaccaggctttcgaaaccctcaagaggtgtaccacgaccaaccccaaccagaggctgcccaaggtggagatcctcaggaatgccatccgctacatcgagagcctgcaggagttgctgagagagcaggtggagaactactatagcctgccgggacagagctgctcggagcccaccagccccacctccaactgctctgatggcatgcccgaatgtaacagtcctgtctggtccagaaagagcagtacttttgacagcatctactgtcctgatgtatcaaatgtatatgccacagataaaaactccttatccagcttggattgcttatccaacatagtggaccggatcacctcctcagagcaacctgggttgcctctccaggatctggcttctctctctccagttgccagcaccgattcacagcctgcaactccaggggcttctagttccaggcttatctatcatgtgctatgaactaattttctggtctatatgacttcttccaggagggcctaatacacaggaagaagaaggcttcaaaaagtcccaaaccaagacaacatgtacataaagatttcttttcagttgtaaatttgtaaagattaccttgccactttataagaaagtgtatttaactaaaaagtcatcattgcaaataatactttcttcttctttattattctttgcttagatattaatacatagttccagtaatactatttctgatagggggccattgattgagggtagcttgttgcaatgcttaacttatatatacatatatatatattataaatattgctcatcaaaatgtctctggtgtttagagctttatttttttctttaaaacattaaaacagctgagaatcagttaaatggaattttaaatatatttaactatttcttttctctttaatcctttagttatattgtattaaataaaaatataatactgcctaatgtatatattttgatcttttcttgtaagaaatgtatcttttaaatgtaagcacaaaatagtactttgtggatcatttcaagatataagaaattttggaaattccaccataaataaaattttttactacaagaaata

SEQ ID NO: 156650 - DNA, 1465 bp, Homo sapiens
  Payload ID: 10708
  Gene Symbol: MYF6
  Gene Name: myogenic factor 6 (herculin)
  Uniprot ID: P23409
  ENST ID: ENST00000228641
  CDS Start-End: 223-951
agttttctttcaaactagatgttctagagagcactagctgcaatcacattgggagactgatgctccatgacagctaaaagttggattgagtttcaggagctactatatataaagctgggtcgacttatgtcactgcactaattaaatgccatctgggtggttcctctgggtttttgagtccatcacccagttcagatcgagtcagaggccaaggaggagaacatgatgatggacctttttgaaactggctcctatttcttctacttggatggggaaaatgttactctgcagccattagaagtggcagaaggctctcctttgtatccagggagtgatggtaccttgtccccctgccaggaccaaatgcccccggaagcggggagcgacagcagcggagaggaacatgtcctggcgcccccgggcctgcagcctccacactgccccggccagtgtctgatctgggcttgcaagacctgcaagagaaaatctgcccccactgaccggcgaaaagccgccaccctgcgcgaaaggaggaggctaaagaaaatcaacgaggccttcgaggcactgaagcggcgaactgtggccaaccccaaccagaggctgcccaaggtggagattctgcggagcgccatcagctatattgagcggctgcaggacctgctgcaccggctggatcagcaggagaagatgcaggagctgggggtggaccccttcagctacagacccaaacaagaaaatcttgagggtgcggatttcctgcgcacctgcagctcccagtggccaagtgtttccgatcattccagggggctcgtgataacggctaaggaaggaggagcaagtattgattcgtcagcctcgagtagccttcgatgcctttcttccatcgtggacagtatttcctcggaggaacgcaaactcccctgcgtggaggaagtggtggagaagtaactgagcctgcgcttgagaccttctccacgcagcaggaagatcccaccgacccttcctggcctaatcctttagattaggtcacattacattaacatttaggaacccagaccgaaaagttgctgaaagggaaggagacacattcacaaagaaacgttgcgaaaattgcgaaatctgttgtgcatgctcaaatgaaaacgcctttcggctttgggcttttatttttttggaactgcgagtggcttaggtctagcctcattttgtttttgtttggttggttttatactatattaacttttattacggtgatccttttgtgccatgttcaaaagaagttcattcctgtctaaagtgggaaagttgcatttaatgttaggggtatttaatgtatttttgtaaatagtttaacactttctttttttacgtaaacctgaaatatattttaaatgtggaatgatgtatataaaatgtgcgaggatcctggtattgtaatattaaaaagaagtttctatatgaa

SEQ ID NO: 156651 - DNA, 1528 bp, Homo sapiens
  Payload ID: 10709
  Gene Symbol: MYOG
  Gene Name: myogenin (myogenic factor 4)
  Uniprot ID: P15173
  ENST ID: ENST00000241651
  CDS Start-End: 76-750
atggcacccagcagttggcgtgaggggctgctggagcttgggggctggtggcaggaacaagccttttccgaccccatggagctgtatgagacatccccctacttctaccaggaaccccgcttctatgatggggaaaactacctgcctgtccacctccagggcttcgaaccaccaggctacgagcggacggagctcaccctgagccccgaggccccagggccccttgaggacaaggggctggggacccccgagcactgtccaggccagtgcctgccgtgggcgtgtaaggtgtgtaagaggaagtcggtgtccgtggaccggcggcgggcggccacactgagggagaagcgcaggctcaagaaggtgaatgaggccttcgaggccctgaagagaagcaccctgctcaaccccaaccagcggctgcccaaggtggagatcctgcgcagtgccatccagtacatcgagcgcctccaggccctgctcagctccctcaaccaggaggagcgtgacctccgctaccggggcgggggcgggccccagccaggggtgcccagcgaatgcagctctcacagcgcctcctgcagtccagagtggggcagtgcactggagttcagcgccaacccaggggatcatctgctcacggctgaccctacagatgcccacaacctgcactccctcacctccatcgtggacagcatcacagtggaagatgtgtctgtggccttcccagatgaaaccatgcccaactgagattgtcttccaagccgggcatccttgcgagccccccaagctggccacagatgccactacttctgtagcaggggcctcctaagccaggctgccctgatgctaggaagccagctctggggtgccataggccagactatccccttcctcatccatgtaaggttaacccaccccccagcaagggactggacgccctcattcagctgcctccttagaggagagggcatcccctttccagggaggtaaagcaggggaccagagcgccccctcgtgtatgccccagctcagggggcaaactcaggagcttcctttttatcataacgcggcctctaattccaccccccaagtgaaacggtttgagagacgcagtgccctgacctggacaagctgtgcacgtctcctgttctggtctcttcccgatgccagtggctgggctgggcctgccctgaattgagagagaagaaggggagaggaacagccctctgttcccaagtccctggggggccaaacttttgcagtgaatattgggaaccttccagtggttttatgttttgttttgtttcgtgtgttgtttgtaaagctgccatccgaccaaggtctcctgtgctgaagttgccggggacaggcagggaaaaggggttggggcctcttgggggtgatttcttttgttaacaaagcattgtgtggttttgccattgttttgtattttttttttttttttttttttttgctaacttatttggatttccttttttaaaaaatgaataaagactggttgcca

SEQ ID NO: 156652 - DNA, 1170 bp, Homo sapiens
  Payload ID: 10710
  Gene Symbol: MB
  Gene Name: myoglobin
  Uniprot ID: P02144
  ENST ID: ENST00000359787
  CDS Start-End: 173-637
gagcatgttggcctggtcctttgctaggtactgtagagcaggtgagagagtgagggggaaggactccaaattagaccagttcttagccatgaagcagagactctgaagccagactacctgggtcccaatcttgggcttggtatttcctcgctgtgtgactctggactgcgccatggggctcagcgacggggaatggcagttggtgctgaacgtctgggggaaggtggaggctgacatcccaggccatgggcaggaagtcctcatcaggctctttaagggtcacccagagactctggagaagtttgacaagttcaagcacctgaagtcagaggacgagatgaaggcgtctgaggacttaaagaagcatggtgccaccgtgctcaccgccctgggtggcatccttaagaagaaggggcatcatgaggcagagattaagcccctggcacagtcgcatgccaccaagcacaagatccccgtgaagtacctggagttcatctcggaatgcatcatccaggttctgcagagcaagcatcccggggactttggtgctgatgcccagggggccatgaacaaggccctggagctgttccggaaggacatggcctccaactacaaggagctgggcttccagggctaggcccctgccgctcccacccccacccatctgggccccgggttcaagagagagcggggtctgatctcgtgtagccatatagagtttgcttctgagtgtctgctttgtttagtagaggtgggcaggaggagctgaggggctggggctggggtgttgaagttggctttgcatgcccagcgatgcgcctccctgtgggatgtcatcaccctgggaaccgggagtggcccttggctcactgtgttctgcatggtttggatctgaattaattgtcctttcttctaaatcccaaccgaacttcttccaacctccaaactggctgtaaccccaaatccaagccattaactacacctgacagtagcaattgtctgattaatcactggccccttgaagacagcagaatgtccctttgcaatgaggaggagatctgggctgggcgggccagctggggaagcatttgactatctggaacttgtgtgtgcctcctcaggtatggcagtgactcacctggttttaataaaacaacctgcaacatctca

SEQ ID NO: 156653 - DNA, 1197 bp, Homo sapiens
  Payload ID: 10710
  Gene Symbol: MB
  Gene Name: myoglobin
  Uniprot ID: P02144
  ENST ID: ENST00000397326
  CDS Start-End: 200-664
gattagaccctccctggatgagagagagaaagtgaaggagggcaggggagggggacagcgagccattgagcgatctttgtcaagcatcccagaaggtataaaaacgcccttgggaccaggcagcctcaaaccccagctgttggggccaggacacccagtgagcccatacttgctctttttgtcttcttcagactgcgccatggggctcagcgacggggaatggcagttggtgctgaacgtctgggggaaggtggaggctgacatcccaggccatgggcaggaagtcctcatcaggctctttaagggtcacccagagactctggagaagtttgacaagttcaagcacctgaagtcagaggacgagatgaaggcgtctgaggacttaaagaagcatggtgccaccgtgctcaccgccctgggtggcatccttaagaagaaggggcatcatgaggcagagattaagcccctggcacagtcgcatgccaccaagcacaagatccccgtgaagtacctggagttcatctcggaatgcatcatccaggttctgcagagcaagcatcccggggactttggtgctgatgcccagggggccatgaacaaggccctggagctgttccggaaggacatggcctccaactacaaggagctgggcttccagggctaggcccctgccgctcccacccccacccatctgggccccgggttcaagagagagcggggtctgatctcgtgtagccatatagagtttgcttctgagtgtctgctttgtttagtagaggtgggcaggaggagctgaggggctggggctggggtgttgaagttggctttgcatgcccagcgatgcgcctccctgtgggatgtcatcaccctgggaaccgggagtggcccttggctcactgtgttctgcatggtttggatctgaattaattgtcctttcttctaaatcccaaccgaacttcttccaacctccaaactggctgtaaccccaaatccaagccattaactacacctgacagtagcaattgtctgattaatcactggccccttgaagacagcagaatgtccctttgcaatgaggaggagatctgggctgggcgggccagctggggaagcatttgactatctggaacttgtgtgtgcctcctcaggtatggcagtgactcacctggttttaataaaacaacctgcaacatctca

SEQ ID NO: 156654 - DNA, 1153 bp, Homo sapiens
  Payload ID: 10710
  Gene Symbol: MB
  Gene Name: myoglobin
  Uniprot ID: P02144
  ENST ID: ENST00000397328
  CDS Start-End: 156-620
aatggcacctgccctaaaatagcttcccatgtgagggctagagaaaggaaaagattagaccctccctggatgagagagagaaagtgaaggagggcaggggagggggacagcgagccattgagcgatctttgtcaagcatcccagaagactgcgccatggggctcagcgacggggaatggcagttggtgctgaacgtctgggggaaggtggaggctgacatcccaggccatgggcaggaagtcctcatcaggctctttaagggtcacccagagactctggagaagtttgacaagttcaagcacctgaagtcagaggacgagatgaaggcgtctgaggacttaaagaagcatggtgccaccgtgctcaccgccctgggtggcatccttaagaagaaggggcatcatgaggcagagattaagcccctggcacagtcgcatgccaccaagcacaagatccccgtgaagtacctggagttcatctcggaatgcatcatccaggttctgcagagcaagcatcccggggactttggtgctgatgcccagggggccatgaacaaggccctggagctgttccggaaggacatggcctccaactacaaggagctgggcttccagggctaggcccctgccgctcccacccccacccatctgggccccgggttcaagagagagcggggtctgatctcgtgtagccatatagagtttgcttctgagtgtctgctttgtttagtagaggtgggcaggaggagctgaggggctggggctggggtgttgaagttggctttgcatgcccagcgatgcgcctccctgtgggatgtcatcaccctgggaaccgggagtggcccttggctcactgtgttctgcatggtttggatctgaattaattgtcctttcttctaaatcccaaccgaacttcttccaacctccaaactggctgtaaccccaaatccaagccattaactacacctgacagtagcaattgtctgattaatcactggccccttgaagacagcagaatgtccctttgcaatgaggaggagatctgggctgggcgggccagctggggaagcatttgactatctggaacttgtgtgtgcctcctcaggtatggcagtgactcacctggttttaataaaacaacctgcaacatctca

SEQ ID NO: 156655 - DNA, 582 bp, Homo sapiens
  Payload ID: 10710
  Gene Symbol: MB
  Gene Name: myoglobin
  Uniprot ID: P02144
  ENST ID: ENST00000406324
  CDS Start-End: 93-557
gctataagacacctctccccacccccagccctggccgcttggctggaggctctgcgaggacagctggggagaaggggagctgtgactgcgccatggggctcagcgacggggaatggcagttggtgctgaacgtctgggggaaggtggaggctgacatcccaggccatgggcaggaagtcctcatcaggctctttaagggtcacccagagactctggagaagtttgacaagttcaagcacctgaagtcagaggacgagatgaaggcgtctgaggacttaaagaagcatggtgccaccgtgctcaccgccctgggtggcatccttaagaagaaggggcatcatgaggcagagattaagcccctggcacagtcgcatgccaccaagcacaagatccccgtgaagtacctggagttcatctcggaatgcatcatccaggttctgcagagcaagcatcccggggactttggtgctgatgcccagggggccatgaacaaggccctggagctgttccggaaggacatggcctccaactacaaggagctgggcttccagggctaggcccctgccgctcccacccccaccc

SEQ ID NO: 156656 - DNA, 1043 bp, Homo sapiens
  Payload ID: 10710
  Gene Symbol: MB
  Gene Name: myoglobin
  ENST ID: ENST00000401702
  CDS Start-End: 211-510
gccttatttctctgctggttgagcgaagggattgtcttccatggtctccgagatcccgtcccacgctcatgccctagaattctctgagtccttgatgcacttttgcctttggcgaggaggcaggacagtcaggcgtggaggctctttaagggtcacccagagactctggagaagtttgacaagttcaagcacctgaagtcagaggacgagatgaaggcgtctgaggacttaaagaagcatggtgccaccgtgctcaccgccctgggtggcatccttaagaagaaggggcatcatgaggcagagattaagcccctggcacagtcgcatgccaccaagcacaagatccccgtgaagtacctggagttcatctcggaatgcatcatccaggttctgcagagcaagcatcccggggactttggtgctgatgcccagggggccatgaacaaggccctggagctgttccggaaggacatggcctccaactacaaggagctgggcttccagggctaggcccctgccgctcccacccccacccatctgggccccgggttcaagagagagcggggtctgatctcgtgtagccatatagagtttgcttctgagtgtctgctttgtttagtagaggtgggcaggaggagctgaggggctggggctggggtgttgaagttggctttgcatgcccagcgatgcgcctccctgtgggatgtcatcaccctgggaaccgggagtggcccttggctcactgtgttctgcatggtttggatctgaattaattgtcctttcttctaaatcccaaccgaacttcttccaacctccaaactggctgtaaccccaaatccaagccattaactacacctgacagtagcaattgtctgattaatcactggccccttgaagacagcagaatgtccctttgcaatgaggaggagatctgggctgggcgggccagctggggaagcatttgactatctggaacttgtgtgtgcctcctcaggtatggcagtgactcacctggttttaataaaacaacctgcaacatctca

SEQ ID NO: 156657 - DNA, 515 bp, Homo sapiens
  Payload ID: 10710
  Gene Symbol: MB
  Gene Name: myoglobin
  ENST ID: ENST00000447607
  CDS Start-End: 198-515
gagagcattgatgaggtcaggaagcctcctgttgggtagaggagcaactaagagactgaacttggcccccaccctgaggctcacaagcttgaattgcacctgagttccaaaggagaagttgacattcttccagaacatatgcccagtgtcttcaacttgagatggagctgggatgccaagtctgcaaatactgcgccatggggctcagcgacggggaatggcagttggtgctgaacgtctgggggaaggtggaggctgacatcccaggccatgggcaggaagtcctcatcaggctctttaagggtcacccagagactctggagaagtttgacaagttcaagcacctgaagtcagaggacgagatgaaggcgtctgaggacttaaagaagcatggtgccaccgtgctcaccgccctgggtggcatccttaagaagaaggggcatcatgaggcagagattaagcccctggcacagtcgcatgccaccaagcacaagatccccgtgaagtacctggag

SEQ ID NO: 156658 - DNA, 551 bp, Homo sapiens
  Payload ID: 10710
  Gene Symbol: MB
  Gene Name: myoglobin
  ENST ID: ENST00000451685
  CDS Start-End: 234-551
agtgcccaacctcctccccttctttccacacgcacaaccaccccaccccctgtggcctgagctgtcctgcctcgccacaatggcacctgccctaaaatagcttcccatgtgagggctagagaaaggaaaagattagaccctccctggatgagagagagaaagtgaaggagggcaggggagggggacagcgagccattgagcgatctttgtcaagcatcccagaagactgcgccatggggctcagcgacggggaatggcagttggtgctgaacgtctgggggaaggtggaggctgacatcccaggccatgggcaggaagtcctcatcaggctctttaagggtcacccagagactctggagaagtttgacaagttcaagcacctgaagtcagaggacgagatgaaggcgtctgaggacttaaagaagcatggtgccaccgtgctcaccgccctgggtggcatccttaagaagaaggggcatcatgaggcagagattaagcccctggcacagtcgcatgccaccaagcacaagatccccgtgaagtacctggag

SEQ ID NO: 156659 - DNA, 648 bp, Homo sapiens
  Payload ID: 10710
  Gene Symbol: MB
  Gene Name: myoglobin
  ENST ID: ENST00000443033
  CDS Start-End: 220-648
gcaagccaaaaccctgggcagactcaatccaaaaataaacaatcaaagagcatgttggcctggtcctttgctaggtactgtagagcaggtgagagagtgagggggaaggactccaaattagaccagttcttagccatgaagcagagactctgaagccagactacctgggtcccaatcttgggcttggtatttcctcgctgtgtgactctggactgcgccatggggctcagcgacggggaatggcagttggtgctgaacgtctgggggaaggtggaggctgacatcccaggccatgggcaggaagtcctcatcaggctctttaagggtcacccagagactctggagaagtttgacaagttcaagcacctgaagtcagaggacgagatgaaggcgtctgaggacttaaagaagcatggtgccaccgtgctcaccgccctgggtggcatccttaagaagaaggggcatcatgaggcagagattaagcccctggcacagtcgcatgccaccaagcacaagatccccgtgaagtacctggagttcatctcggaatgcatcatccaggttctgcagagcaagcatcccggggactttggtgctgatgcccagggggccatgaacaaggccctggagctgttccggaaggacatg

SEQ ID NO: 156660 - DNA, 545 bp, Homo sapiens
  Payload ID: 10710
  Gene Symbol: MB
  Gene Name: myoglobin
  ENST ID: ENST00000442617
  CDS Start-End: 324-545
aaaccccagctgttggggccaggacacccagtgagcccatacttgctctttttgtcttcttcagactgcgccatggggctcagcgacggggaatggcagttggtgctgaacgtctgggggaaggtggaggctgacatcccaggccatgggcaggaagtcctcatcaggtaaaaggaagagattccattgcccctgccacccacaccctaagatcaagggtgttcagctgcaaggtggaaagtttgcacgtggggctctttaagggtcacccagagactctggagaagtttgacaagttcaagcacctgaagtcagaggacgagatgaaggcgtctgaggacttaaagaagcatggtgccaccgtgctcaccgccctgggtggcatccttaagaagaaggggcatcatgaggcagagattaagcccctggcacagtcgcatgccaccaagcacaagatccccgtgaagtacctggagttcatctcggaatgcatcatccaggttctgcagagcaagcatcccggggactttggtgctgatgcccag

SEQ ID NO: 156661 - DNA, 418 bp, Homo sapiens
  Payload ID: 10710
  Gene Symbol: MB
  Gene Name: myoglobin
  ENST ID: ENST00000419229
  CDS Start-End: 187-418
cttggctggaggctctgcgaggacagctggggagaaggggagctgtgcccagatttaccaaagggaattgtcagctgtccaagggctagcaaattcctaggtcacctagattggattttctgaccataaaaactgtgggccaggtgcacagctgcctgaggggctcaaacctgtgcagactgcgccatggggctcagcgacggggaatggcagttggtgctgaacgtctgggggaaggtggaggctgacatcccaggccatgggcaggaagtcctcatcaggctctttaagggtcacccagagactctggagaagtttgacaagttcaagcacctgaagtcagaggacgagatgaaggcgtctgaggacttaaagaagcatggtgccaccgtgctcaccgccctgggtggcatcctta

SEQ ID NO: 156662 - DNA, 1130 bp, Homo sapiens
  Payload ID: 10711
  Gene Symbol: MIOX
  Gene Name: myo-inositol oxygenase
  Uniprot ID: Q9UGB7
  ENST ID: ENST00000216075
  CDS Start-End: 75-932
gtgtatataggagcctggctgaggacacactcgccagcctgtgctttgccacctgagcgccgctccctctcaggatgaaggtgacggtgggcccagacccttccctggtctaccgacctgatgtggacccagaggtggccaaagacaaggccagcttccggaactacacgtcaggtcccctcctggaccgtgtcttcaccacctacaagctcatgcacacgcaccagacagtggacttcgtcaggagcaagcatgcccagtttgggggcttctcctacaagaaaatgacagtcatggaggccgtggacctgctggatgggctggtggatgagtcggacccggacgtagatttccccaactccttccatgccttccagacagcggagggcatccggaaggcccacccagacaaggactggttccacctcgtcgggctcctgcacgacctggggaaggtcctggccctgttcggggagccccagtgggctgtcgtcggcgacaccttccccgtcggatgccgtccgcaggcctccgtggttttctgcgactccaccttccaggacaaccctgacctccaggatcctcgatacagcacagagctcgggatgtatcagccccactgtgggctcgacagggtcctcatgtcctggggccatgatgagtacatgtaccaggtgatgaagtttaacaagttctcactgccccctgaggctttctacatgatccggttccactccttctacccctggcacacgggccgcgactaccagcagctgtgcagccagcaggacctggccatgctgccctgggtgcgggagttcaacaagttcgacctctacaccaagtgcccggacctgccggacgtggacaagctgcggccctactaccaggggctcattgacaagtactgccctggcatcctgagctggtgaccctcctgccacccaagctgctgctggacctaggcctggccctccgcctgcctggagaggcctggccctgggcaaacagccgccatcagggttcacctcggtgggggaccccactcacccccttagggtcgccacccctcacggcaacttgtgcctggcgtcaataaagacctggaaggatgttgtgcttctgaagcc

SEQ ID NO: 156663 - DNA, 1658 bp, Homo sapiens
  Payload ID: 10711
  Gene Symbol: MIOX
  Gene Name: myo-inositol oxygenase
  ENST ID: ENST00000395732
  CDS Start-End: 23-835
ctgagcgccgctccctctcaggatgaaggtgacggtgggcccagacccttccctggtctaccgacctgatgtggacccagaggtggccaaagacaaggccagcttccggaactacacgtcaggtcccctcctggaccgtgtcttcaccacctacaagctcatgcacacgcaccagacagtggacttcgtcaggagcaagcatgcccagtttgggggcttctcctacaagaaaatgacagtcatggaggccgtggacctgctggatgggctggtggatgagtcggacccggacgtagatttccccaactccttccatgccttccagacagcggagggcatccggaaggcccacccagacaaggactggttccacctcgtcgggctcctgcacgacctggggaaggtcctggccctgttcggggagccccagtgggctgtcgtcggcgacaccttccccgtcggatgccgtccgcaggcctccgtggttttctgcgactccaccttccaggacaaccctgacctccaggatcctcgatacagcacagagctcgggatgtatcagccccactgtgggctcgacagggtcctcatgtcctggggccatgatgagtacatgtaccaggtgatgaagtttaacaagttctcactgccccctgaggctttctacatgatccggttccactccttctacccctggcacacgggccgcgactaccagcagctgtgcagccagcaggacctggccatgctgccctggcaagttcgacctctacaccaagtgcccggacctgccggacgtggacaagctgcggccctactaccaggggctcattgacaagtactgccctggcatcctgagctggtgaccctcctgccacccaagctgctgctggacctaggcctggccctccgcctgcctggagaggcctggccctgggcaaacagccgccatcagggttcacctcggtgggggaccccactcacccccttagggtcgccacccctcacggcaacttgtgcctggcgtcaataaagacctggaaggatgttgtgcttctgaagccccactgggtgttactgcagcagggcgtggcccaggccgagggatggtgccagcagggtggaggccaagtcccaggctttcaggtgtgtgtgtcccaccacactggccgtggtaaacatctgcccatcctcccagctcctgtgtcagagcctgggggacgagtcacccagctcacccccacatgctcaaaacagtcaccaagtcctctgggctccgtccccttaaaaaataccccaatagctaaaataatacattcatagaaaacaacaaaaaacaaatgcaggctgggcacagcggctcacacctataatcccagcactttgggagggcgaggtgggcggatcacctgaggtcaggggttcaagaccagcctggccaacatggtgaaaccccgtctctactaaaaatacaaaaattagccgggcgtggtggtgggcgcctgtaatcccagctattcaggaggctaaggcaggagaatcgcttgaacccgggagacaggggttgccgtgagtcaagattgtgccactgcactccaacctgggtatcaagagtgaaattccatctcaaaaaaaataaataaaataaaataaaacaa

SEQ ID NO: 156664 - DNA, 1021 bp, Homo sapiens
  Payload ID: 10711
  Gene Symbol: MIOX
  Gene Name: myo-inositol oxygenase
  Uniprot ID: Q9UGB7
  ENST ID: ENST00000395733
  CDS Start-End: 115-810
ggatggtcatttattactgcggacacttatgtaacctggggtgtatataggagcctggctgaggacacactcgccagcctgtgctttgccacctgagcgccgctccctctcaggatgaaggtgacggtgggcccagacccttccctggtctaccgacctgatgtggacccagaggtggccaaagacaaggccagcttccggaactacacgtcaggtcccctcctggaccgtgtcttcaccacctacaagctcatgcacacgcaccagacagtggacttcgtcaggagcaagcatgcccagtttgggggcttctcctacaagaaaatgacagtcatggaggccgtggacctgctggatgggctggtggatgagtcggacccggacgtagatttccccaactccttccatgccttccagacagcggagggcatccggaaggcccacccagacaaggtccccaacctgccctgtccatccccctcccagactggttccacctcgtcgggctcctgcacgacctggggaaggtcctggccctgttcggggagccccagtgggctgtcgtcggcgacaccttccccgtcggatgccgtccgcaggcctccgtggttttctgcgactccaccttccaggacaaccctgacctccaggatcctcgatacagcacagagctcgggatgtatcagccccactgtgggctcgacagggtcctcatgtcctggggccatgatgcaagttcgacctctacaccaagtgcccggacctgccggacgtggacaagctgcggccctactaccaggggctcattgacaagtactgccctggcatcctgagctggtgaccctcctgccacccaagctgctgctggacctaggcctggccctccgcctgcctggagaggcctggccctgggcaaacagccgccatcagggttcacctcggtgggggaccccactcacccccttagggtcgccacccctcacggcaacttgtgcctggcgtcaataaagacctggaagga

SEQ ID NO: 156665 - DNA, 918 bp, Homo sapiens
  Payload ID: 10711
  Gene Symbol: MIOX
  Gene Name: myo-inositol oxygenase
  ENST ID: ENST00000451761
  CDS Start-End: 1-798
ggcccagacccttccctggtctaccgacctgatgtggacccagaggtggccaaagacaaggccagcttccggaactacacgtcaggtcccctcctggaccgtgtcttcaccacctacaagctcatgcacacgcaccagacagtggacttcgtcaggagcaagcatgcccagtttgggggcttctcctacaagaaaatgacagtcatggaggccgtggacctgctggatgggctggtggatgagtcggacccggacgtagatttccccaactccttccatgccttccagacagcggagggcatccggaaggcccacccagacaaggactggttccacctcgtcgggctcctgcacgacctggggaaggtcctggccctgttcggggagccccaggcctccgtggttttctgcgactccaccttccaggacaaccctgacctccaggatcctcgatacagcacagagctcgggatgtatcagccccactgtgggctcgacagggtcctcatgtcctggggccatgatgagtacatgtaccaggtgatgaagtttaacaagttctcactgccccctgaggctttctacatgatccggttccactccttctacccctggcacacgggccgcgactaccagcagctgtgcagccagcaggacctggccatgctgccctgggtgcgggagttcaacaagttcgacctctacaccaagtgcccggacctgccggacgtggacaagctgcggccctactaccaggggctcattgacaagtactgccctggcatcctgagctggtgaccctcctgccacccaagctgctgctggacctaggcctggccctccgcctgcctggagaggcctggccctgggcaaacagccgccatcagggttcacctcggtgggggaccccactcaccc

SEQ ID NO: 156666 - DNA, 5154 bp, Homo sapiens
  Payload ID: 10712
  Gene Symbol: MYOM1
  Gene Name: myomesin 1
  Uniprot ID: P52179
  ENST ID: ENST00000261606
  CDS Start-End: 76-4845
tcggcctcatcggaacatttccaccaccattactcctttggaaactggtggcccggttccttcaaggggcacaggatgtctttgcctttttatcagaggtgccaccagcactatgatctcagctaccgcaacaaggacgtgcgcagcaccgtgagtcactaccagcgggagaagaaacgctccgccgtctacacccagggctccacggcctacagcagccgctcctccgccgcgcaccgccgggagtccgaggccttccgtcgggcgtccgcctcctcctcccagcagcaggcctcgcagcacgccctgagctctgaagtcagtcggaaggcagcctcagcctacgattatggctcctcccatggacttacagattccagtctgctgttagatgattattcatccaagttgagccccaaaccaaagagagccaagcacagcctactgtctggagaagagaaagaaaatttgcccagtgactacatggtacccattttctcaggacgtcaaaagcatgtcagtggaattactgatacggaagaagaaagaattaaagaagctgctgcttatatagcccagaggaatcttcttgctagtgaggaaggaatcacaacatctaaacagtccacggcatccaagcagaccacggcatctaagcagtccacggcatccaagcagtccacagcatccaagcagtccacggcatccaggcagtccacggcatccaggcagtctgtggtttccaaacaggccacatccgctcttcaacaggaagaaacttctgaaaagaagtcaaggaaagttgtgattcgagaaaaggcagaacgcctgtccctgaggaaaacattagaagaaaccgagacatatcatgccaagctgaatgaagaccatcttctccatgctcctgagtttatcattaaacctcgctcccacacggtttgggagaaggagaatgtaaaattgcattgctccatagcaggctggccagaacctcgtgtcacgtggtataaaaaccaggtgccaataaatgtccatgcaaaccctggaaagtatattattgagagtcgatatgggatgcacactctggagattaatggatgtgattttgaagatacagctcagtaccgggcctcggcgatgaatgttaaaggagagctttcggcatatgcttcagttgtggtaaaaaggtataagggagagtttgatgagactcgcttccacgctggggcttccaccatgcccctcagctttggtgtgaccccatatggttatgcatcccggtttgagatccactttgatgacaaatttgatgtgtcttttgggagagagggagagacaatgagtctaggctgtcgtgttgtcatcactcctgaaattaaacatttccagccagagatccagtggtacagaaacggagtacctctttctccatcaaaatgggtgcaaacactttggagtggagagcgggcaacgctgacattttcccatctcaacaaagaagatgaaggcctctatacaatccgtgtacggatgggagaatattatgaacaatatagtgcttatgtctttgttcgagatgctgatgcagagattgaaggagccccagctgctcccttggatgtgaagtgcttggaggccaacaaagattatatcatcatctcctggaaacagccagctgtcgatggagggagtcctattctcggatattttattgataagtgtgaggtgggcacagatagctggtcgcagtgcaatgacacacctgtgaagtttgctcgttttcctgtcactggattgatcgaaggtcgttcctatatcttccgagttcgagctgtgaataaaatgggaataggtttcccatctcgagtttccgagcccgtggctgctctggatccggctgagaaagctagacttaaaagtcgcccctcagcaccctggactggacagatcattgttactgaagaggaaccttcagagggtattgtgcctggccccccgacagacctctctgtcactgaggccacccggagctatgtggtgctcagctggaagccccctggccagcgtggtcatgagggcattatgtactttgtggaaaagtgtgaggcaggaacagaaaactggcagcgagtgaacacggagctccctgtgaagtctccccgctttgctctgtttgacttggccgaggggaaatcctactgtttccgtgtccgctgttctaattctgcaggagttggtgagccctcagaggcaacggaggtgactgtggtaggggacaaacttgatatccccaaggctcctggcaaaatcatcccaagcagaaacacagacacctcagtggtagtttcgtgggaggagtccaaagatgccaaagagctggtcgggtactacatagaggcgagcgttgctggctctggcaagtgggagccctgtaacaacaaccccgtgaagggctcacgattcacttgtcatggattagtgactggtcagagttatattttccgggtcagagcagtcaatgcagctggacttagtgaatattcccaggattcagaagctattgaagtcaaagctgctattgcaccaccatctccaccctgtgatatcacctgtcttgaaagttttcgtgactcaatggttcttggatggaagcaaccagataagattggaggggcagaaattactggctattatgtgaactatcgcgaggtcattgatggggtaccaggaaaatggagagaagccaatgtcaaggctgtcagtgaggaggcatacaagattagcaacttgaaggaaaacatggtgtatcagttccaagtggcagccatgaacatggctgggctgggcgcgccctccgcagtaagcgaatgcttcaaatgtgaagagtggaccatcgccgtcccaggaccaccgcacagtctcaagtgtagtgaagtcaggaaagactcactggttctccagtggaagccgccagtccactccgggcggactccggtcactggttacttcgtggacttgaaggaggccaaggccaaagaagaccagtggcgagggctcaatgaggcggctattaaaaacgtatacctgaaggttcgaggcctcaaggagggcgtcagctacgtgttccgtgttcgagccataaaccaggcgggagttgggaagccatctgaccttgctggccctgttgtggcagagacccgtccaggaaccaaagaggttgttgtaaatgtggatgatgatggagtcatttcattgaacttcgagtgtgataagatgactccaaagtccgagttctcctggtccaaagattatgtatccactgaggactctccacgattggaagtcgaaagcaagggcaacaagacgaaaatgaccttcaaagaccttgggatggatgacttgggtatttactcttgcgatgtaacagacactgatggaatagcatcaagctacttaatagatgaggaagaattgaaacgtttacttgctctcagccatgaacacaagttcccaactgtcccagttaaatcagagttggcagttgaaattttggagaaaggccaggtccggttttggatgcaggctgagaaactgtctggcaatgccaaagtcaactacatatttaacgagaaggaaatttttgaaggcccgaaatataaaatgcatattgaccgaaacactggcatcatcgaaatgttcatggaaaagctacaggatgaggatgagggaacgtacactttccagcttcaagatggaaaagcaactaaccattctactgttgttctcgttggagatgttttcaaaaagctccagaaagaagctgaattccagcggcaagaatggatcaggaaacaaggtcctcactttgttgagtatttgagctgggaagtgactggtgaatgtaatgtactattgaaatgcaaggtggcaaatattaagaaggagactcatattgtgtggtacaaagatgagagggagatatcagtggatgaaaagcatgactttaaggatggtatatgtaccctgcttataacagagttttccaagaaagatgctgggatttatgaagttatcctgaaagatgaccgaggaaaagataagagcagactgaagcttgtggatgaagcctttaaggaactgatgatggaagtatgcaaaaaaatagctttgtctgctacagacctgaaaatccagagcacagccgagggcatccaactgtactcttttgtaacttactatgtggaggatttgaaagttaactggtcccacaatgggtccgccattaggtactcagacagagttaagaccggggtcactggagagcagatctggctacaaatcaacgagcccaccccgaatgacaaagggaagtatgtcatggagctctttgatggcaaaactggacatcagaagacagtggatctctctggacaagcatacgatgaggcctatgctgaattccagaggttgaaacaagctgccattgccgagaaaaatcgtgcccgggtgttgggaggtctcccagacgtggtcaccatccaggaggggaaggcccttaatctcacttgcaacgtgtggggagacccgcctccggaggtgtcgtggttgaagaacgagaaggccctggcctcagacgaccactgcaacctcaagttcgaggctgggaggaccgcgtacttcaccatcaacggcgtgagcaccgctgactcgggcaaatacgggctggttgtgaagaacaagtatggctcggagaccagcgacttcaccgtcagcgtgttcatcccagaggaggaggcgaggatggccgccttggagtccctgaaaggtggcaagaaggccaagtgaccggaggtgcgaggagagccagccggcctgtgtgacttgggtgtgaatggtttgggttaaggatgagacgtcttcatgctttctcctccctattattttctggcttgaggggaaaataatgtcaggtctttcactcatataaaaaagcaccaactaatgacactttaattgtttttctttatctacaaaattatgtgttaagaaaataccattcatagcatgaagattaggaaacagttttaaggagaagacttgaatgaagttggagggacattgaatgatggtcagagggcagacgaatgtgtcgtg

SEQ ID NO: 156667 - DNA, 5847 bp, Homo sapiens
  Payload ID: 10712
  Gene Symbol: MYOM1
  Gene Name: myomesin 1
  Uniprot ID: P52179
  ENST ID: ENST00000356443
  CDS Start-End: 335-5392
ggcattatgcaattatattactaaggctgctacctgcccatgcccctctcctcctcctggtttggaactaccctccccatctgctgctatatttatctgccttcttggccataaaaggctggttgtgtggcctgacattcgactgcctgaccacatgcattatttttgaactggcccccagggtcctgtctttagccctgcctcttaacattgtcttggattcaacctaggtggagtcttcattctctcatccagctcctcggcctcatcggaacatttccaccaccattactcctttggaaactggtggcccggttccttcaaggggcacaggatgtctttgcctttttatcagaggtgccaccagcactatgatctcagctaccgcaacaaggacgtgcgcagcaccgtgagtcactaccagcgggagaagaaacgctccgccgtctacacccagggctccacggcctacagcagccgctcctccgccgcgcaccgccgggagtccgaggccttccgtcgggcgtccgcctcctcctcccagcagcaggcctcgcagcacgccctgagctctgaagtcagtcggaaggcagcctcagcctacgattatggctcctcccatggacttacagattccagtctgctgttagatgattattcatccaagttgagccccaaaccaaagagagccaagcacagcctactgtctggagaagagaaagaaaatttgcccagtgactacatggtacccattttctcaggacgtcaaaagcatgtcagtggaattactgatacggaagaagaaagaattaaagaagctgctgcttatatagcccagaggaatcttcttgctagtgaggaaggaatcacaacatctaaacagtccacggcatccaagcagaccacggcatctaagcagtccacggcatccaagcagtccacagcatccaagcagtccacggcatccaggcagtccacggcatccaggcagtctgtggtttccaaacaggccacatccgctcttcaacaggaagaaacttctgaaaagaagtcaaggaaagttgtgattcgagaaaaggcagaacgcctgtccctgaggaaaacattagaagaaaccgagacatatcatgccaagctgaatgaagaccatcttctccatgctcctgagtttatcattaaacctcgctcccacacggtttgggagaaggagaatgtaaaattgcattgctccatagcaggctggccagaacctcgtgtcacgtggtataaaaaccaggtgccaataaatgtccatgcaaaccctggaaagtatattattgagagtcgatatgggatgcacactctggagattaatggatgtgattttgaagatacagctcagtaccgggcctcggcgatgaatgttaaaggagagctttcggcatatgcttcagttgtggtaaaaaggtataagggagagtttgatgagactcgcttccacgctggggcttccaccatgcccctcagctttggtgtgaccccatatggttatgcatcccggtttgagatccactttgatgacaaatttgatgtgtcttttgggagagagggagagacaatgagtctaggctgtcgtgttgtcatcactcctgaaattaaacatttccagccagagatccagtggtacagaaacggagtacctctttctccatcaaaatgggtgcaaacactttggagtggagagcgggcaacgctgacattttcccatctcaacaaagaagatgaaggcctctatacaatccgtgtacggatgggagaatattatgaacaatatagtgcttatgtctttgttcgagatgctgatgcagagattgaaggagccccagctgctcccttggatgtgaagtgcttggaggccaacaaagattatatcatcatctcctggaaacagccagctgtcgatggagggagtcctattctcggatattttattgataagtgtgaggtgggcacagatagctggtcgcagtgcaatgacacacctgtgaagtttgctcgttttcctgtcactggattgatcgaaggtcgttcctatatcttccgagttcgagctgtgaataaaatgggaataggtttcccatctcgagtttccgagcccgtggctgctctggatccggctgagaaagctagacttaaaagtcgcccctcagcaccctggactggacagatcattgttactgaagaggaaccttcagagggtattgtgcctggccccccgacagacctctctgtcactgaggccacccggagctatgtggtgctcagctggaagccccctggccagcgtggtcatgagggcattatgtactttgtggaaaagtgtgaggcaggaacagaaaactggcagcgagtgaacacggagctccctgtgaagtctccccgctttgctctgtttgacttggccgaggggaaatcctactgtttccgtgtccgctgttctaattctgcaggagttggtgagccctcagaggcaacggaggtgactgtggtaggggacaaacttgatatccccaaggctcctggcaaaatcatcccaagcagaaacacagacacctcagtggtagtttcgtgggaggagtccaaagatgccaaagagctggtcgggtactacatagaggcgagcgttgctggctctggcaagtgggagccctgtaacaacaaccccgtgaagggctcacgattcacttgtcatggattagtgactggtcagagttatattttccgggtcagagcagtcaatgcagctggacttagtgaatattcccaggattcagaagctattgaagtcaaagctgctattgggggaggagtgtctccagatgtgtgtcccgcactgagcgatgagcctggtggactaaccgcctccagggggcgcgtgcatgaagcctccccgccaaccttccagaaagatgctttgcttggcagcaaacctaacaaaccttcactacccagtagctctcaaaacctgggccaaacagaagtgagtaaagtaagtgaaacagttcaggaagagcttaccccgccaccacagaaagcggctcctcaggggaaaagtaagtctgaccccctgaaaaagaagacagacagagcaccaccatctccaccctgtgatatcacctgtcttgaaagttttcgtgactcaatggttcttggatggaagcaaccagataagattggaggggcagaaattactggctattatgtgaactatcgcgaggtcattgatggggtaccaggaaaatggagagaagccaatgtcaaggctgtcagtgaggaggcatacaagattagcaacttgaaggaaaacatggtgtatcagttccaagtggcagccatgaacatggctgggctgggcgcgccctccgcagtaagcgaatgcttcaaatgtgaagagtggaccatcgccgtcccaggaccaccgcacagtctcaagtgtagtgaagtcaggaaagactcactggttctccagtggaagccgccagtccactccgggcggactccggtcactggttacttcgtggacttgaaggaggccaaggccaaagaagaccagtggcgagggctcaatgaggcggctattaaaaacgtatacctgaaggttcgaggcctcaaggagggcgtcagctacgtgttccgtgttcgagccataaaccaggcgggagttgggaagccatctgaccttgctggccctgttgtggcagagacccgtccaggaaccaaagaggttgttgtaaatgtggatgatgatggagtcatttcattgaacttcgagtgtgataagatgactccaaagtccgagttctcctggtccaaagattatgtatccactgaggactctccacgattggaagtcgaaagcaagggcaacaagacgaaaatgaccttcaaagaccttgggatggatgacttgggtatttactcttgcgatgtaacagacactgatggaatagcatcaagctacttaatagatgaggaagaattgaaacgtttacttgctctcagccatgaacacaagttcccaactgtcccagttaaatcagagttggcagttgaaattttggagaaaggccaggtccggttttggatgcaggctgagaaactgtctggcaatgccaaagtcaactacatatttaacgagaaggaaatttttgaaggcccgaaatataaaatgcatattgaccgaaacactggcatcatcgaaatgttcatggaaaagctacaggatgaggatgagggaacgtacactttccagcttcaagatggaaaagcaactaaccattctactgttgttctcgttggagatgttttcaaaaagctccagaaagaagctgaattccagcggcaagaatggatcaggaaacaaggtcctcactttgttgagtatttgagctgggaagtgactggtgaatgtaatgtactattgaaatgcaaggtggcaaatattaagaaggagactcatattgtgtggtacaaagatgagagggagatatcagtggatgaaaagcatgactttaaggatggtatatgtaccctgcttataacagagttttccaagaaagatgctgggatttatgaagttatcctgaaagatgaccgaggaaaagataagagcagactgaagcttgtggatgaagcctttaaggaactgatgatggaagtatgcaaaaaaatagctttgtctgctacagacctgaaaatccagagcacagccgagggcatccaactgtactcttttgtaacttactatgtggaggatttgaaagttaactggtcccacaatgggtccgccattaggtactcagacagagttaagaccggggtcactggagagcagatctggctacaaatcaacgagcccaccccgaatgacaaagggaagtatgtcatggagctctttgatggcaaaactggacatcagaagacagtggatctctctggacaagcatacgatgaggcctatgctgaattccagaggttgaaacaagctgccattgccgagaaaaatcgtgcccgggtgttgggaggtctcccagacgtggtcaccatccaggaggggaaggcccttaatctcacttgcaacgtgtggggagacccgcctccggaggtgtcgtggttgaagaacgagaaggccctggcctcagacgaccactgcaacctcaagttcgaggctgggaggaccgcgtacttcaccatcaacggcgtgagcaccgctgactcgggcaaatacgggctggttgtgaagaacaagtatggctcggagaccagcgacttcaccgtcagcgtgttcatcccagaggaggaggcgaggatggccgccttggagtccctgaaaggtggcaagaaggccaagtgaccggaggtgcgaggagagccagccggcctgtgtgacttgggtgtgaatggtttgggttaaggatgagacgtcttcatgctttctcctccctattattttctggcttgaggggaaaataatgtcaggtctttcactcatataaaaaagcaccaactaatgacactttaattgtttttctttatctacaaaattatgtgttaagaaaataccattcatagcatgaagattaggaaacagttttaaggagaagacttgaatgaagttggagggacattgaatgatggtcagagggcagacgaatgtgtcgtggggcgaattgggatttgctgcagctgtgaagccatggccgtgtctcgtgtgttgttacagaggtgatgtgcttttcgacgggcgcctcgtggcttggaacctcctctgtatgaataaacagttttcacgtctgtcctcttccccga

SEQ ID NO: 156668 - DNA, 4927 bp, Homo sapiens
  Payload ID: 10712
  Gene Symbol: MYOM1
  Gene Name: myomesin 1
  ENST ID: ENST00000400569
  CDS Start-End: 115-4473
acagattccagtctgctgttagatgattattcatccaagttgagccccaaaccaaagagagccaagcacagcctactgtctggagaagagaaagaaaatttgcccagtgactacatggtacccattttctcaggacgtcaaaagcatgtcagtggaattactgatacggaagaagaaagaattaaagaagctgctgcttatatagcccagaggaatcttcttgctagtgaggaaggaatcacaacatctaaacagtccacggcatccaagcagaccacggcatctaagcagtccacggcatccaagcagtccacagcatccaagcagtccacggcatccaggcagtccacggcatccaggcagtctgtggtttccaaacaggccacatccgctcttcaacaggaagaaacttctgaaaagaagtcaaggaaagttgtgattcgagaaaaggcagaacgcctgtccctgaggaaaacattagaagaaaccgagacatatcatgccaagctgaatgaagaccatcttctccatgctcctgagtttatcattaaacctcgctcccacacggtttgggagaaggagaatgtaaaattgcattgctccatagcaggctggccagaacctcgtgtcacgtggtataaaaaccaggtgccaataaatgtccatgcaaaccctggaaagtatattattgagagtcgatatgggatgcacactctggagattaatggatgtgattttgaagatacagctcagtaccgggcctcggcgatgaatgttaaaggagagctttcggcatatgcttcagttgtggtaaaaaggtataagggagagtttgatgagactcgcttccacgctggggcttccaccatgcccctcagctttggtgtgaccccatatggttatgcatcccggtttgagatccactttgatgacaaatttgatgtgtcttttgggagagagggagagacaatgagtctaggctgtcgtgttgtcatcactcctgaaattaaacatttccagccagagatccagtggtacagaaacggagtacctctttctccatcaaaatgggtgcaaacactttggagtggagagcgggcaacgctgacattttcccatctcaacaaagaagatgaaggcctctatacaatccgtgtacggatgggagaatattatgaacaatatagtgcttatgtctttgttcgagatgctgatgcagagattgaaggagccccagctgctcccttggatgtgaagtgcttggaggccaacaaagattatatcatcatctcctggaaacagccagctgtcgatggagggagtcctattctcggatattttattgataagtgtgaggtgggcacagatagctggtcgcagtgcaatgacacacctgtgaagtttgctcgttttcctgtcactggattgatcgaaggtcgttcctatatcttccgagttcgagctgtgaataaaatgggaataggtttcccatctcgagtttccgagcccgtggctgctctggatccggctgagaaagctagacttaagtcgcccctcagcaccctggactggacaatcattgttactgaagaggaaccttcagagggtattgtgcctggccccccgacagacctctctgtcactgaggccacccggagctatgtggtgctcagctggaagccccctggccagcgtggtcatgagggcattatgtactttgtggaaaagtgtgaggcaggaacagaaaactggcagcgagtgaacacggagctccctgtgaagtctccccgctttgctctgtttgacttggccgaggggaaatcctactgtttccgtgtccgctgttctaattctgcaggagttggtgagccctcagaggcaacggaggtgactgtggtaggggacaaacttgatatccccaaggctcctggcaaaatcatcccaagcagaaacacagacacctcagtggtagtttcgtgggaggagtccaaagatgccaaagagctggtcgggtactacatagaggcgagcgttgctggctctggcaagtgggagccctgtaacaacaaccccgtgaaggctcacggattcacttgtcatggattagtgactggtcagagttatattttccgggtcagagcagtcaatgcagctggacttagtgaatattcccaggattcagaagctattgaagtcaaagctgctattgcaccaccatctccaccctgtgatatcacctgtcttgaaagttttcgtgactcaatggttcttggatggaagcaaccagataagattggaggggcagaaattactggctattatgtgaactatcgcgaggtcattgatggggtaccaggaaaatggagagaagccaatgtcaaggctgtcagtgaggaggcatacaagattagcaacttgaaggaaaacatggtgtatcagttccaagtggcagccatgaacatggctgggctgggcgcgccctccgcagtaagcgaatgcttcaaatgtgaagagtggaccatcgccgtcccaggaccaccgcacagtctcaagtgtagtgaagtcaggaaagactcactggttctccagtggaagccgccagtccactccgggcggactccggtcactggttacttcgtggacttgaaggaggccaaggccaaagaagaccagtggcgagggctcaatgaggcggctattaaaaacgtatacctgaaggttcgaggcctcaaggagggcgtcagctacgtgttccgtgttcgagccataaaccaggcgggagttgggaagccatctgaccttgctggccctgttgtggcagagacccgtccaggaaccaaagaggttgttgtaaatgtggatgatgatggagtcatttcattgaacttcgagtgtgataagatgactccaaagtccgagttctcctggtccaaagattatgtatccactgaggactctccacgattggaagtcgaaagcaagggcaacaagacgaaaatgaccttcaaagaccttgggatggatgacttgggtatttactcttgcgatgtaacagacactgatggaatagcatcaagctacttaatagatgaggaagaattgaaacgtttacttgctctcagccatgaacacaagttcccaactgtcccagttaaatcagagttggcagttgaaattttggagaaaggccaggtccggttttggatgcaggctgagaaactgtctggcaatgccaaagtcaactacatatttaacgagaaggaaatttttgaaggcccgaaatataaaatgcatattgaccgaaacactggcatcatcgaaatgttcatggaaaagctacaggatgaggatgagggaacgtacactttccagcttcaagatggaaaagcaactaaccattctactgttgttctcgttggagatgttttcaaaaagctccagaaagaagctgaattccagcggcaagaatggatcaggaaacaaggtcctcactttgttgagtatttgagctgggaagtgactggtgaatgtaatgtactattgaaatgcaaggtggcaaatattaagaaggagactcatattgtgtggtacaaagatgagagggagatatcagtggatgaaaagcatgactttaaggatggtatatgtaccctgcttataacagagttttccaagaaagatgctgggatttatgaagttatcctgaaagatgaccgaggaaaagataagagcagactgaagcttgtggatgaagcctttaaggaactgatgatggaagtatgcaaaaaaatagctttgtctgctacagacctgaaaatccagagcacagccgagggcatccaactgtactcttttgtaacttactatgtggaggatttgaaagttaactggtcccacaatgggtccgccattaggtactcagacagagttaagaccggggtcactggagagcagatctggctacaaatcaacgagcccaccccgaatgacaaagggaagtatgtcatggagctctttgatggcaaaactggacatcagaagacagtggatctctctggacaagcatacgatgaggcctatgctgaattccagaggttgaaacaagctgccattgccgagaaaaatcgtgcccgggtgttgggaggtctcccagacgtggtcaccatccaggaggggaaggcccttaatctcacttgcaacgtgtggggagacccgcctccggaggtgtcgtggttgaagaacgagaaggccctggcctcagacgaccactgcaacctcaagttcgaggctgggaggaccgcgtacttcaccatcaacggcgtgagcaccgctgactcgggcaaatacgggctggttgtgaagaacaagtatggctcggagaccagcgacttcaccgtcagcgtgttcatcccagaggaggaggcgaggatggccgccttggagtccctgaaaggtggcaagaaggccaagtgaccggaggtgcgaggagagccagccggcctgtgtgacttgggtgtgaatggtttgggttaaggatgagacgtcttcatgctttctcctccctattattttctggcttgaggggaaaataatgtcaggtctttcactcatataaaaaagcaccaactaatgacactttaattgtttttctttatctacaaaattatgtgttaagaaaataccattcatagcatgaagattaggaaacagttttaaggagaagacttgaatgaagttggagggacattgaatgatggtcagagggcagacgaatgtgtcgtggggcgaattgggatttgctgcagctgtgaagccatggccgtgtctcgtgtgttgttacagaggtgatgtgcttttcgacgggcgcctcgtggcttggaacctcctctgtatgaataaacagttttcacgtctgtcctcttccccg

SEQ ID NO: 156669 - DNA, 684 bp, Homo sapiens
  Payload ID: 10712
  Gene Symbol: MYOM1
  Gene Name: myomesin 1
  ENST ID: ENST00000581075
  CDS Start-End: 1-366
atcgaaatgttcatggaaaagctacaggatgaggatgagggaacgtacactttccagcttcaagatggaaaagcaactaaccattctactgttgttctcgttggagatgttttcaaaaagctccagaaagaagctgaattccagcggcaagaatggatcaggaaacaaggtcctcactttgttgagtatttgagctgggaagtgactggtgaatgtaatgtactattgaaatgcaaggtggcaaatattaagaaggagactcatattgtgtggtacaaagatgagagggagatatcagtggatgaaaagcatgactttaaggatggtatatgtaccctgcttataacagagcctttaaggaactgatgatggaagtatgcaaaaaaatagctttgtctgctacagacctgaaaatccagagcacagccgagggcatccaactgtactcttttgtaacttactatgtggaggatttgaaagttaactggtcccacaatgggtccgccattaggtactcagacagagttaagaccggggtcactggagagcagatctggctacaaatcaacgagcccaccccgaatgacaaagggaagtatgtcatggagctctttgatggcaaaactggacatcagaagacagtggatctctctggacaagcatacgatgaggcctatgctgaat

SEQ ID NO: 156670 - DNA, 5014 bp, Homo sapiens
  Payload ID: 10713
  Gene Symbol: MYOM2
  Gene Name: myomesin 2
  Uniprot ID: P54296
  ENST ID: ENST00000262113
  CDS Start-End: 142-4539
aacgggagggaggcacaggcgcttgctttgcaggagtcagctctgccttcctcggctggagtgtgggtggcttggtgagccggtggtcaggaattctctctcctccttgcaattttcctttctgtctgggagcacgccaagatgtcccttgtgactgtccccttctaccagaagagacataggcacttcgaccagtcctaccgtaatattcaaacacggtacctgctggacgaatatgcgtcaaaaaagcgagcttccacccaggcatcttcccagaagtccttgagtcagcggtcgtcttcacagagagcctccagccagacgtccctgggaggaaccatctgcagggtctgtgcgaagcgagtgagcacgcaggaagatgaggagcaggagaacagaagcaggtaccagtccctggtggccgcctatggtgaggccaagcgacagcgcttcctcagcgagctggcccacttggaggaggatgtccacctggcacgctcccaggcccgcgacaagctggacaaatacgccattcagcagatgatggaggacaagctggcctgggagagacacacatttgaagagcggataagcagggctcctgagatcctggtgcggctgcgatcccacaccgtctgggagaggatgtctgtgaaactctgcttcaccgtgcaaggatttcccacgcccgtggtgcagtggtacaaagatggcagtctgatttgccaggcggctgaaccgggaaagtacaggattgagagcaactatggcgtacacacactggagatcaacagggcagactttgacgacactgcgacatactcagcagtggccaccaatgcccacggacaagtgtccaccaacgcggcggtggtggtgagaaggttccggggagacgaggaaccattccgttcggtgggactcccgattggattgcccctgtcatcgatgattccgtacacgcacttcgacgtccagtttttggagaagtttggggtcaccttcaggagggaaggcgagacggtcactctcaagtgcaccatgctggtgacgccggacctgaagcgggtgcagccgcgcgccgagtggtaccgcgatgacgtgctgttgaaagagtccaagtggacgaagatgttctttggagaaggccaggcctccctgtccttcagccacctgcacaaggacgacgagggcctgtacaccctgcgcatcgtgtctcggggcggcgtcagcgaccacagcgccttcctgtttgtcagagatgctgacccgctggtcacaggggcccccggtgcacccatggacttgcagtgccacgacgccaaccgggactacgtcatcgtgacctggaagccgcccaacaccaccactgagagccccgtcatgggctattttgtggaccgatgtgaagtaggaacgaataattgggtgcagtgcaatgatgcaccggtgaaaatctgcaaatacccggtcacagggctttttgaaggaaggtcttacatattccgagtgagggcagtgaacagtgcgggcatcagccgaccctccagggtctctgatgcggtggctgcacttgaccccttggacctcagaaggttacaagccgttcatttggagggagagaaggagattgccatttatcaggatgaccttgaaggtgacgcccaggttccagggcctcccaccggtgtgcacgcttccgagatcagcagaaactatgtcgtcctcagctgggagccacccactccccgtggcaaggacccgctcatgtacttcattgagaagtccgtggtggggagcggcagctggcagagagtcaacgcccagacggctgtgagatccccgagatatgccgtgtttgacctcatggaagggaagtcttatgtgttccgagtgctgtcagcaaaccggcatggcctgagcgaaccttcggagataacgtcccccattcaggcccaggatgtgaccgttgtcccttctgctccgggtcgggttcttgcttcccgaaacaccaagacgtcggtggtggtgcagtgggaccgacctaagcatgaggaggacctgctgggctactacgtggactgctgtgtggccggaaccaacctctgggagccctgcaaccacaagcccatcggatacaacaggttcgtggtgcacggcttaaccacgggagagcagtacatcttccgagtcaaggcggtcaatgctgtggggatgagtgaaaattcccaggaatcagacgtcataaaagtgcaggccgcactcaccgtcccgtcccatccttatgggattacgctcctcaactgtgacggccactccatgaccctcggctggaaggtcccgaaattcagtggtggctcgcccatcctgggctactacctggacaagcgtgaagttcaccataaaaactggcacgaggtcaattcctcacccagcaaaccgacaatcctaacggtggacggcttgacggaaggctcactctacgagttcaaaatcgccgccgtcaacctggccggcatcggggagccctcagatcccagtgagcacttcaagtgtgaggcctggaccatgccggagcccggtcctgcctacgacttgacgttctgtgaggtcagggacacgtccttggtcatgctgtggaaggcccctgtgtactccggcagcagccctgtttctggatatttcgtggacttcagggaggaggatgctggagagtggatcactgtcaatcagacgacaacagccagccgttatttaaaggtctctgacctgcagcaaggtaagacctatgtcttcagggtccgggcagtcaatgcaaatggcgtggggaagccctcagacacgtcggagcctgtgctggtagaggcgagaccaggcaccaaggaaatcagtgctggtgtcgatgaacaaggcaacatctatctgggcttcgactgccaggaaatgacagacgcgtctcagttcacctggtgtaaatcctacgaggagatttcagatgatgagaggtttaaaattgaaaccgtgggggatcactccaagctgtacttaaagaatccggataaggaggatttagggacttactccgtgtctgtaagtgatacagacggagtgtcctccagttttgttctggacccagaagagctcgagcgtttgatggcattgagcaatgaaataaagaaccccacaattcctctgaaatcggaattagcttatgagatttttgataaggggcgggttcgcttctggctccaggctgagcacttatcaccagatgccagctaccgatttattattaacgacagagaagtctctgacagcgagatacacagaattaaatgtgacaaagctactggcattattgagatggtgatggatcgatttagtattgaaaatgaggggacctacactgtgcagattcatgatgggaaagccaaaagtcagtcttctctagttcttattggagatgcattcaagactgtgctggaagaggctgagtttcaaaggaaagaatttctcaggaaacaaggccctcattttgctgagtacttgcactgggatgtcacggaagaatgtgaagttcgacttgtttgcaaggttgcaaacaccaagaaagaaaccgttttcaaatggctcaaggatgatgttctgtatgaaacggagacactgcctaacctggagaggggaatctgtgagctcctcatcccaaagttgtcaaagaaggaccacggtgaatacaaggcaaccttgaaagatgacagaggccaagatgtgtccatccttgaaatagctggcaaagtgtatgatgatatgattttggcaatgagtagagtctgtgggaaatctgcttcgccactgaaggtactctgcaccccagaaggaatacgacttcagtgtttcatgaagtattttacagacgaaatgaaagtgaactggtgtcacaaagatgctaagatctcatccagtgagcatatgagaatcggggggagtgaagagatggcttggctgcagatatgtgagccgactgagaaggataaaggaaaatacacttttgagattttcgatggcaaagacaaccatcaacgctcccttgacctgtccggacaagcttttgatgaagcatttgcagaattccagcaattcaaagctgctgcttttgcagagaagaatcgtggcaggttgatcggcggcttgcctgacgtggtgaccatcatggaagggaagaccttgaatctgacctgcacggtgtttggaaaccctgaccccgaagtgatttggttcaagaacgaccaggacatccagctcagcgagcacttctcggtgaaggtggagcaggccaagtacgtcagcatgaccatcaaaggcgtgacctccgaggactcgggcaagtacagcatcaacatcaagaataagtatggcggggagaagatcgacgtgacagtgagcgtgtacaaacacggggagaagatcccggacatggccccgccccagcaagccaagcccaagctcatccccgcgtctgcctcagcggcaggccagtgaaggcgttttcctagcctggagatgggaaaatatgcttggcagagacaggaatgctgtgtgcttgttccaaatgagcagctggcatccgagtggtgtcctgtgtgggctgatagttgatcacacattgtgcttttgatttttgcatttggtgatgaatattttatacccgtctaagggagaaagctaatgttttccacaagactgaacaacgtgtatttacacgagggtagacggcagatgcctgacagagagtgggttggcagacaacacactagaattttcacgggtgtgggcacatgggtgtggcacctggacgtgtgcagcatgtggcggtctgtgtgaagccaccgtgcttctctttggggggccgcgagatctagcatctctgaaatcctggctgtcgaggctttgaagcatgtgttacctggttaagcttgttttctcttgctttaggcaaataaaagtttaaaaatca

SEQ ID NO: 156671 - DNA, 3328 bp, Homo sapiens
  Payload ID: 10713
  Gene Symbol: MYOM2
  Gene Name: myomesin 2
  ENST ID: ENST00000523438
  CDS Start-End: 182-2854
gcaggagtcagctctgccttcctcggctggagtgtgggtggcttggtgagccggtggtcaggaattctctctcctccttgcaattttcctttctgtctggtccgtggtggggagcggcagctggcagagagtcaacgcccagacggctgtgagatccccgagatatgccgtgtttgacctcatggaagggaagtcttatgtgttccgagtgctgtcagcaaaccggcatggcctgagcgaaccttcggagataacgtcccccattcaggcccaggatgtgaccgttgtcccttctgctccgggtcgggttcttgcttcccgaaacaccaagacgtcggtggtggtgcagtgggaccgacctaagcatgaggaggacctgctgggctactacgtggactgctgtgtggccggaaccaacctctgggagccctgcaaccacaagcccatcggatacaacaggttcgtggtgcacggcttaaccacgggagagcagtacatcttccgagtcaaggcggtcaatgctgtggggatgagtgaaaattcccaggaatcagacgtcataaaagtgcaggccgcactcaccgtcccgtcccatccttatgggattacgctcctcaactgtgacggccactccatgaccctcggctggaaggtcccgaaattcagtggtggctcgcccatcctgggctactacctggacaagcgtgaagttcaccataaaaactggcacgaggtcaattcctcacccagcaaaccgacaatcctaacggtggacggcttgacggaaggctcactctacgagttcaaaatcgccgccgtcaacctggccggcatcggggagccctcagatcccagtgagcacttcaagtgtgaggcctggaccatgccggagcccggtcctgcctacgacttgacgttctgtgaggtcagggacacgtccttggtcatgctgtggaaggcccctgtgtactccggcagcagccctgtttctggatatttcgtggacttcagggaggaggatgctggagagtggatcactgtcaatcagacgacaacagccagccgttatttaaaggtctctgacctgcagcaaggtaagacctatgtcttcagggtccgggcagtcaatgcaaatggcgtggggaagccctcagacacgtcggagcctgtgctggtagaggcgagaccaggcaccaaggaaatcagtgctggtgtcgatgaacaaggcaacatctatctgggcttcgactgccaggaaatgacagacgcgtctcagttcacctggtgtaaatcctacgaggagatttcagatgatgagaggtttaaaattgaaaccgtgggggatcactccaagctgtacttaaagaatccggataaggaggatttagggacttactccgtgtctgtaagtgatacagacggagtgtcctccagttttgttctggacccagaagagctcgagcgtttgatggcattgagcaatgaaataaagaaccccacaattcctctgaaatcggaattagcttatgagatttttgataaggggcgggttcgcttctggctccaggctgagcacttatcaccagatgccagctaccgatttattattaacgacagagaagtctctgacagcgagatacacagaattaaatgtgacaaagctactggcattattgagatggtgatggatcgatttagtattgaaaatgaggggacctacactgtgcagattcatgatgggaaagccaaaagtcagtcttctctagttcttattggagatgcattcaagactgtgctggaagaggctgagtttcaaaggaaagaatttctcaggaaacaaggccctcattttgctgagtacttgcactgggatgtcacggaagaatgtgaagttcgacttgtttgcaaggttgcaaacaccaagaaagaaaccgttttcaaatggctcaaggatgatgttctgtatgaaacggagacactgcctaacctggagaggggaatctgtgagctcctcatcccaaagttgtcaaagaaggaccacggtgaatacaaggcaaccttgaaagatgacagaggccaagatgtgtccatccttgaaatagctggcaaagtgtatgatgatatgattttggcaatgagtagagtctgtgggaaatctgcttcgccactgaaggtactctgcaccccagaaggaatacgacttcagtgtttcatgaagtattttacagacgaaatgaaagtgaactggtgtcacaaagatgctaagatctcatccagtgagcatatgagaatcggggggagtgaagagatggcttggctgcagatatgtgagccgactgagaaggataaaggaaaatacacttttgagattttcgatggcaaagacaaccatcaacgctcccttgacctgtccggacaagcttttgatgaagcatttgcagaattccagcaattcaaagctgctgcttttgcagagaagaatcgtggcaggttgatcggcggcttgcctgacgtggtgaccatcatggaagggaagaccttgaatctgacctgcacggtgtttggaaaccctgaccccgaagtgatttggttcaagaacgaccaggacatccagctcagcgagcacttctcggtgaaggtggagcaggccaagtacgtcagcatgaccatcaaaggcgtgacctccgaggactcgggcaagtacagcatcaacatcaagaataagtatggcggggagaagatcgacgtgacagtgagcgtgtacaaacacggggagaagatcccggacatggccccgccccagcaagccaagcccaagctcatccccgcgtctgcctcagcggcaggccagtgaaggcgttttcctagcctggagatgggaaaatatgcttggcagagacaggaatgctgtgtgcttgttccaaatgagcagctggcatccgagtggtgtcctgtgtgggctgatagttgatcacacattgtgcttttgatttttgcatttggtgatgaatattttatacccgtctaagggagaaagctaatgttttccacaagactgaacaacgtgtatttacacgagggtagacggcagatgcctgacagagagtgggttggcagacaacacactagaattttcacgggtgtgggcacatgggtgtggcacctggacgtgtgcagcatgtggcggtctgtgtgaagccaccgtgcttctctttggggggccgcgagatctagcatctctgaaatcctggctgtcgaggctttgaagcatgtgttacctggttaagcttgttttctcttgctttaggcaaataaaagtttaaaaatc

SEQ ID NO: 156672 - DNA, 5014 bp, Homo sapiens
  Payload ID: 10713
  Gene Symbol: MYOM2
  Gene Name: myomesin 2
  Uniprot ID: P54296
  ENST ID: ENST00000616680
  CDS Start-End: 142-4539
aacgggagggaggcacaggcgcttgctttgcaggagtcagctctgccttcctcggctggagtgtgggtggcttggtgagccggtggtcaggaattctctctcctccttgcaattttcctttctgtctgggagcacgccaagatgtcccttgtgactgtccccttctaccagaagagacataggcacttcgaccagtcctaccgtaatattcaaacacggtacctgctggacgaatatgcgtcaaaaaagcgagcttccacccaggcatcttcccagaagtccttgagtcagcggtcgtcttcacagagagcctccagccagacgtccctgggaggaaccatctgcagggtctgtgcgaagcgagtgagcacgcaggaagatgaggagcaggagaacagaagcaggtaccagtccctggtggccgcctatggtgaggccaagcgacagcgcttcctcagcgagctggcccacttggaggaggatgtccacctggcacgctcccaggcccgcgacaagctggacaaatacgccattcagcagatgatggaggacaagctggcctgggagagacacacatttgaagagcggataagcagggctcctgagatcctggtgcggctgcgatcccacaccgtctgggagaggatgtctgtgaaactctgcttcaccgtgcaaggatttcccacgcccgtggtgcagtggtacaaagatggcagtctgatttgccaggcggctgaaccgggaaagtacaggattgagagcaactatggcgtacacacactggagatcaacagggcagactttgacgacactgcgacatactcagcagtggccaccaatgcccacggacaagtgtccaccaacgcggcggtggtggtgagaaggttccggggagacgaggaaccattccgttcggtgggactcccgattggattgcccctgtcatcgatgattccgtacacgcacttcgacgtccagtttttggagaagtttggggtcaccttcaggagggaaggcgagacggtcactctcaagtgcaccatgctggtgacgccggacctgaagcgggtgcagccgcgcgccgagtggtaccgcgatgacgtgctgttgaaagagtccaagtggacgaagatgttctttggagaaggccaggcctccctgtccttcagccacctgcacaaggacgacgagggcctgtacaccctgcgcatcgtgtctcggggcggcgtcagcgaccacagcgccttcctgtttgtcagagatgctgacccgctggtcacaggggcccccggtgcacccatggacttgcagtgccacgacgccaaccgggactacgtcatcgtgacctggaagccgcccaacaccaccactgagagccccgtcatgggctattttgtggaccgatgtgaagtaggaacgaataattgggtgcagtgcaatgatgcaccggtgaaaatctgcaaatacccggtcacagggctttttgaaggaaggtcttacatattccgagtgagggcagtgaacagtgcgggcatcagccgaccctccagggtctctgatgcggtggctgcacttgaccccttggacctcagaaggttacaagccgttcatttggagggagagaaggagattgccatttatcaggatgaccttgaaggtgacgcccaggttccagggcctcccaccggtgtgcacgcttccgagatcagcagaaactatgtcgtcctcagctgggagccacccactccccgtggcaaggacccgctcatgtacttcattgagaagtcggtggtggggagcggcagctggcagagagtcaacgcccagacggctgtgagatccccgagatatgccgtgtttgacctcatggaagggaagtcttatgtgttccgagtgctgtcagcaaaccggcatggcctgagcgaaccttcggagataacgtcccccattcaggcccaggatgtgaccgttgtcccttctgctccgggtcgggttcttgcttcccgaaacaccaagacgtcggtggtggtgcagtgggaccgacctaagcatgaggaggacctgctgggctactacgtggactgctgtgtggccggaaccaacctctgggagccctgcaaccacaagcccattggatacaacaggttcgtggtgcacggcttaaccacgggagagcagtacatcttccgagtcaaggcggtcaatgctgtggggatgagtgaaaattcccaggaatcagacgtcataaaagtgcaggccgcactcaccgtcccgtcccatccttatgggattacgctcctcaactgtgacggccactccatgaccctcggctggaaggtcccgaaattcagtggtggctcgcccatcctgggctactacctggacaagcgtgaagttcaccataaaaactggcacgaggtcaattcctcacccagcaaaccgacaatcctaacggtggacggcttgacggaaggctcactctacgagttcaaaatcgccgccgtcaacctggccggcatcggggagccctcagatcccagtgagcacttcaagtgtgaggcctggaccatgccggagcccggtcctgcctacgacttgacgttctgtgaggtcagggacacgtccttggtcatgctgtggaaggcccctgtgtactccggcagcagccctgtttctggatatttcgtggacttcagggaggaggatgctggagagtggatcactgtaaatcagacgacaacagccaaccgttatttaaaggtctctgacctgcagcaaggtaagacctatgtcttcagggtccgggcagtcaatgcaaatggcgtggggaagccctcagacacgtcggagcctgtgctggtagaggcgagaccaggcaccaaggaaatcagtgctggtgtcgatgaacaaggcaacatctatctgggcttcgactgccaggaaatgacagacgcgtctcagttcacctggtgtaaatcctacgaggagatttcagatgatgagaggtttaaaatcgaaaccgtgggggatcactccaagctgtacttaaagaatccggataaggaggatttagggacttactccgtgtctgtaagtgatacagacggagtgtcctccagttttgttctggacccagaagagctcgagcgtttgatggcattgagcaatgaaataaagaaccccacaattcctctgaaatcggaattagcttatgagatttttgataaggggcgggttcgcttctggctccaggctgagcacttatcaccagatgccagctaccgatttattattaacgacagagaagtctctgacagcgagatacacagaattaaatgtgacaaagctactggcattattgagatggtgatggatcgatttagtattgaaaatgaggggacctacactgtgcagattcatgatgggaaagccaaaagtcagtcttctctagttcttattggagatgcattcaagactgtgctggaagaggctgagtttcaaaggaaagaatttctcaggaaacaaggccctcattttgctgagtacttgcactgggatgtcacggaagaatgtgaagttcgacttgtttgcaaggttgcaaacaccaagaaagaaaccgttttcaaatggctcaaggatgatgttctgtatgaaacggagacactgcctaacctggagaggggaatctgtgagctcctcatcccaaagttgtcaaagaaggaccacggtgaatacaaggcaaccttgaaagatgacagaggccaagatgtgtccatccttgaaatagctggcaaagtgtatgatgatatgattttggcaatgagtagagtctgtgggaaatctgcttcgccactgaaggtactctgcaccccagaaggaatacgacttcagtgtttcatgaagtattttacagacgaaatgaaagtgaactggtgtcacaaagatgctaagatctcatccagtgagcatatgagaatcggggggagtgaagagatggcttggctgcagatatgtgagccgactgagaaggataaaggaaaatacacttttgagattttcgatggcaaagacaaccatcaacgctcccttgacctgtccggacaagcttttgatgaagcatttgcagaattccagcaattcaaagctgctgcttttgcagagaagaatcgtggcaggttgatcggcggcttgcctgacgtggtgaccatcatggaagggaagaccttgaatctgacctgcacggtgtttggaaaccctgaccccgaagtgatttggttcaagaacgaccaggacatccagctcagcgagcacttctcggtgaaggtggagcaggccaagtacgtcagcatgaccatcaaaggcgtgacctccgaggactcgggcaagtacagcatcaacatcaagaataagtatggcggggagaagatcgacgtgacagtgagcgtgtacaaacacggggagaagatcccggacatggccccgccccagcaagccaagcccaagctcatccccgcgtctgcctcagcggcaggccagtgaaggcgttttcctagcctggagatgggaaaatatgcttggcagagacaggaatgctgtgtgcttgttccaaatgagcagctggcatccgagtggtgtcctgtgtgggctgatagttgatcacacattgtgcttttgatttttgcatttggtgatgaatattttatacccgtctaagggagaaagctaatgttttccacaagactgaacaacgtgtatttacacgagggtagacggcagatgcctgacagagagtgggttggcagacaacacactagcattttcacgggtgtgggcacatgggtgtggcacctggacgtgtgcagcatgtggcggtctgtgtgaagccaccgtgcttctctttggggggccgcgagatctagcatctctgaaatcctggctgtcgaggctttgaagcatgtgttacctggttaagcttgttttctcttgctttaggcaaataaaagtttaaaaatca

SEQ ID NO: 156673 - DNA, 3328 bp, Homo sapiens
  Payload ID: 10713
  Gene Symbol: MYOM2
  Gene Name: myomesin 2
  ENST ID: ENST00000633850
  CDS Start-End: 182-2854
gcaggagtcagctctgccttcctcggctggagtgtgggtggcttggtgagccggtggtcaggaattctctctcctccttgcaattttcctttctgtctggtcggtggtggggagcggcagctggcagagagtcaacgcccagacggctgtgagatccccgagatatgccgtgtttgacctcatggaagggaagtcttatgtgttccgagtgctgtcagcaaaccggcatggcctgagcgaaccttcggagataacgtcccccattcaggcccaggatgtgaccgttgtcccttctgctccgggtcgggttcttgcttcccgaaacaccaagacgtcggtggtggtgcagtgggaccgacctaagcatgaggaggacctgctgggctactacgtggactgctgtgtggccggaaccaacctctgggagccctgcaaccacaagcccattggatacaacaggttcgtggtgcacggcttaaccacgggagagcagtacatcttccgagtcaaggcggtcaatgctgtggggatgagtgaaaattcccaggaatcagacgtcataaaagtgcaggccgcactcaccgtcccgtcccatccttatgggattacgctcctcaactgtgacggccactccatgaccctcggctggaaggtcccgaaattcagtggtggctcgcccatcctgggctactacctggacaagcgtgaagttcaccataaaaactggcacgaggtcaattcctcacccagcaaaccgacaatcctaacggtggacggcttgacggaaggctcactctacgagttcaaaatcgccgccgtcaacctggccggcatcggggagccctcagatcccagtgagcacttcaagtgtgaggcctggaccatgccggagcccggtcctgcctacgacttgacgttctgtgaggtcagggacacgtccttggtcatgctgtggaaggcccctgtgtactccggcagcagccctgtttctggatatttcgtggacttcagggaggaggatgctggagagtggatcactgtaaatcagacgacaacagccaaccgttatttaaaggtctctgacctgcagcaaggtaagacctatgtcttcagggtccgggcagtcaatgcaaatggcgtggggaagccctcagacacgtcggagcctgtgctggtagaggcgagaccaggcaccaaggaaatcagtgctggtgtcgatgaacaaggcaacatctatctgggcttcgactgccaggaaatgacagacgcgtctcagttcacctggtgtaaatcctacgaggagatttcagatgatgagaggtttaaaatcgaaaccgtgggggatcactccaagctgtacttaaagaatccggataaggaggatttagggacttactccgtgtctgtaagtgatacagacggagtgtcctccagttttgttctggacccagaagagctcgagcgtttgatggcattgagcaatgaaataaagaaccccacaattcctctgaaatcggaattagcttatgagatttttgataaggggcgggttcgcttctggctccaggctgagcacttatcaccagatgccagctaccgatttattattaacgacagagaagtctctgacagcgagatacacagaattaaatgtgacaaagctactggcattattgagatggtgatggatcgatttagtattgaaaatgaggggacctacactgtgcagattcatgatgggaaagccaaaagtcagtcttctctagttcttattggagatgcattcaagactgtgctggaagaggctgagtttcaaaggaaagaatttctcaggaaacaaggccctcattttgctgagtacttgcactgggatgtcacggaagaatgtgaagttcgacttgtttgcaaggttgcaaacaccaagaaagaaaccgttttcaaatggctcaaggatgatgttctgtatgaaacggagacactgcctaacctggagaggggaatctgtgagctcctcatcccaaagttgtcaaagaaggaccacggtgaatacaaggcaaccttgaaagatgacagaggccaagatgtgtccatccttgaaatagctggcaaagtgtatgatgatatgattttggcaatgagtagagtctgtgggaaatctgcttcgccactgaaggtactctgcaccccagaaggaatacgacttcagtgtttcatgaagtattttacagacgaaatgaaagtgaactggtgtcacaaagatgctaagatctcatccagtgagcatatgagaatcggggggagtgaagagatggcttggctgcagatatgtgagccgactgagaaggataaaggaaaatacacttttgagattttcgatggcaaagacaaccatcaacgctcccttgacctgtccggacaagcttttgatgaagcatttgcagaattccagcaattcaaagctgctgcttttgcagagaagaatcgtggcaggttgatcggcggcttgcctgacgtggtgaccatcatggaagggaagaccttgaatctgacctgcacggtgtttggaaaccctgaccccgaagtgatttggttcaagaacgaccaggacatccagctcagcgagcacttctcggtgaaggtggagcaggccaagtacgtcagcatgaccatcaaaggcgtgacctccgaggactcgggcaagtacagcatcaacatcaagaataagtatggcggggagaagatcgacgtgacagtgagcgtgtacaaacacggggagaagatcccggacatggccccgccccagcaagccaagcccaagctcatccccgcgtctgcctcagcggcaggccagtgaaggcgttttcctagcctggagatgggaaaatatgcttggcagagacaggaatgctgtgtgcttgttccaaatgagcagctggcatccgagtggtgtcctgtgtgggctgatagttgatcacacattgtgcttttgatttttgcatttggtgatgaatattttatacccgtctaagggagaaagctaatgttttccacaagactgaacaacgtgtatttacacgagggtagacggcagatgcctgacagagagtgggttggcagacaacacactagcattttcacgggtgtgggcacatgggtgtggcacctggacgtgtgcagcatgtggcggtctgtgtgaagccaccgtgcttctctttggggggccgcgagatctagcatctctgaaatcctggctgtcgaggctttgaagcatgtgttacctggttaagcttgttttctcttgctttaggcaaataaaagtttaaaaatc

SEQ ID NO: 156674 - DNA, 2693 bp, Homo sapiens
  Payload ID: 10714
  Gene Symbol: MYOM3
  Gene Name: myomesin 3
  Uniprot ID: Q5VTT5
  ENST ID: ENST00000338909
  CDS Start-End: 372-1364
acacggtaagagggagagcccaggtttgaacaagtctatctgattccaaagcctaaggtccttcttagcactcttcagcctgtttagataactggggaaggggagggtgggtgctctcccagaagcatattcattcagtaaactcagagcatctattttgtgccactctgcacggtactgaacgtacaaagatgatgaagtggtctctgtgggccttgggagcccatgttcaaggcaggaccattggaaaacagcatccctcatgcttgacccggatggggcaggacattgatgaatcgtgatggagggggtgactatgggatgcttcaaaaaaaaggcttcctggaggagatgacatttaactgaagcacatggacatttccaagaaaaatagagtaaggcagggatcaagaggcagagggaaaaccattagcaagaattcagagtccagaggccagcagaggagacacatggtgaccaacaccaagaaggagactcgctttcagtggttcttccagagggcagagatgccagatggtcagtatgacccagagacgggaacgggacttctctgcattgaagagttgtccaaaaaggacaagggaatttacagagcgatggtttctgacgatcgaggggaggacgacaccatattggacctcacgggtgacgccctggatgccatcttcaccgagttgggcaggattggtgccctctctgcaactccactgaaaatccaggggaccgaggaagggatccggatcttcagcaaggtcaagtactacaacgtggagtacatgaaaaccacctggttccacaaagacaaacgtctggagagtggtgatcggataaggacgggcaccaccctggatgagatctggcttcacatcctggaccccaaagactcagacaagggcaaatacactctggaaatagctgcagggaaggaagtccggcagctctcaacagatctctcagggcaagcttttgaggatgcaatggctgaacaccagagactgaaaaccttggccatcatcgagaagaatcgtgccaaagtggtgagaggtctgccggatgtggccactatcatggaagataagaccctgtgcttgacttgcatcgtctcaggagaccccacccctgaaatctcttggctgaagaatgaccagcctgtcaccttccttgaccgataccgcatggaagtgagggggacagaggtcaccatcaccattgagaaggtcaacagtgaagacagcggccgctacggcgtcttcgtcaagaacaagtatggctccgagacgggccaggtcaccatcagtgtgttcaagcacggggacgagcccaaggagctgaagagcatgtgacagcgtgtgtccaggcacagtctgagtctagtctacatggaccagtagggacaacctgtaccagggtcacagcctggcacaggctacaggggtggggcagaaggaaaggggacaagatagaacccaggatgtgagggtgggggtggagcggatgcaccaaagtggagaagcaaagatctttctggggtcctgagtggcttccaggagagcgggatgaaccctggacctggagtaggagacccggatgcactggggctatctaacagtactggcatctgataggtagaggtcaggtacgctgctaaacactgcagctcccaccacatagaattatccgaccccagatgtcaaaagtgccaagggccatgagccctgccataaactgatacatcgcacccctcttttaggatcccatagtttcaattcatgtaagttcaacagacacctgaagtctagcatgtgggaggctgaggatggagctgggaacacaaaggcagctgataagcaggttctgcttgcaaagaggcctcagtccagtgggagaaacagacctgggcgcaaacaactccaggacaaggcaggacatgataaagattataaagcaggtccaaggaaagtgccgccagtggtccaaggagggagacagagggtcgtcccaacagggggaggtagggctttgaaaacaccttcatccaggctgggcgaggtggctcacgcctgtaatcccagtagtttgggaggccaaggcgggcagatcacctgaggtcaggagttttagaccagcctggccaacatgacgaaacccggtctctactaaaaatacaaaaattagccaggcatggtggcaggtgcctgtaatcccggctattcagaaggccgaggtgggagaatccgttgaacctgggaggcggaggttgtgatgagccaagattgagccaaaaaaaaattagcagaattggtgttgggccctgaaaaattagtccgattttgtggtggtaatgggagaaggacatcccaggagcagggtctggtgggaggaaagggaaggaggaggctaaggctgcccaggaggccttggataccaggcttggagctggtaacctccagggcttccagcacggggcctctgcctggtgtgacagataccggctggcctcacttgatggatctcagtactgagctgggcatttctctgccccccaacttttttctttttaaaaataagatggggagtgttcataaaattatagatgtttgttgtaaaattttggaaaaccctggaaattatagagaaaataaacataatctatactcccaacaccacaaagt

SEQ ID NO: 156675 - DNA, 5804 bp, Homo sapiens
  Payload ID: 10714
  Gene Symbol: MYOM3
  Gene Name: myomesin 3
  Uniprot ID: Q5VTT5
  ENST ID: ENST00000374434
  CDS Start-End: 164-4477
agtgctgctatatttaagacggtgcagtctccgggatcgcattcttctcccggtgcccgctgagccgagggcaagaagagaacaaggaccctctcggcctcaggaatcttctccccagagactcctaagtgggcacactgcttctgttgttgctctcgtaaccatgactctgccgcacagcttgggaggtgcgggggacccccggcccccccaggccatggaggttcacaggctggagcaccggcaggaggaggagcagaaggaggagcggcagcacagcctgcgcatgggctcctctgtgcggaggcggaccttccgcagcagcgaagaagagcatgagttcagcgccgcggactacgccctggcagcagccctggctctgacggcctcctccgagctgtcttgggaagcccagctgagacgccagacctctgccgtggagctggaggagcgagggcagaagcgggtgggcttcggcaatgactgggagaggactgagatcgccttcctgcagacccaccggctgctgcgccagaggcgggactggaagacgctgaggcggcggacagaggagaaggtccaggaggccaaggagctgagggagctgtgctacggccgcgggccctggttctggatccctcttcgctcccacgccgtctgggagcacaccacggtcctgctgacctgcactgtccaggcctcaccaccaccccaggtcacctggtacaaaaatgacacacggattgatccccgcctctttcgtgccggaaaataccgaatcaccaacaactacgggctgctgtccctggagattaggagatgcgccattgaggactcagcaacttacactgtgcgagtgaagaacgcccacggccaggcctcctccttcgccaaagtcctcgtccgcacttacctggggaaggatgctggcttcgattcagagatcttcaaaagatcgacgtttggccccagcgtggaattcacctcggtgctgaagccagtctttgctcgtgagaaggaacccttctccctgtcatgcttgttttcggaagatgtgttagatgctgagagcatccagtggttccgagatgggagcctactgaggtcctcgagacgtcggaagatcctctacacagaccgccaggcatccctgaaggtgtcctgcacctacaaggaggacgaggggctctacatggtccgggtgccctcgcccttcggaccccgggaacagagcacctacgtgcttgtgagagatgccgaggccgagaaccccggggccccaggctccccactgaacgtccgatgcctggatgtgaacagagactgcctcatcctgacttgggccccgcccagtgacacccggggcaaccccatcactgcctacaccattgagcggtgccagggcgagtctggggaatggatcgcctgccatgaggcccccggagggacttgtcggtgcccaatccaaggcctcgtcgaaggtcagagctatcggttccgggtgagagccatcagcagggtaggcagcagcgtcccctccaaggcctcagagttggttgtcatgggtgaccatgatgcagcccggaggaagacagagatcccctttgatctgggaaacaagatcaccatcagcacagacgcttttgaagatactgtgaccatcccctcaccgccaaccaatgtccatgccagcgagatccgagaggcctatgtggttctggcctgggaggagcccagcccccgggacagagcaccactgacgtactccctggagaagtcagtcataggtagtggcacctgggaggccatcagctcggaaagccctgtgagatccccgagattcgccgttctggacctggagaaaaagaagtcgtatgtcttcagagtgcgagcaatgaaccagtatggcctgagcgatccctcggagcccagcgaacccatcgccttgcggggcccgccagctaccctccctcctccagctcaagttcaagctttcagagacacacagacctctgtctccctgacatgggatcctgtgaaagacccagagctcctgggttattacatctactcccggaaggtggggacatctgagtggcaaacagttaacaacaaacccatccaaggcaccaggtttacagttcccgggctgaggacggggaaggagtacgagttttgtgtcaggtcagtcagcgaggctggggtaggcgagagctcagccgccaccgagcccatcagggtcaagcaggctctggctaccccgtctgccccatatggctttgccctcctgaactgcgggaagaatgaaatggtcattgggtggaaaccccccaagcgtcgtggaggtggcaagatcctgggctacttcctggaccagcatgactcggaagagctggactggcatgcggtcaatcagcagcccatccccacccgggtctgcaaggtcagtgaccttcatgaaggccacttctatgagttccgtgcccgggctgccaactgggcaggtgttggcgagctgtcggcacccagcagcctgtttgagtgcaaagagtggacaatgccccagccaggccccccgtacgatgtacgggcatccgaggtgcgggccacatccctggtgctgcagtgggaacccccactgtatatgggggctgggcctgtcacaggctatcacgtcagtttccaggaggaaggctctgagcagtggaagccggtcaccccaggccccatctctggcacccacctgagggtttccgacttgcagccaggaaagagttacgtgttccaggtacaggccatgaattcagctggtctggggcaaccgtccatgcccactgatcccgtgctcctggaggacaagccaggtgcccatgagatcgaggttggtgtggatgaagagggctttatctatttggcttttgaagcccctgaagcccccgactcctcagagtttcagtggtccaaagactacaagggcccactggacccccagagggtcaagatcgaggataaagttaacaagtccaaggtcatcctgaaagaacccggcctcgaggatttgggcacctactcagtcatagtcactgatgccgatgaagacatctccgcaagccacacgctaaccgaggaagagctggagaagctgaagaagctgagtcatgagatcagaaacccagtgatcaaactgatctccggctggaacattgacatcctggagcgaggggaggtgcggctttggctggaagtagaaaagttatctccagccgctgagctacatctaatcttcaacaacaaggagatcttcagctcgccgaaccgcaaaatcaattttgaccgagagaagggcctggtggaagtgatcatccagaacttgtctgaggaggacaaagggtcgtacaccgctcaactccaagatggaaaagccaaaaaccagattaccttgacactggtggatgacgattttgacaagcttctgaggaaggcagatgctaagagaagggactggaagagaaaacagggtccctattttgagcggccgttgcagtggaaggtcacggaggactgccaagtgcagctgacgtgcaaggtgaccaacaccaagaaggagactcgctttcagtggttcttccagagggcagagatgccagatggtcagtatgacccagagacgggaacgggacttctctgcattgaagagttgtccaaaaaggacaagggaatttacagagcgatggtttctgacgatcgaggggaggacgacaccatattggacctcacgggtgacgccctggatgccatcttcaccgagttgggcaggattggtgccctctctgcaactccactgaaaatccaggggaccgaggaagggatccggatcttcagcaaggtcaagtactacaacgtggagtacatgaaaaccacctggttccacaaagacaaacgtctggagagtggtgatcggataaggacgggcaccaccctggatgagatctggcttcacatcctggaccccaaagactcagacaagggcaaatacactctggaaatagctgcagggaaggaagtccggcagctctcaacagatctctcagggcaagcttttgaggatgcaatggctgaacaccagagactgaaaaccttggccatcatcgagaagaatcgtgccaaagtggtgagaggtctgccggatgtggccactatcatggaagataagaccctgtgcttgacttgcatcgtctcaggagaccccacccctgaaatctcttggctgaagaatgaccagcctgtcaccttccttgaccgataccgcatggaagtgagggggacagaggtcaccatcaccattgagaaggtcaacagtgaagacagcggccgctacggcgtcttcgtcaagaacaagtatggctccgagacgggccaggtcaccatcagtgtgttcaagcacggggacgagcccaaggagctgaagagcatgtgacagcgtgtgtccaggcacagtctgagtctagtctacatggaccagtagggacaacctgtaccagggtcacagcctggcacaggctacaggggtggggcagaaggaaaggggacaagatagaacccaggatgtgagggtgggggtggagcggatgcaccaaagtggagaagcaaagatctttctggggtcctgagtggcttccaggagagcgggatgaaccctggacctggagtaggagacccggatgcactggggctatctaacagtactggcatctgataggtagaggtcaggtacgctgctaaacactgcagctcccaccacatagaattatccgaccccagatgtcaaaagtgccaagggccatgagccctgccataaactgatacatcgcacccctcttttaggatcccatagtttcaattcatgtaagttcaacagacacctgaagtctagcatgtgggaggctgaggatggagctgggaacacaaaggcagctgataagcaggttctgcttgcaaagaggcctcagtccagtgggagaaacagacctgggcgcaaacaactccaggacaaggcaggacatgataaagattataaagcaggtccaaggaaagtgccgccagtggtccaaggagggagacagagggtcgtcccaacagggggaggtagggctttgaaaacaccttcatccaggctgggcgaggtggctcacgcctgtaatcccagtagtttgggaggccaaggcgggcagatcacctgaggtcaggagttttagaccagcctggccaacatgacgaaacccggtctctactaaaaatacaaaaattagccaggcatggtggcaggtgcctgtaatcccggctattcagaaggccgaggtgggagaatccgttgaacctgggaggcggaggttgtgatgagccaagattgagccaaaaaaaaattagcagaattggtgttgggccctgaaaaattagtccgattttgtggtggtaatgggagaaggacatcccaggagcagggtctggtgggaggaaagggaaggaggaggctaaggctgcccaggaggccttggataccaggcttggagctggtaacctccagggcttccagcacggggcctctgcctggtgtgacagataccggctggcctcacttgatggatctcagtactgagctgggcatttctctgccccccaacttttttctttttaaaaataagatggggagtgttcataaaattatagatgtttgttgtaaaattttggaaaaccctggaaattatagagaaaataaacataatctatactcccaacaccacaaa

SEQ ID NO: 156676 - DNA, 4999 bp, Homo sapiens
  Payload ID: 10715
  Gene Symbol: MYNN
  Gene Name: myoneurin
  Uniprot ID: Q9NPC7
  ENST ID: ENST00000349841
  CDS Start-End: 664-2496
aggtaagggcatcttggaagctgagctacagttggctggggcacaaaaaaaccagggggtgccaagagttttcaggtacgtaagcgggaaaggggtgccaagtctcagctaaaaaatcccctatggcagagatccgagtacacatgcagcagtttccaccggtggggccccgaggaaggggaggatgatgggagaagacaagcaactacaagcccccgcacgcagtgcgcagctggcttcaggagagaggcccgcggtgctgtgctgccgggcctcggcgcagagccccggcagagcgccagacgctgactgccggcaccagaatgctcgcgatgaggaagacaggcggagcgctgcgagctagcgagccctcagctctcgtatccatgacgcctgctgcttcgggggacccctggcatgctggggagtgggtctctgtggtacatcctgtaccgccctggccggcgccggacccccatggccccagaacctcccgcactgccacgggaagacagagccggacgtgacgccaccgtggaaggaagggaggggcggagcgtggctcggtgacgtcctcccaagatggcggagacagagtgaagaaactgtgttccccccttgggttgctatcgatcaagggtaaaattccattctgatatcaaaatgcagtattcgcaccactgtgagcaccttttagagagactgaacaaacagcgggaagcaggttttctctgtgactgtaccatagtgattggggaattccagtttaaagctcataggaatgtgctggcctcctttagtgagtattttggtgcgatctacagaagcacttctgagaacaatgtctttcttgatcagagtcaggtgaaggctgatggatttcagaaactgttggagtttatatacacaggaactttaaatcttgacagttggaatgttaaagaaattcatcaggctgctgactatctcaaagtggaagaggtggtcactaaatgcaaaataaagatggaagattttgcttttattgctaatccttcttctacagagatatctagtattactggaaacattgaattgaatcaacagacttgtcttcttactctgcgagattataataatcgagagaaatcagaagtatctacagatttgattcaggcaaatcctaaacaaggcgcgttagcgaaaaagtcatctcaaacgaaaaagaagaagaaggctttcaactccccgaaaacagggcagaataaaacagtgcaatatcccagtgacatcttagagaatgcatctgttgaattattcctagatgcaaataaactgcccacacctgtagtagaacaagttgcacaaataaatgataattcagaactcgagttgacatcagttgtggaaaatacttttccagcacaagatattgtgcacactgttacagtgaaacggaaacgtggaaaatcacagccaaactgtgctctgaaagaacactctatgtctaatatagccagcgtcaagagtccttatgaggcggagaactccggggaagagctggatcagaggtattccaaggccaagccaatgtgtaacacatgtgggaaagtgttttcagaagccagcagtttgagaaggcacatgagaatacataaaggagtcaaaccttacgtctgccacttatgtggaaaggcatttacccaatgtaaccagctgaaaacgcatgtaagaactcatacaggtgagaagccatacaaatgtgaattgtgtgataaaggatttgctcagaaatgtcagctagtcttccatagtcgcatgcatcatggtgaagaaaaaccctataaatgtgatgtatgcaacttacagtttgcaacttctagcaatctcaagattcatgcaaggaagcatagtggagagaagccatatgtctgtgataggtgtggacagagatttgctcaagccagcacactgacctatcatgtccgtaggcatactggagaaaagccttatgtatgtgatacctgtgggaaggcatttgctgtctctagttctcttatcactcattctcgaaaacatacaggtgaaaaaccatacatatgtggtatttgtgggaaaagttttatttcctcaggagagctcaacaaacactttcggtcccatacaggagaaagaccatttatctgcgaattatgtggaaattcttacacagatattaaaaatttaaagaagcacaaaacaaaagtccattctggtgcagataaaactctagactccagtgcagaggatcatactttgagtgaacaggattccatacaaaaaagtcctttatcagaaactatggatgtgaagccttctgatatgactttaccattagctcttccacttgggactgaggaccatcacatgcttctgcctgtcacggatactcagtctcctacatcagatacattgttgaggtcaactgtgaatgggtattcagaaccacagttgatttttttacaacaattatactgactttgtaaggaatatggaattgctaagatatcattggtagcaaacatctctggtaaggtgcatatattcatattaaattcccattcatttgagttgtgaccattatttttcattcactgaagtaaaagcacctgatgctgcatcacaactgcaatgtttgtttttatttttggctttatgtctatactccacagagagctttttaagtaatgaattatgtagcactattttgggtggatgagttttattttcttttaaagctgccttaattccatttttattttgcattttagaattgcccttcatttactaaatcagccagttaatgtgattcagttgtgacctgtgggattttaaaattttcctgccctcataatttaagcaaaatccacgatagtatcagcccaagagtgtgttgctatttgtaagccccatggatcaatacataaactatgcataaaaataaaatttcatattttcgctcgtaaaaatttaggcgctgaataagaattgtgctatttctctattaatatattgttagaaataacttttctaatgaaacaaaaatgtttctcaaaatctagaaaagtgcatataaatttttgttcatttagaactgagtattctggagaaaaccaatggtcagcacttttggtttgagttatctgagattgtattttcaaaatgaattttaagtagatatttggtgtttttatcttgtcaaagacagtttcaaaatttgattcagtttatgttttattccgttctaaaatattggagatgaggaaaatgtacttgagttttgaaatattttggtaagcctctcttactcctgttatgcactttttaaaataaatactgaattccagaaagaattttctagatataaacttaatgcatactagaaatcacttggcttctaaatttggtacattatattgcataaagagttaagaaattaacctcaattataagtaaacattttgagttaccagaaagccaactatagttaaatattttatatctgagttttctataagtttggggtttgttaattttataaattaaaccacaacttttggtggtggttgtagtttcacaatggtccttttccttccaaatgaatgtagaaaattcgttattatcctgatatttgcaccactcatccccatgccacttttcccacatattaatttatttcactgcctgatctttggatatgaaattatgagttccacaaagtcaatttttatagtgccaatcaaacagcatggtgatattctttttctttttttttccccccacaaggctgttgttcagtgtgagatgacatcatttcttatttctgccatgctgtggcttttttgtgttctgcttttaaactacacctgtagtacagttaatatgttttttattggtattgatttctttaattcattaattttctctatttgggacccaagtcataagaaccaattagaggacataataaaaacacttaatgcttgtagtctgtagagatcttcaccatttcacagcacacacattattttcataataaattgccactggtgggacatgggactgacttatttgaatagagtttgaaataccacctttgtatgatgcaaacaatatttgattattttatctaagaaatctatgcatgtgtatcaagttaaaatagtgggtttaaatacaatttacaaagcattagaatgttacctaatctcttctgggttaaatgtgataggaatgtattggaatgtgaagaaattatagaaaattaaaagactcagcctctttaggaagtttgctaaaatggagaggttatgtttaatttatttatatcttcgttaatccaagcatctaatgaacaaaaaactgctacagtgacgtcataattctataagggcaatagttgccaaatttcctctggtattattagcattctgcctttgcatagattagccttcaaatttattatttttagtattatttgatacgattgaagtggctaagattgattgagcttttcttgatcacattttctgcttcttagctaaagtaattttatttaaattgacatggcttgagttgtcatcattttctgctcttctagaatgatgtgtagagaaaacttgaagatactatcccttctttggcattcttctcttaatgctatgctattatttatcataatatgcatatatttagttgtatctggtatcattctaacactcataactaccattttagttaagtccaactttatatttgttacaatgcagtgttttgggaaaggtctattagtaattatttaagtattacatatttttatggaagtctttagaaggtgaagatcttactgagaaactattttctaaataaatttaattttcttttgtatttgtatcagatcatgcctactgtatgttagattttagactattttaaaagaaaccgtagattatataaaaatttttttgctgtttttaaatgg

SEQ ID NO: 156677 - DNA, 2833 bp, Homo sapiens
  Payload ID: 10715
  Gene Symbol: MYNN
  Gene Name: myoneurin
  Uniprot ID: Q9NPC7
  ENST ID: ENST00000356716
  CDS Start-End: 135-1967
gtgaagaaactgtgttccccccttgggttgctatcggtggtagaagtgttgccattcaccgtcacttattgatgtgtccaaaggattgtgttagttgatcaagatcaagggtaaaattccattctgatatcaaaatgcagtattcgcaccactgtgagcaccttttagagagactgaacaaacagcgggaagcaggttttctctgtgactgtaccatagtgattggggaattccagtttaaagctcataggaatgtgctggcctcctttagtgagtattttggtgcgatctacagaagcacttctgagaacaatgtctttcttgatcagagtcaggtgaaggctgatggatttcagaaactgttggagtttatatacacaggaactttaaatcttgacagttggaatgttaaagaaattcatcaggctgctgactatctcaaagtggaagaggtggtcactaaatgcaaaataaagatggaagattttgcttttattgctaatccttcttctacagagatatctagtattactggaaacattgaattgaatcaacagacttgtcttcttactctgcgagattataataatcgagagaaatcagaagtatctacagatttgattcaggcaaatcctaaacaaggcgcgttagcgaaaaagtcatctcaaacgaaaaagaagaagaaggctttcaactccccgaaaacagggcagaataaaacagtgcaatatcccagtgacatcttagagaatgcatctgttgaattattcctagatgcaaataaactgcccacacctgtagtagaacaagttgcacaaataaatgataattcagaactcgagttgacatcagttgtggaaaatacttttccagcacaagatattgtgcacactgttacagtgaaacggaaacgtggaaaatcacagccaaactgtgctctgaaagaacactctatgtctaatatagccagcgtcaagagtccttatgaggcggagaactccggggaagagctggatcagaggtattccaaggccaagccaatgtgtaacacatgtgggaaagtgttttcagaagccagcagtttgagaaggcacatgagaatacataaaggagtcaaaccttacgtctgccacttatgtggaaaggcatttacccaatgtaaccagctgaaaacgcatgtaagaactcatacaggtgagaagccatacaaatgtgaattgtgtgataaaggatttgctcagaaatgtcagctagtcttccatagtcgcatgcatcatggtgaagaaaaaccctataaatgtgatgtatgcaacttacagtttgcaacttctagcaatctcaagattcatgcaaggaagcatagtggagagaagccatatgtctgtgataggtgtggacagagatttgctcaagccagcacactgacctatcatgtccgtaggcatactggagaaaagccttatgtatgtgatacctgtgggaaggcatttgctgtctctagttctcttatcactcattctcgaaaacatacaggtgaaaaaccatacatatgtggtatttgtgggaaaagttttatttcctcaggagagctcaacaaacactttcggtcccatacaggagaaagaccatttatctgcgaattatgtggaaattcttacacagatattaaaaatttaaagaagcacaaaacaaaagtccattctggtgcagataaaactctagactccagtgcagaggatcatactttgagtgaacaggattccatacaaaaaagtcctttatcagaaactatggatgtgaagccttctgatatgactttaccattagctcttccacttgggactgaggaccatcacatgcttctgcctgtcacggatactcagtctcctacatcagatacattgttgaggtcaactgtgaatgggtattcagaaccacagttgatttttttacaacaattatactgactttgtaaggaatatggaattgctaagatatcattggtagcaaacatctctggtaaggtgcatatattcatattaaattcccattcatttgagttgtgaccattatttttcattcactgaagtaaaagcacctgatgctgcatcacaactgcaatgtttgtttttatttttggctttatgtctatactccacagagagctttttaagtaatgaattatgtagcactattttgggtggatgagttttattttcttttaaagctgccttaattccatttttattttgcattttagaattgcccttcatttactaaatcagccagttaatgtgattcagttgtgacctgtgggattttaaaattttcctgccctcataatttaagcaaaatccacgatagtatcagcccaagagtgtgttgctatttgtaagccccatggatcaatacataaactatgcataaaaataaaatttcatattttcgctcgtaaaaatttaggcgctgaataagaattgtgctatttctctattaatatattgttagaaataacttttctaatgaaacaaaaatgtttctcaaaatctagaaaagtgcatataaatttttgttcatttagaactgagtattctggagaaaaccaatggtcagcacttttggtttgagttatctgagattgtattttcaaaatgaattttaagtagatatttggtgtttttatcttgtcaaagacagtttcaaaatttgattcagtttatgttttattccgttctaaaatattggagatgaggaaaatgtacttgagttttgaaatattttggtaagcctctcttactcctgttatgcactttttaaaataaatactgaattc

SEQ ID NO: 156678 - DNA, 4815 bp, Homo sapiens
  Payload ID: 10715
  Gene Symbol: MYNN
  Gene Name: myoneurin
  Uniprot ID: Q9NPC7
  ENST ID: ENST00000544106
  CDS Start-End: 32-1777
atcaagggtaaaattccattctgatatcaaaatgcagtattcgcaccactgtgagcaccttttagagagactgaacaaacagcgggaagcaggttttctctgtgactgtaccatagtgattggggaattccagtttaaagctcataggaatgtgctggcctcctttagtgagtattttggtgcgatctacagaagcacttctgagaacaatgtctttcttgatcagagtcaggtgaaggctgatggatttcagaaactgttggagtttatatacacaggaactttaaatcttgacagttggaatgttaaagaaattcatcaggctgctgactatctcaaagtggaagaggtggtcactaaatgcaaaataaagatggaagattttgcttttattgctaatccttcttctacagagatatctagtattactggaaacattgaattgaatcaacagacttgtcttcttactctgcgagattataataatcgagagaaatcagaagtatctacagatttgattcaggcaaatcctaaacaaggcgcgttagcgaaaaagtcatctcaaacgaaaaagaagaagaaggctttcaactccccgaaaacagggcagaataaaacagtgcaatatcccagtgacatcttagagaatgcatctgttgaattattcctagatgcaaataaactgcccacacctgtagtagaacaagttgcacaaataaatgataattcagaactcgagttgacatcagttgtggaaaatacttttccagcacaagatattgtgcacactgttacagtgaaacggaaacgtggaaaatcacagccaaactgtgctctgaaagaacactctatgtctaatatagccagcgtcaagagtccttatgaggcggagaactccggggaagagctggatcagaggtattccaaggccaagccaatgtgtaacacatgtgggaaagtgttttcagaagccagcagtttgagaaggcacatgagaatacataaaggagtcaaaccttacgtctgccacttatgtggaaaggcatttacccaatgtaaccagctgaaaacgcatgtaagaactcatacaggtgagaagccatacaaatgtgaattgtgtgataaaggatttgctcagaaatgtcagctagtcttccatagtcgcatgcatcatggtgaagaaaaaccctataaatgtgatgtatgcaacttacagtttgcaacttctagcaatctcaagattcatgcaaggaagcatagtggagagaagccatatgtctgtgataggtgtggacagagatttgctcaagccagcacactgacctatcatgtccgtaggcatactggagaaaagccttatgtatgtgatacctgtgggaaggcatttgctgtctctagttctcttatcactcattctcgaaaacatacaggtgaaaaaccatacatatgtggtatttgtgggaaaagttttatttcctcaggagagctcaacaaacactttcggtcccatacaggtgcagataaaactctagactccagtgcagaggatcatactttgagtgaacaggattccatacaaaaaagtcctttatcagaaactatggatgtgaagccttctgatatgactttaccattagctcttccacttgggactgaggaccatcacatgcttctgcctgtcacggatactcagtctcctacatcagatacattgttgaggtcaactgtgaatgggtattcagaaccacagttgatttttttacaacaattatactgactttgtaaggaatatggaattgctaagatatcattggtagcaaacatctctggtaaggtgcatatattcatattaaattcccattcatttgagttgtgaccattatttttcattcactgaagtaaaagcacctgatgctgcatcacaactgcaatgtttgtttttatttttggctttatgtctatactccacagagagctttttaagtaatgaattatgtagcactattttgggtggatgagttttattttcttttaaagctgccttaattccatttttattttgcattttagaattgcccttcatttactaaatcagccagttaatgtgattcagttgtgacctgtgggattttaaaattttcctgccctcataatttaagcaaaatccacgatagtatcagcccaagagtgtgttgctatttgtaagccccatggatcaatacataaactatgcataaaaataaaatttcatattttcgctcgtaaaaatttaggcgctgaataagaattgtgctatttctctattaatatattgttagaaataacttttctaatgaaacaaaaatgtttctcaaaatctagaaaagtgcatataaatttttgttcatttagaactgagtattctggagaaaaccaatggtcagcacttttggtttgagttatctgagattgtattttcaaaatgaattttaagtagatatttggtgtttttatcttgtcaaagacagtttcaaaatttgattcagtttatgttttattccgttctaaaatattggagatgaggaaaatgtacttgagttttgaaatattttggtaagcctctcttactcctgttatgcactttttaaaataaatactgaattccagaaagaattttctagatataaacttaatgcatactagaaatcacttggcttctaaatttggtacattatattgcataaagagttaagaaattaacctcaattataagtaaacattttgagttaccagaaagccaactatagttaaatattttatatctgagttttctataagtttggggtttgttaattttataaattaaaccacaacttttggtggtggttgtagtttcacaatggtccttttccttccaaatgaatgtagaaaattcgttattatcctgatatttgcaccactcatccccatgccacttttcccacatattaatttatttcactgcctgatctttggatatgaaattatgagttccacaaagtcaatttttatagtgccaatcaaacagcatggtgatattctttttctttttttttccccccacaaggctgttgttcagtgtgagatgacatcatttcttatttctgccatgctgtggcttttttgtgttctgcttttaaactacacctgtagtacagttaatatgttttttattggtattgatttctttaattcattaattttctctatttgggacccaagtcataagaaccaattagaggacataataaaaacacttaatgcttgtagtctgtagagatcttcaccatttcacagcacacacattattttcataataaattgccactggtgggacatgggactgacttatttgaatagagtttgaaataccacctttgtatgatgcaaacaatatttgattattttatctaagaaatctatgcatgtgtatcaagttaaaatagtgggtttaaatacaatttacaaagcattagaatgttacctaatctcttctgggttaaatgtgataggaatgtattggaatgtgaagaaattatagaaaattaaaagactcagcctctttaggaagtttgctaaaatggagaggttatgtttaatttatttatatcttcgttaatccaagcatctaatgaacaaaaaactgctacagtgacgtcataattctataagggcaatagttgccaaatttcctctggtattattagcattctgcctttgcatagattagccttcaaatttattatttttagtattatttgatacgattgaagtggctaagattgattgagcttttcttgatcacattttctgcttcttagctaaagtaattttatttaaattgacatggcttgagttgtcatcattttctgctcttctagaatgatgtgtagagaaaacttgaagatactatcccttctttggcattcttctcttaatgctatgctattatttatcataatatgcatatatttagttgtatctggtatcattctaacactcataactaccattttagttaagtccaactttatatttgttacaatgcagtgttttgggaaaggtctattagtaattatttaagtattacatatttttatggaagtctttagaaggtgaagatcttactgagaaactattttctaaataaatttaattttcttttgtatttgtatcagatcatgcctactgtatgttagattttagactattttaaaagaaaccgtagattatataaaaatttttttgctgtttttaaatggcatttgtcttatgtttaatttcacaggatgattttgatagacaaattttagaaaaccttttttcaaaggtaatggttctatcagtttcattccaacagtagctaatttctgtgtttcagtcctacagaaattgtgtgagtagttgaaataatgtacatgtactagtttttttaagtattctaaatagttctaacatttaatgcatatcagaaacatgcttaagaaataacaatatccaggcccaccccacctattgaatcagacagttcccagggcatatatatgctggggaagccccataggtgattttaatgtataccaaacatgtagagtctcactctgttgcccaggctggagtgcaatgacgtgatctcagctaactgcaacctctgcctcctggattcaagcaattctccggcctcagcctcctgagtagctggtactacaggtgcgcgccaccacacctgactaatttttgttagagatggggtttcattctgttggccaggctggtctcgaactcctgacctcaggt
